United States Patent Application Publication US 2025/0122569 A1 - sequence listing, part 7

SEQ ID NO: 963 - DNA, 11826 bp, unidentified
  source 1..11826: mol_type = unassigned DNA
tcagatacgggaagtatccagctttacttcgttgttgtcggcgtacttgttggggcgcaccatcaggtagatgaacgctgccagcaccacaacagctaccacggtgaacaggccgaagtgcacctcgccggtgataaggccgcccagctgatacaccaccagcgcagagcagtaagccagagcacacatgtaaccaatggcgatggccgtccacttgccgttgttcatctcgcgcttgatggcgcccatagcagcgaagcagggagcgcacagcaggttgaagatcatgaaggcgtaagcggacagagcggtgtagtcctgtgcgaccgctgcccagatctcgtcgccgttctcggaaagctcgccgccgaagtggtacagcacaccgaaggtgcccaccacgttctcctttgcaatcaggccggagacggaagcgacggttgcacgccagttgccgaagcccagaggtgcaaagatccatgcgaccttggtagcgatagcagccagcacggagttgtcctgatcctcgaccataccgaaggcaccgttctcgaagccgaagccctgcataaaccacagcacaacggtagcgagcaaaatcacagagcctgcgcgcttgatgaaggaccagccgcgctcccaagttgcccgcagcacgttgccccatgcgggcacatggtaggcgggcagctccatgacgaagggagcgggatcacctgcgaagagcttggtctttttcagcatgatgccggagcagatgatggctgccatgccgatgaagtaggcagacactgccaccagcgaggagccgccgaacattgcaccggcgatcaggccgatgatgggcatttttgcgccgcaggggataaagcaggtggtcatgatggtcatgcggcggtcacgctcgttctcgatggtacggcttgccataacgcccggcacgccgcagccggtgcccaccagcaccgggataaagctcttgccggaaaggccgaacttgcggaagatacggtccatgataaaggccacgcgggacatatagcccacgtcctccagaatggacagcaggaagaacagcaccagcatctggggcacaaagcccagcactgcgcccacaccggccacgatgccgtccatgatcaggccgtacagccagcccgccacgccgatgctctccaaaaagccgcccagcgcattgggaacgatctcgccgaacagcacatcgttggtccagtcggtggcaaaggtaccgatggcccagccgccgtccgcaatggaggtacccatggacagggagtacatcaggtacatcaccactgcaaagatgggcagtgccagcacgcggttggtaacgatccggtcgatcttatcggagatggtcaggtgctcggtgcgtgccttcttcttgactgccttgtgcaccacggtgttgatgtaggcgtagcgctggttggtgatgatgctctcggcgtcatcgtccatttctttttcgcagtcctgaatgtgctcgtcgatgtggtccaccagtgccttgtccagccccagctctgccagcaccttctcgtcccgctcgaacagcttgacggcgtaccagcgcaggaaacggtcatccaccttgccctgaatgctctcctcgatgtgggcaatggcgtgctccacactgccggtgaacacatggggcagctcgccggtcttgccggccttggcagctgccaccgcagcctttgcggcgacctcggtgccctcgcccttcagcgcactgatctccaccgcctgacagcccagctctgcgctcagcttcttcaggtcgatggtgtcgccgttcttgcgcaccagatcgatcatgttcacagccatgaccaccgggatgcccagctcgatcagctgggtggtcaggtagaggttgcgctcgatgttggtgccgtcaatgatgttcaggatagcgtctggcttctcctttacaaggtaagtacgggagaccacctcttccagcgtgtagggggacagcgagtagatgccgggcagatcctgaatgatcacgtccttgtcgcccttcagcttgccttcctttttttccacggtcacgccgggccagttgcccacgtactggttggagccggtcaggttgttgaacagggtcgttttgccgcagttcgggttgccggccagtgcaattttaatgctcattgcggatacctttcctcccttttggtcttatcagaccacttcgatcatctcagcgtcggctttgcgcacgctcagctcgtagttgcgcacggtcagctccatggggtcgcccagcggcgccaccttgcgcacatagatctgcacccccttggtgatgcccatatccatgatgcggcgcttcaccgggccttcgccgtgcagccgtgccacggtggcggtctcgcccacctttacgtctttcagtgttttcatcgtactcgttcctcccttgcagtatttcatgcagcaccgggaaggcgctgctcaggacaccatgatgcggcttgccatggtcttatccagtgccagacggctctgcttgacctgcacgatcaggttgcccgcgatctcgttgaccacggtcacttcgctgcccaccacgaaccccagctcggccagatgcagccgcacctcgtccttgccgctgattctgcggatggtgacggtctcgcctgcttttgtcatcgtcaaaggcatcatcgctgtgctccccttccataaaaatgatgtgatgctgcggtggttagtcagccgtaactatcagcgtagatagtttactgctgctaaccaagcttgtcaatagttttttcatatctcatagttagtttatatgaacaaacaaattttatgccggaaccggcctgcatttttatcaaaatcatcaatgactaactctatttcttgagctaaagttagccaatgtttacatttttaaggggcgttttgcccttttatagggcagggtgacggagaatgacttctcccgtgaaaaggcaattctggaaaatccgcagattttccagaattgcgaaataaaaataatctttccgctatttatgcgcagagcaacgcggagcgcattcaaaatcgtcccaccccgcgcgggagtgcattcccccaaacacacgaccgcccggcgcaggggtcaaagctgcaccgggcggtcatgtgtaaaaaggaggatcgctctctcctgtgtcggaagcataggagagttgccaggataaaagagagtatttgaaaagagaatatcaatttttcaggcggccactgccagctttaaaatgggcgtgccgctgtggaacagccgcaggtacaccgccgtgcacttggccagctggtcaaagtgctgccgggcggcggcggggtcgccgtaggacttccagcatccgcagcaggtaaagcacttgccccggtggcggataaagcccaccacatcctccagcggatagcccagaaataccccgatctcgtgggggaaatccgccgcctccgccgcgcagcacagccgcaggctgagctggtccagcagcgcaccgcagtccgcagcatcttccggcagacggtagccctcccgggctaaaaagccgcgcacagcggcatctgccagcaccgtctgcagcttggcggcgcggtagacgtacaccaaatactgccgggtggcaatgcacccccgcagcacccgcacctgcaggcccttggggttcagctgggcgttccagcccgccacccgccgggcaaggtcggcacggtttcgcgtttcgtagcggaacagccccgcaggcttcagccccgccagtaccggggcacattgttcgatcattacggtctcaaaatcacgctccatggcggttctcctttggcggcggtgtcagggtcagtgtgccccggatgccgggctgttatgagtaagacgtagctaaccagcacttcaaaaaagaagcagcacgcccgggctgcgggcactgccggtggggtcttatgtggttagttatttctaacgtcagtagtgtaccacagcaccaccggctgtgtcaagcctttatgacaaaaaagttatttataacaaaccacacccgcgctacccttccggcggcagtcgtggtataatggggatattctcgggtctgccccttggggcgcaccctgccaaggaggttccccccccatgcccacacccatcaccgcgtccaccctgtctgcgctgctgagcgccgcgctggcgcaaaagcccacccgcccgctggtgctggcgctggacggccgctgcggcagcggcaagaccacccttgccaacgggctggcggcgcagctgcccggctgcaccctgctgcgcacggatgatttctatctgccgcccgcgcagcgcatcccggactgggcgcacaccccctgcgccaacatggatcttacccgtctgcgggacgaagcgctgcgcctggcctacgcggggcagacggtggcctaccgggcgtacagctgccgggagggggcttatctgcccccggcacagctgcccgcgcagccgctggtgattttagagggcagttacagccaccacccactgctgcgcccctacgagacgctgcgggtattcgtgacctgcgcaaagcccgagcagacccggcgcttacaagcgcgggagggcgcacgctacgcggatttttccgcccggtgggtaccgctggaggaggggtattttgcgcagtacggcattgagacatcagcggattttgtggtagataccacccaaggcgggacgatttagaatgcgcgccgctccgcggggaaagcaagcgttgcacttgaaccaaaaactccccctgcaccgtgagatgcagggggagtttaaatttacagtctgttacttattcttgtacatatcctgatagtagttctggtagtcgccgctggtgacgtggttcatccactcttcgtggttcaggtaccagtcaatggtcagcacgatgcccttctcgaagggagtttcggggtaccagcccagatcgttcttgatcttggtggggtcgatgccatagcggcggtcgtgacccagacggtcggcaacgtgcttgatcagctcctcgctgatgccctcgtcctgcaggcggtcgtgcagctggttgatgatggtcttgacgatgaagatgttggggcgctcgttgtggccgcccacgttgtacacctcgccgatcttgccgccgtttgccaccatatcaatggccttgcagtgatcctccacatacagccagtcgcggatctgcataccgtcgccgtagacgggcagctgcttgtggtgcttgacgttgttgatcatcagggggatcagcttctccgggaactggtaggggccgtagttgttggagcagcgggtaatgttcaccggcatgccgtaggtgtcgtggaaggccatgacgaacatatcggcgctggccttggaggaggagtaggggctgtgggggcacaggggcgtggtctccataaagaagccgtctgcacccagagcgccgtacacctcatcggtggagacttgcaggtacttcttgccctctttccaagtcttggcatcggcgtcgtaccatgcctccttggcgcgctgcagcaggttgacagtgcccatcacgttgctctgcacaaagatctcggggttcttgatggagcggtccacatggctctcggcggcaaagttgatgacgtagtcgaaatcgtactttgcaaacaggctctccaccagttccttgtcgcagatgtcgccctgcacgaacacatggcgggggtcgccctccacgtccttcaggttttccagattgcccgcgtaggtcagcttatccagattgaccagcaggatctccgggtatttcttgagcatatagtgcacaaagttggaaccgataaaaccggcacagccggtgatcagataggttttcataggtcagtatccctctttatttatttgttgttgttcccggactgcgggcgggctgcggcgcgggcgcgttcctcctcggcgcagcagtgctttgccacaaggtagaggttcttgttcatgctgttcatggtcttgcccatggccttggtgtatgcttccagccctttgttcatgctgtgaagctcctcataggtggcttgggtgtaccgtgccagacccgcactcatgttgctgagctccttgtgggtctctttggtgtactccaccagctccgcgaaggcgtacagcgcccatgcaaggaacatctgcaagacccagaacaccacggcgaccaccagccccagcacgatggctgaaaactggctgatgggcttcagcatttcatggaccgcgccgcacagcatggatgcaagcacaaaggccagcacacactgcacctttgcaaggatctttaatatcttgacagatctgccaaaaatcgcatcaaacatgatacatcctcagttcttccgcaggggggattttcagttttttctcagcccttcatgccgttttcgccgtcccagtgggcgaagaagcaggccagcgcgtccttccagtcgcggacatcgttgcccacggtgcagcgcagcatccggttgtccagtgcgctccacttggggcggtcggcgctgtccgggtgctttgccttgtactcctcgctggtgcagggggcaacggtagcgtccacaccggaaaggcggatgatctcggcagcaaaatcgtaccaggagcagatgccctcgccggtgcagtggtacaggccgtactcgtgggtcacgcacagctgcaagatctcgtgggcaaggtcggcagcgttggtggggttgccgcactggtcgttgaccacttccagcttgccgaactttttgcccgcattcacgatggtcttgacaaagtttttgccgtagtagctgtacagccacgcggtgcgcacgatgaagtggcggtggcagaaccgctccacatacttttcgcccatgagcttggtagagccgtaggcgctgatgggcccgggcagggtggcttcatcctgcgggatgccgccgttctcccggccggagaacacatagtcggtagaaacgtgcaccagccgtgcgccggtcttttcggcagcctgcgccagattgcgggggccaagggcgtttgccttaaaggcatcgtcgtggtgcacctcgcacccgtccacgttggtgtaggcggcgcagttgatgatgatatccgggcggttgcgccgcacgaactcatccaccatcctgtaattggagatatccagctccggcagatccaccgggatcaccgtagcgttgagcagcttttcggggatggggcccagctcgctgcggccctcctgcagctgcttgagcagctctgtgcccagctgccccttgcagcctgtgacaatgattttcataccaatgtgcctttccttatgcttagtagcgcagcttgccgtcggccacgttcttcagatgctggccgtaggggctcttgccgtagcgctcggcgctttccagcaaggtgtcgcggtcgatccagccgtacttgaaagcgatctcctccggtgcgctgatcttgatgccctgacgcttctcgatcatgtgcacaaagtcggcagcctccacaaggctctccatcgtgccggtgtccagccatgcaaagccgcggcccagcagctgcacatccagctcgtcctgcttcaggtacatatcgttcagggtggtgatctccagctcgccgcgggcagagggctttacctgctttgccatctgcaccacttccttgttgtagaagtacaggccggtgatggcgtagttggacttgggatgctggggcttttcctccacgctgagcaccttgccgtccttgtcgaactccacgatgccaaagcgctcggggtcctgcacatagtagccgaacacggtgcagcggcccttgttctctgcgttggccacggcgctcttgagcagcttggagaagccgttgccgtagaaaatgttatcgcccaggatcatggcgcagcagtcgtcgccaatgaactcttcgcccagaataaaggcctgtgccagaccgtccggagagggctgcaccttatactgcagatggatgccgtactggctgccatcgcccagcagtgcctcaaagcggggcgtatcggtaggggtagagatgatcaggatatcctgaatgcccgccagcataagggtggacagcggatagtagatcatgggcttgtcgtagaccggcagcagctgcttgctggtgaccatggtcaggggatagagccgtgtgccggcaccgccggcgagaataatgcctttcatacttgtgcactccttttttcttataaaaagatgtgcagcttaattcaaagcggagctgcgtccgctgtaaacaattttgggtctgccaaggccgcatttttgcaaaagacgatggcagtacactttattttactatgaaagcacgcaaaatgcaagaggcggaaacggcagaaagcggtgtgccgacggcacaccgctttctgcgaatcaaaaacactatttttcttccccgctcaccacgcaaagccccacttggaaaagtagcgcagcaggctgcgcagctgccacagaaagggcttcaggctgcggtgcgccgcgcggtgccatgcgtggatggcggtgtactggggcaccagatacgccttgccccgggtgcgcatcttctgggtcaggtcggcgtcctccacatacatgaagtacccctcgtcaaagccgcccacagccttgaaggcagcggtgtccaccgccgaaaagctgccggtgcagaactcgatctcggtgggctttgtcaggtctttgtctgccatcaggtagcggtcgttgcactttgcccagaagcgcagacagggcagctgacggtagaccatggcgcgcacgttgcaccggcgcagcggcagctgctggggtctgccgtccgggaaggtcagccccgggcgggtcatcaccacgccggggtgcgccgccatccagtccgcaaggtcgctcagggtgtccgccgtcagctggatgtccgggttcaggataaagtgcacccggctgtgcagcagcgagagcactgtgttgtgcccggtgccgaagccgccgttctccagccggcagagcacctgcacggtctgcccgggggcggtgcgcagggtgccgtccttggcggcggcggtcagctgctggccgctgccgtccgggctggcgttatccaccagatataaggtgagcgggtaacggcgggtgcagtccagcaccgtctgggcggccctgatggcctccccggcgccgttatacaccacgatacaggccgaaagctccatctgcgttccccctttcggttcggtttgggtcaaaggctcactccagcggcttgatgtcaaagctgaagtcctccttcatcaggtcaaagttggggttcatgcaggggtcgcccgcagccagctgctttgcccaccgcttctggaagcgctccacctcagaggcaaagcgcttgcgcttggcagggctctcgtccagcccgcggctcttgctctcgtagtggtacagctgggcaaagggggtgaacacgttggtgtagcccgcctcccgcacacgcacgcagaagtccacgtcgttgaaggccacggcaaagctctcgtccagcccgttcacctgctcgtacacgtccttgcgcaccatcaggcaggcggcggtcacggcgtacacatcctgcgcgtaggagagccgtcccatatagccggggtgccccacagggaagttcttgtgcatatgcgccgccagcgtcaggaaaccgaagccgatgcccgcgtgctggatggtattgtccgggtagagcagctttgcgcccacgcagcccacacggtcctgctgggcatacatgaccatctcctccatccagcggggagagatgacctcggtatcgttgttgagcagcagcagatactcgccggtggcggcgcgtgcgccaaagttgttcagggcgctgtaattgaagccggtgccctgccatgtgagcacatgcagggtgtccgggtgctccttttgcagctgctcgtagcagcggaaggtggcaggctccttgctgttgttctcaatgatgataatctcaaaatccgggtaggtggtcttgcggtagatggactccacgcacacccgcaaatcgcccgaatggtcgcagctggggatcagcacgctgacccgcccgggctttgtgatggtataatcagtcttgtagaagcccggggtgttgggcaccatggtcaccgcgtccaccggcacgcccatgcggtcgtagtgggcacgcagcgccttcatggctgcttccagacaataggtcttggcagagatgttgctggccacgctggcggggctggaacgccagtagtacagcaggtgcgggatgtgcacgatcttttccgcctgctcggtcaggcgcaggtagaggtcgtaatcctgactgccgttgaactctgcccgctcattgccgcccacctttgccagcagcgccgcgctgaacacgctcaggtggcagatatagttgttggagcgcaggttgtccagcatataatccggcttgaagtggtagaccgtcagatggtcgatatccccttcaaaggtcacttcgtcggtgtacacaaagtccgcgccttgctttgcaatggcttccgccacataccacagtgcgcaggggtgcaaaatgtcatcatggtccagcagggcgatatagtcaccggtggcaagggcaaacccctgattggtgttgcccgcaatgccctcgttgctgtccagtttccggtagcggatgcggctgtcggtgcgggcacgctcctgcacgagggcacccacgtccgcgtcctgtccggcatccaccatgcacagctcccagttgcggtaggtctgattctgcaccgagtccagcagctccaccagaaaatcgtggggggtgttgtacagcggcaccacgatgctgatcaggggtgccgcgggctggtctgcggcctgttttaccagcagctccacgtccgcaaagcggtcggcgggcatcgccttgcccgggaacagctttttgtactcctttttggccttggcctgtgccattacgcccgcaaagcccacccggcgcaaggtggcaaaaaagacgaacagcgggaaggtgcgccacagctggcggcacttgcttaccagataccgcagcggccagctggccttccagaaggtggagttgaccacgctgttcagggtcttttccaattcctgctcgtggctgcggctcagggaaaggtcgctgcgcagccgctccagctgggcagtctgctgggcggcggtgcgctcggccagcagggtgcgctcccgcagaacgtccagctgctgctcgtagccatcctcaagttccggcagctccggggcagccatgcggcagaacagcgccgtcagctgctccttgccgcagtccttccacgcaagctcccggcagaagccctgcgcggcaagctgctttgcgcagtctgccatgccggcgtactctgcgcacaccagcagcactttttccgcctgtacggcgggcagggtgacccactgggggtctgccaccaccagcagctccggggcgctttgcaccaccgcagtattcattttacaaaaagctttttccagcagcccgctgtcctccagcacctgtacgctgcggggagccagctcccgcacgatgcgctgtgccagtgcacggcagcgctcggcggcctcctgattctgcttttcctgatccaactccatgctgatactccaatccgtgcgcttttctacgcagttatgtttcccgttcat

SEQ ID NO: 964 - DNA, 25879 bp, unidentified
  source 1..25879: mol_type = unassigned DNA
agctctgtgcggctttggcgagaccatcaagaccgagggcaaccagaacaatgagctgggaatgccccgcaccctgatgcggctggaaagcagcaccgagtacgcggtcatcgagatgggcatgagccacgccggcgagatcgaccgtctggcgcgggcggcacgcccggatgtgggcatcattacctgcatcggcgtgtctcatatcggcaatctgggcagtcaggagaacatctgcaaggcaaagctggagatctgcaacggtctgccggagggtgcgccgctggtgctgaactacgatgaccccttcctgcgcaaggcggtgctccccgcccatgtgcgcccggtgtggttcagcctgagcgatgaaaacgcggacgtctgcgccctgtccatccggcaggagactgacggcatgagctttgtgctggaggatcaggagcacggcacctttgtggtgaacatccccgccatgggacgccataatgtggcaaacgccttggctgcctactgcgctgccacccggctggggtgtgacgccaagagggtcatccgcggtctttccaactttgagcagaccggacgccgccagaaggtagtggacagcgagggcgtgaccgtcatcgaggactgctacaacgcaaacccggacagcatgaaggctgcgctggcgatgtttaaagatttcccctgcaagcgccgttttgccctgctgggcgatatgctggagctgggcgatctgagccgcgaagcacacgaggagctgggacgccttgccgccgagagcggactatactgcctggtcacctacggcgagcaggccaagcgcaccgccgtagtggctgcggccaagggggtagagaccctgcacgcggacagctaccgcgaggctgccgatgctctgctggatcgggtgcagcccggcgatgccattctggtaaaggccagccacggcatggcactggaaaaagtgctggatatcttctacgaagagcataaagaagcggaagtataactatttggcgaaatggagtgtctgatctatggagcgtttcgccttggcagcggcggtggtgctgggctttgcccttacggcagctttgtgcagcctgtttgtgccgctgcggcgggtgctggaacgccgcgaacaacaacagcagccggtacagtctgagcagccccggcctgcacccctgcgcgccccgctgtggggcgggctgtgtgcggcggcgggcacggtggctgcggtgggtgtgggctggcttgccgcctgcgtgggtcagccggagctgctgggcagcgaaggccggttgatgacacggctgctcacggcgctggctgggagccttgcctttggggcagtgggttttgcagaggaccttgcccggatgcgcagcccagcggcgctggggctgcggcgggacgtgcggcttttgctggaagcactggccgcggcctttgtccttttgctgctgcgggcagcgggctgtctgccccgggggctgggcgtgcccggggcggggtatgtgctgctgggcagcgccgtgccctttttgtgggcggtgctcatggtggcactggccgagtgcgcccgcatcgccgagcgggacgagggcgcggtgtgcggtgcagcctttgtggccatgctggcgttgatgatggtagaagccggtctgggcgtttccgggctggcggtgctgcccgccgcgcttgccggggcgctggtggcactgctgctgtgggcatttcccccggcaaggctgggtgcgggctgctgcggcagcctgctggcagcgggtgccatcggctgcatcccgctcagtctggacatgaccagcctgactgtgccgctggcgctgcccttctgggcggcgggcggtctttttgcagcgcagctgctgtgtgcaaagcgcaccggcaagcccttgcgctgctgggtaaaaaagcataaaatgagcccggagacggtgtttctgtgcagctttgcgctgagcgctgtcggctatgtgctggcgctggcgctgctgcgctggtgctgaccgggcacagagagggaagggagcgcagatggcgactatccgcaaaaaacacagagcgccggtgtcggtgttccagcgtgacccgggcccgtggtcccggctgctgatcgactggctggctacgctggctgttattatgatctttgggctggtgatgctgttcagcgccagctacaccaccggttacctgcgcatgggcgacagcttccactacatcaaacagcaggcgctgtgcatgatgctcgggctgggctgtatgttccttatgagctatgtggaccaccgctttttgcgcaagatggtggtgccgggctacatcatcgtgctggccatgctggccgtcaccctgaccatggcccctctgaacggctgccgccgctggatccgcttcggcgggcttacactgcaatcctccgaggtggcaaagtttgaaatgatcctgttcagttcccatcttgcggccaaagcgccgcaggtggagcggctggacccggagcgccgcatcctgcttaccccccgggagtggctgcgggtgcgggtgtggaagcagctggtggtgccggtgctgccccttgtgccggtggtcatcctgctggcgctggagccgcatatgtccggcatcgtgctgacggtggcggtggtgggcaccatcctgctgctgtccggcagcggcggtgtgctgacatgggcgggtgccgtcacggcgggtgccctgctggaaacgctgctctctcatgtggactccatcccttacctgcaaaagcgtctggacggctggacgcaggatctgagcaagatgaccgaccagaccgtgcagagcctttacgccatcggctccggcgggctgaagggactggggctgggcaacagtgtggaaaagcagctctggctgccggaaagcaccaacgacttcatcttcagcgtggtgtgcgaggagctgggcttcatcggcgcagtgctcattatcgtgctgttcgtgctgttcatcgtgcaggggctgctcatcgcctataaggcggagaacctgtactgcaccatggtgggcatcggcatcatggcacagatcgcgtggcaggtgttctgcaacatcgccgtggtcaccaacaccctgcccaataccggcatcagcctgcccttcttctcctccggcggcaccagcctgattttgctgctggcagaaatgggcgtaatggtgaacataggccgcaacggcgagcgggtggcgcagcagcgggagcagatgcgtgcccagcgggaagccgcccgcgccgagcgggaagcggaacttgcccgcaagaccattgacttggcttctgcccgcgcagcccgcacagaacagtaaaaccgcaagcccgcccggccgcaggccgggcgtttataaggaggaatcaccatgcgtgttctcatcgcagccggcggcactgccggacatatcaatcccgcactggccattgccggtgctctgaaaaaggccgaccctaccgccgagatccactttgcaggccgtaaggagggcatggagtaccgtctggtcacacaggcgggctaccccttccaccacatcgagatcaccgggtttcagcgcaagctcagcctgaacaacatcaagcgcaacatcatcactctgtggaatctggcgctctccggccccaaggccaaggccatgatgaaggaagtaaagccggatctcgtcatcggctgcggcggctatgtgtccggcccggtggtgcgctgcgccgccaaaatgggcatccacaccgctttgcacgagcagaacgctttccccggtgtgaccaacaagctgctggctccggatgtggatatcgtgtttgccgccgtgcccgccgctgtggaaaagctgggcgcaccggacaagacccttgtggtgggcaaccccgtgcggccggaagtgtttgcacaggccgcgaaccgcgaagccatccgcgcacagctgggcgcgggtgaccgcaccgtcatcctgtccttcggcggcagcttgggcgcacgccgggtcaacgaggtggtggcagacctctgcgcatgggagcagcatgagcacaagccggtgctgcacctgcacgccaccggacagtacggcgtacagctgtttgagcagctgcaaaagcagaaggattttacccccggcgacagccttgtggtaaaggaatacatcaacaatatgccggaactgctggctgcggcagatctcgtcatcagccgcgccggtgcgctgacgctggcagagctggaagccgtgggacgcgccgctgtgctgatccccagccccaatgtggcggagaaccaccagtattacaacgccatggagctgcaaaaggcaggggcggccatggtcattgaggaaaaagacctgaccggcgaaaagctggtgcagacggtggccgaaatgctggcacagcccggcaagctggccgagatgggcaaaaacgcccgcagcctgtcggtggacgacagtctggaccgcatcactgcggcgctgctcaagctggtaaagaccccgtgatgcagacccggaataaacaagaaggaaggtgcgaatgatgcagcagaaccgtgaccgcaacggcagaccccggaacaccagaccctatgacctgaaccgggatgtggcgcgcacctctgcgccttcgcagaattataatacgccccggagcaccggcagcagccgctacggctacaacggcgagccgctcagccgcccgccctcccgcagcgccaacggcagtgcgcgctcctcccgggcggataacagcatccagttcccaacccagccccagtcccagccccgccgtcctgcgcaagggcaggggagcaataccacccagtaccccgccggcagccgcccggcgggcagcagaccgaaaaacgcgaagtccggcggcaaacagcgccgcccggcaaacaatgcccgcagcgggcagaacagccggaaaaaccagaacgcgcagaaccatccgaaccggcagcacccggcagccagccaaaatcagcgcctgcgcccggcgcaggacgtcccgcaacaaagccctgcccggagggaaaagcgcaaaaagcgcaaggtgacccgcgctaccctgcgccgccgccggatactgcgccgcctgaccgcctttgccatgctgctgtgcgtcattggcgcaggcatctacctgaccatgaccatgctgttccgcatcagctccattcaggtgcagaccccggacggcaagcaggtgaccgagatcgcgggctattccgcagacagcattctgcagcagatgggcgtgcagctggaagagaacattttcagctttgagcccggcgaaaaggccgctgtgctggagcagaatttcccgctgctgggctccatcaaggtgatccgggattaccccaacaccgtggtggtgcaggtgaccgaagccgtgcctgcctacgcggtgcaaaacggcagcaagtggcttgtgatctcggacaaatggaagatcctgtccgaggaaagcacccagcccgaggagctttgcaccctgtacggcggtaagctgcaggataccgccccgggacaggcgttctgccttgtggaggatgcggacgcagcaagcgcctccgggtcggaaaccgccgaaagcgaaagtgcagtgagcaccgagaccgcccgcatggaagctctgcgcactctggtgagcaagctggaagaatacggcctgtcgcaggatgtgacacggctggaagtggcagacaccgaacaaatcgcatttttgtatcaggaccgcatcagcgtgctgctgggtacgctgaacgatctggattataagctggaccgcgcccgctatgtgctgaccaacgccgacggcaagggctgcggccccaccgacaccgggcggctggatttcagccataccagcgccagcagcacacgcaagatctattttgcacagggcgagcccaccctgccctccggctatgtggtgccgcccaaggctgaggaacccgccccggccgaggacactgccgacagcacggaaagcgcagaaagcgcggatgctgtcgacaccaccgaaccggcggctgaaacggacaccgagcagctgcccctgacccaccctgaccgcatgacggccaacgaagaagaaaaccccatgtaaagaagctctttggaggagactgtatgaagctggaacaactgatggaaggcgtgccctttacccttgtgcagggcagtctggatactgagatcgcagatatcatctacgacagccgcaaggctgccccggggcttttgttcgtgtgcatcgtgggcacccagcgggacagccacgcgtttgccgccgactgcgccgccaagggaatcagcgcgctggtcatccagcacgatatcgacctttctaccctgcccggggtgaccgtggtcaaggtggagagcagccgctatgccatggcgctgatgagtgccaacctcttcggcaaccctgcccgccagatgaccatgatcggcgtcaccggcaccaagggcaagaccaccaccacccacatgatcaaaagcgtgctggaggccgcaggccgcaaggtgggcatgatcggcaccaacggcatctactatatgggacgccacaaggacaccgccaataccaccccggaaagctacgagctgcaaaagaccttccgggagtttctggatgccggatgcgataccgcgctgatggaggtatccagtcagggtctgatgatggaccgcgtggcgggcgtgcactacgatgtgggcgtgttcaccaacctttcgccggatcacatcggccccggcgagcacaagacctttgaggagtaccgcagctggaagggacagctgttcaagcgctgcgatgtgggcgtggtgaacattgacgacgagaacaccgccgccctgctggaaggccacacctgcaagctggtcacctatggccgcgatgaaaaggccgactaccgcgagaccggctacgagctgctgcgcacccacgattttctgggcgttgccttccacgttaccggcaaggacgtgatggacgtgaaagtgaatatgcccggcgagttcagcgtgtacaacgcgctggcagcgctggctgtgggcaaggtgctgggtctgccggatgccgccatccacgatggtctgggcaagtgcgtggtgaagggacgtgtggagctggtgcccatcagcaaaaagttcaccatcctgctggactacgcccacaacgaggtatccaccgagagcctgcttaccaccctgcgcgcctacaagccccaccgtctggtggtggtgtttggctgcggcggcaaccgctccaagctgcgccgctacggcatgggcgagatctgcgccaagatggccgatttctccatcctcaccgaggacaacaaccgctttgaaaaggtggaggatatcatcgcggacatccgcgaaggcatgaacaagggcaacccggacgcaaagttcgtggagatccccgaccgtctggacgcgctgcactacgcagtggatcacgcacaggagggcgatctgatcgccgtcatcggcaagggtcacgagacctaccgcgaccgcgagggcgtcaagacccccttccttgagcgggaactgctggaggaatacgcccagcagatcgggctggaataagaaaataatattattattgcgggaaaggccgctgcacaaagtactgtgcagcggcctttttgcgccctgtgggtgcccctatataaaaaggaggcaaactgtgttgaaaatgtaaaagataaaaatttttaactaaaaccattgacttatccaacggtttgattataatggtcgtgttcgatacctcataaattttaggtaaataattaaaaacaaacagtgaacataaaggagaacactaccatgactttcgaggaaatgaagaagatcgttgtcgataccctgagctgcgatgaggacaaggtgaccatggaggccagcctgaccgaggatctggaagctgacagcctggacgctgtggagctgaacatggcactggaagaggcctgcggcgtgtccatccccgatgaggagctggcaaccctcaagaccgtgggcgatatcttcaactacatcaatgcccatgtctgaggctgaccgaggcgaaacgagatgaacagtatcaaagacctgctgccgggcagcatgcgggagcgcaccttccagctgaaggcccggcgggatgcgggtgccgtgtggaacgacccgcagttcgtggaatgcaaaaagtgcggacgccgcgccacccgccagatctggaacaaggcgcagtacgtctgccccaactgcggggtgcacctgcccatcggcgggtactaccgcctgagcctcatccttgataagggcagcttccgggaactggacgccgaccttgcaccgcaggatgtgctgcagtttcccggctacccggaaaagctggaagcacagaccggcaagaccggcctgaaggaggctgtcatcaccgccacggggcgcatcgagggcaccccggtggtggtggcagtgctggacagccggttctttatgggcagtatgagcaccaccgtgggcgaaaagatcacccgcgccgtggagcacgccaccgcaaagcacctgccgctgatcatcttctcggccagcggcggcgcccggatgcaggagggcattttcagcctgatgcagatggcaaagacctctgccgccatcgagcggttctctgcccggggcgggctgtacatcagcgtgctgacccaccccaccaccggcggcgtgaccgcaagctttgccagccttggcgatatcatgctggccgagcccggggcgctgatcggctttgcgggcccccgggtcattgaacagaccatcggcgaaaagctgcccgcaggcttccagcgcagcgagttccagtacgagcacggctttgtggacaaggtagtgccccgtaccgagatgcgcgaaacactggcgcagctgctgcggctgcacgcctgaggagggagcgccttatgatcaaggacatcttacaacagctcgcaccgctggatgaaaagatcgccgctttgcgcggcgacccggcggacgagaacatgaccgatatcaccaaccacgctgccgaactggcagagctttccgcacaggaggacgctttgctgtccggctgcggggcactgaccgcagaggacagggtctttctggcccgtcacccggagcgcccccacatcgatgagatcgtggatgcactgttcaccgacttctttgagcagtgcggcgaccgccagtgcaaggaagatgccgccattctgggcggtgtggcgctgttccacggccaaccggtcacgatcatcggccaccgcaagggcagcacgctggaggaaaacctgcgctgcaacttcggtatgcccgggccggagggctaccgcaaggccctgcgcctgatgaagcaggcggaaaaatttgaccgtcccatcattaccttcatcgacaccccgggcgcataccccggcaaggacgccgaggagcgcggacagggcgaggccattgcccgcaacctgatggagatgagcggcctgaccgtgccggtgatcgcagtggtcaccggcgaaggctcttccggcggcgcgctggcgctgggtgtggcaaaccgcatcctcatgctggaaaacgccgtctactcggtgctgagccccgaaggctttgccagcatcctgtggaaggattcctcccgcagcggcgaagcctgcgagatcatgaagctgaccgcacaggatctgtacaaggacggcatcgtggaggagatcatcccggagccggtgggcggcgcacagcgcgcccacggggtactgttcggcaatctggatgaggcactgcagcgtcagttgcgcagccttgcccgcatgaacggccgtcagctggccgagcagcgctaccagaaattccgtcagatcggagaaatgaggaaagcatgaagggtttgcgtctgatcgccaccggcggggctttgcccggccgcacggtcaccaacgaagagctgagccgcaccgtggataccagcgacgagtggatcgccacccgcaccggtatccgcacccggcactactgcaccgagggcgaaaacgccgccacactggccattgccgccgcaaagcaggcgctgcagcgcagcggtcttgccccggcagacattgcctgctgcgtctgcgccaccctttccgcaccggacgccaccccaagcgtggcctgtcaggtgcaggcggcgctggcactgccggaaaaccgccctgcactggacgtgaacgccgcctgctccggctttttgtatggcacggcggtggcgcgcggcttgctgactacgctgggcgggcggtacgcgctggtcatcggcacggaagcactctcccgcctgatggaccccgccgaccgctccacctgtgtgctgttcggcgatggtgccggtgcggcggtgtttgaactgaccgacacctccgcgccctttgccattacgctgggtgcccggggcgatgccgccatccatgccggcggccccagccgcgcaggctcggcacccatcagcatggacggcagggcagtgttccgctttgcagtggatgccctgcccaaatgtctgcacaccgtgctggacgagaccggccttacgctggacaatctggactgggtggtctgccatcaggccaacagccgcatcatcgaccactgcgtcaaggcgctgcacgccgatggtgcaaagttctacaaaaacatggaccgccacggcaacaccagtgctgccagcatcccggtggcgctgaacgagctggctgaaagcggccagctgcaccccggccagacccttgcctgcatcggcttcggcggcggactgacatggggcggcatgatcgtggaatataaaggataaagaccatgaaacttttaaacgagatcctggggacgaaataccccatcattcagggcggcatggccaacattgccaccggcgagtttgccgccgcctgctccaacgccggtgcactgggcatcatcggtgcgggcggcatgaatgccgataccctgcgccagaacatccgccgctgccgggagctgactgacaagccctttggtgtgaacatcatgctcatgcacccgcaggcagatgcgtttgcccagatcgtggtggaggaaaaggttgccgtggtcaccaccggcgcaggaaacccgggaaaatacgttcccatgtggaaatctgccggcatcaaggtgatcccggtggtggcggctgccgtgctggcacggcatctggagccgctgggcatcgacgccgtcatcgccgagggcaccgagagcggcggccatgtgggcgagatgaccaccatggcgctggtgccgcaggtggtggacgcggtcagcgtgccggtcatcgccgcaggcggcattgccgatggccgtcagctggcggctgcgctggcgctgggcgcttgcggggtgcaggtgggcacctgcctgctggcaagcgaggagtgccccattcaccccaactacaaggccgcgctgctcaaggccggggacagtgacaccatcgtcaccgggcgcaccgtgggtgcgccggtgcgtgtactgaaaaaccgcatgagccgggagtatgtccgtcaggaaaaggcgggcgcggacaagatggaactggaaaaatacacgctgggcagcctgcgccgcgccgtctttgagggcgacacggtaagcggcagcctgatggctggtcaggtggccggaatgctgcacgaggtacgccccgtggccgacatccttgccgacctgtggcagggcgggaggcagcgcatcgccgcgctgaacgccgaatgctgacccttggcggcaagcccctgcaagtacccattttgcagggcggcatgggcgtaggcgtctcgctgggcgggctggcaggtgcggtagcagcctgcggcggcatggggtgcatctccaccgccgatgcaggctaccgcgagccggattttgcccgcgacccggcggctgccaatcatcgcgccctgaccgcagaaattcaaaaagccaaggccatcgccgggggcatgggtctggtagccatcaacgcgatggtagccacccgggactatgtcgaggctatccgcaccgccgtggcggcgggagtggatgccgtggtctccggtgcgggtctgccgctggagctgccgggcatcgtgggcaccaaagaggtggccattgcgcccatcgtgtccagcgcccgggcagcaaagctcatcctgcgccgctgggcaaagggctttgaccgcaccgccgattttgtggtcatcgagggctgcaaggcgggcggacatctcggctttgccgaggaggacctgctggcagaccgctgccagactttggacgagattctgcccggggtgctggccgaggtaaagccttacgaggaacaatacggccacgccatcccggtatttgtggcgggcggcgtgtacaccggtgccgacatggcacattttacaaagcttggcgctgcgggtgtgcagctggctacccgctttatccccacctacgagtgcgacgcttcccagacctacaaggatgtgctgctggccgcaaagccggaggatgtgcgcatcatccacagcccggtgggaatgcccggccgcgcgctgaacaccccgctggtgcaggcgctggccgagggcaagcgcttcccgcccaagcactgcgcccggtgtctcaagacctgcgaccccgccgctgtgccctactgcatcacccacgccctcatcgaggcggtgaagggcaacgtggaggaagggcttttcttctgcggcgaaaacgtgggcaggctggaccggatgcgcaccgtgcgcgagctgatggacgaacttgtgaccgaatggaggcagaacttatgaagcttgccgtactttacgctggtcagggtgcacagcaccccggcatgggcaaggaattttacgaagcatctcccgccttccgggcggcctttgacagcgcagcgctggattttgacctgcaccgcgtctgttttgaggacccggacggcgttttgaaccagaccgaatacacccagccctgcatggtggcctttgcctgcggcgtgaccgccgtgctggccgaaaagggcgtaaaacccgcctgtctggcgggactttcgctgggcgaatactccgcgctgcaggcagccggggtgttcaccgcaaagcaggccattgagctgaccgccttccggggcaaggccatggccgaggctgcaaagggccttgcctgcggcatgactgccgtgctggggctggacagagaaaagctgtctgcctgctgcgaacaggcggctgaggcaggctgtgtgcagatctgcaactacaactgcccggggcagctggtcatcggcggcgagaaggccgctgtggagcaggccgctgcgctggcaaaggaagccggtgcccgccgctgcatcccgctgaaggtcagcggccccttccacacaaagctgatggctcccgcagggaatgcgctggcacagcgctttgcgggcgaaaacttcggcaccatggagacgccggtgctgttcaactgtctggggcatgaaaaggccgagaacgacagcatcccgcagctgctggtaaagcaggtgcagagcagcgtctacatggaagataccctgcgccgtctgggcgaactgggcgtggaccacattctggaagtcggtcccggcaatgccctgagcggttttgtgaaaaagaccctgcccggggtggtctgcaccgcagtggagaccccggaacagctggatgcggtgctgaccgcatggaaggaagcagaatgagcgaagaaaagctgacccgcgccgccattgttaccggcggcagccggggcattggccgcgcagtgtgcgtggcactggcaaagcagggctgcaatgtggtggtgaattactgccacggcgcagagcctgcggagcagacggcagcgctctgccgcgccgagggcgtgcaggcggtgaccgtgcaggcagatgtatccaccgccgagggctgcaaggtgctgttcgatgccgcagctgaggcctttggccgggtggatgtgctggtgaacaacgcgggcatcacccgggacaacctgattttgcgcctgaccgagcaggattttgatgcggtgctggacaccaacctgaaaagcgcctttctctgctgcaaggaggccgcccgccgcatggtgcgccagcgctatggccgcatcgtgaacctttccagcgtggtggcgctgaggggcaacgccgggcagaccaactacgccgccagcaaggcggggctcatcggtctgaccaagagccttgcccgggagctggccgcgcggaacgtgaccgtgaacgcggtagcgccgggctttatcgacaccgacatgactgccgtgctgccggaggcggtgcgcaccggcatgacgcagggcatccccgcgggccgcgcaggccagccggaggatgtggcgcaggcagtggcgttttttgccgcagaacaaagcagctatctcaccgggcaggtgctctgtgtggacggcggcatggcaatgtaaaggagaacccttatggaaaaacgcagagttgtgatcaccggccttggcacggtgaacccgctgggcaacaatgtggcggacagctgggcagcagcccgtgccggtaaatgcggcatcggtcccatcacccagttcgacaccaccgacttcaagtgcaagctggccggtgaggtaaaggattttgaccccgagagcgtggtggacaaaaaggaagtccgcaaaatggcgcgcttcaccctgctggcactgggcgctgccgccgaagccattgcagacagcggccttgataccgaggccgagggcaaggacatcggcgtcatcctgtccagcggcatcggcggtctgcccacgatcgaggagcagcacgcccgcggcgaggaaaagggcatggagaaggtaagcccctactttgtgcccatggccattgccaacatggcagcggcgcaggtggccatccgcttcggtctgaagggcatgtgcacctgcccggtcacggcctgcgccggcggcaccaatgccgtaggcgacgccttccaccgcatccgggacggctacgagccggtgatggtctgcggcggcgcggaaagctgcatcagccccttgggcatcggcggctttaccagcatgaaggcactttccaccgccaccgacccggatgctgccagcctgccctttgacgcccgccgcggcggctttgtcatgggtgagggcagcggtgtgctggtgctggaagaactggagcacgcaagagcgcgcggcgcacacatctacgccgaggtggtgggctacggtgccaactgcgacgcctaccactttaccgctccggctcccggcggcgcaggtgccatcgactgcatgaagctgaccctggtcgatgccgacatcgcaccggagcaggtggaccacatcaacgcccacggcaccggcacccacatgaacgatgcctgcgagactgccgccatccacgccgtgtttggcgcacatgccaaggagatgaccgtggtcagcaccaagagcatgaccggccatctgctgggcggcgcgggcggcattgaggccgtgttcaccgcgctggcactgcgggaccagttcgccccgcccaccatccactacgcccagcccgacccggagtgtgatctggactatgtgcccaacaccgggcggcagcaggagatgcagtacgcgctgagcaacagcctgggctttggcggccacaacgcctgcatcgccctgcgcagatgggagggctgacccatggcagagccccgtaccgtgcgtgaaaacgccaacaccctgagcagtgtgcagattgcagaaattctgccccaccgttacccctttgccctcgtggatcgtattctggactacgagccggggcagtgggccatcggccgcaagtgcgtcacccgcaacgaggaattcttcaacggccacttcccggcgcagccggtcatgcccggcgtactgctgctggaagcgctggcacagaccggcgctgtggcagcgctgagcctgccggaaaacaagggcaagctggcgctgttcggcggcatcaagagtgcccgcttccgcaggcaggtcgtccccggggatgtgctcaccctccactgcgagttggtgcagcagcacggcgctgtgggcgtaggcaaggcctcggcatgggtggacggcaagtgcgccgtcaccgcagagctgacctttgtgctgaccgacgcagcagaataaaatgaatgcaaaaagagataggcaattccttttcgggaaagcctatctcttttttgtgtctgttccggtcggtttactctgcggcagctgtcccggcgtctgccgcagcagcgggggcaggctctgccgtggcggtttctgtcggggcggtcgccgcctgttccttttccatccactcccgcacacggtcggggcggttggtgatataggcatcggcgctggtgcgcagcaggctgcggacggaatcttccgtgtccaccgtccacaaagacaccttgatgcccatctcgtgcagtttgtcaatgaaaccggcgtttttgtaggcggtgtggtactcacagctgacccactccggcacaaagtccagactgcggatatagccgggcagatcccgctgcgccatcaggtttttgtagatctcgttcaggctctcgccgggaaagtttgcccgcagcatacttaccttatcggtcatccagcgggtcatccaactgcaattttcctcgtctgctgcgctctccggcagggcggcatccatggcttctatgtcctctatgccgttggtcagtccaagatccttccagatgatgggcggcggcagcagcatgctttccagctcgccgtataccagtgcacctacccgcagttcgggcagcagctgctttgcctgccgcagcagcgcgtggttgaaggaaacaaggatcacctgttctaccatctcggtctgctgcagcacttccagcacccggggtacaaagtccgggtcgttgtccatggtggatttcagctccagatgtacggtgcattccggcatctgcttgcacagctccatggcttcctgtaaggtagcaatcttttcgtcctgatagatggcatccttccagctgccaaaatccagctctttcagatcgcccatggtcatatcgtagatcttgccggaaatatccgtgtgcagatcgatcatatagtcgtggtggatcacaagcccggcgtcaatggtctgctgtacgtccatctctacgccgtctgcgccaatctccatggcttttttaaaggcagtcagggtgttttccggtgcaagataggaagcaccgcggtgtgcaatgatttgtggtgtcataaattttctccgttatcggttcttcctcacacttttacgccccggcgctgccataccgcaaacagtgccggggcgcttgctcaggtcaggtcctcgccgtctgaagcaatgacctttttataccagtaaaaactgtccttccggctgcgggcaagggtgccgttgccgtcgttgtccttgtccacatagataaagccgtaccgctttttcatctcgccggtggaggcgctcacaaggtcgatgggaccccatgtggtgtagcccatcagcggcagaccatcctcattgacggccttttccatctcctcgatgtgcgcccgcaggtagtcgatgcggtagctgtcgtggatggagccgtccggctctacggtatccaccgcacccagaccgttctccacgatgaacataggcttttcgtaccggtcgtagatggtgttcagcgtcacccgcagacccaccgggtcgatggcccagccccactcgctggctttcaggtaggggttcttcaccgatgcagacacggcgttgccttccgcattctctgccgccatcagctccttatccaccgtgatgcagcgactggaatagtagctgaaggatacaaaatccactgtgccctcccgcagcgtgcggtcgtcctcgggctgtgtgtgcagctgcaccccggcgcgctccatccgctttttagcccacacggggtaagcgccgcgcacctgtacatcggtaaagaagtagttgtcccggtctgcctcctgcgccgcccgtacatcctccggggcgcaggtgcgggggtagaactgacccgccgccagcatacagcccaccatggcatccggcattttttcgtgcgccagctttaccgcctttgcgctggccaccagctcgtgatgggcggcctgatacttgacctgctccacattctcgccggggtggaataccagcccggcgccggtaaaggacaggtgcagcagcatgttgatttcattaaaggtgagccagtacttcaccttgcccttgaagcggtcgaacagcacctcgcagtagtggacataggcgtccaccatgcggcggtctttccagccgccgtattttttgatgagggcaatgggggtgtcaaagtggcagatggtgaccagcggctcaatgccgtacttatggcactcgtcaaaaatgctgtcgtagaaggccagtcctgcctcgttgggctgagcatcgtcgccgttgggcaggatgcgggtccatgcaatggacagccggaagcacttgaagcccatctctgcaaacagggcgatgtcctctttataatggtgatacaggtcaatggcctcgtggctggggtagaaatgtgcgtcatcgcagcccagcatttccatatagcccgttgccaccggaaaacggtccgggccgaagggggtcacgtccaccgtagccagacccttgccatctgcctgccatgcaccctcgcactggttggcagcggtagcgccgccccacaaaaagcccttgggaaatttgcccatactctttacctccttgtttacttttgcgcccctgcggagcgcagatatacgcatactactatgataccgcaaccggcggcgcttgtccatgactgcattttgcaaaggtgcgtgcatttggggataaagtacgacttttatcgtcaaaacgccgaaatttcctactgttttttgcgcacttttcacgataaaaacacaaaacttgcctgtttttcttttattctgttccttttaaaccgcgcggcagtatggtagaataatagggtaagaactgcgctgcgctgctgcgctgctgagaacatggaaaaatggagtgtttgattatgactgagttcaaacccatcaaagaaggcaaagtccgcgagatctacgacaatggcgacagcctgatcatggttgccaccgaccgcatttctgcgtttgacgtcatcctgaaaaataaggtcaccaaaaagggcaccgtgctcacccagatgagcaagttctggtttgattacacccgcgatctgctgcccaaccacatgttgagcgtggatgtgcaggatatgccggagttcttccgccagccccagttcaccggcaacagcatgatgtgccgcaagctgaccatgctgcctatcgagtgcatcgtgcgcggctacattaccggcagcggctgggcaagctaccaaaagaccggcaaggtgtgcggcatccagctgcccgaaggcctgcaggagtccgataagctgcccgagcccatctacaccccctccaccaaggcagagatcggcgaccacgacgagaacatctcctacgagcagagcatcgacgtgctggagaagaagttccccggtcacggcttggagtacgccaccaagctgcgggactacaccattgccctgtacaagaagtgcgccgagtatgcactgtcccgcggcatcatcattgccgataccaagttcgagtttggtctggacgaggacggcaacgtggtgctgggcgacgagatgctgaccccggactcctcccgcttctggccgctggagggctacgagccgggtcacagccagccctccttcgacaagcagttcgtccgcgactggctgaaggccaaccccgacagcaactacgacctgccgcaggatgtcattgacaagaccattgccaagtatctggaggcctatgagctgctgaccggcaaaaagctgtaagcgtacatatagaaaaccaaggctgctgcggaaaattttccgcagcggcctttttgcgtcccaccctcttgacaaggggcggggagatgggtaatatatgtatcgcatcaaacagttttacatcgaacaatttgaacagaggaaaaccattatgtgtacacagcaccctattgaagagccctgcaagctggacccgccgtgggaagggccgcaggtcatccccgcccagctgcaccgggtggataacctgatcttccgcaggctgaaccagttttcccgcgccaacggggtagagcagaccacccccatgcacgggtggatcatcgagtatctctaccgccaccggaacgagccggtgttccagcgggacatcgagcgggagttttccatcacccgctccacggtgacgaacattttgcagctgatggagcgcaagggctacatccagcggctgagcgtgccgcaggacgcccggctcaagcagctggttttgaccgaggagggcatccaacggcacgaaaagaccctgctgtccttccaccagaccgacgactatgtggccggactgctgaccgaggaggagaacgcagaactgctgcggctgctgaacaagctgcgggaggcgttgaaataaccaccttttccgtcaaagcgccgaaaaaggacttgttaaattagcaattatgaacatttttcgaaagctattgacattcagatcgttttgtataaaattgttttgtaccaaacaaataacttcaatgggagggaaattcagatgatcaaaaagcttgtgtcgcatctgggcgagtataaagccgcctcgatcaagacaccgctctttgctgcgctggaagccattatggatgtgctgctgcccaccatcatggcctttatcatcgaccagggcattgaaaagggcgatatgaacgccatcatccgctacggcctgcttacctttctggtggcagccattgcactggtgctgggcgtgctggcgggcaagtacgccgccgaggcatccaccggctttgccggaaatctgcgcgatgccatgtatgaaaatatccagcattactctttttccaacatcgacaaattctctacggcaggtcttgttacccgcatgaccaccgacgtgaccaacgtgcagaacgccttccagatgattttgcgcatgtgcgtgcgcgccccggtgcatctggtgtttgcaatgttcatggccgtggtcatcggtggcccgttgtcgctggtgttcgtggtggcggtggcctttctggtggcagtgctggctgccatcatgatccctactttccacatctttgaccgtgtgttcaagaactacgataacctcaacgcctcggtgcaggagaatgtctctgccatccgcgtggtcaagagctttgtgcgcgagggctttgaaaacgaaaaatacaccgctgcctgcgagagcctgtataagcagttcgtcaacgcagaaagccgcctgagcttcaataaccccgccatgctggtggcggtgtacggctgcaacatcgcgctgagctggttcggcgcaaaatatgtgctgcacggtgccattaccaccggccagctgaacgccctgttcggctatatcatgaacatcctcatggcactgatgatgctgagcacggcctttgtcatgatcgccatgtccgccgcttctgccaagcgtatcgtggaggtgctggacgagcacaccgacctgcccccggcaaagcagccggtgcagcaggtggcagacggcagcatccagtttgaccatgttaccttcaagtataagcacggcagcggtcagccggtgctgaacgatatcagctttaccatccagcccggcgagacactgggcatcatcggcggcaccggcagtgcaaaatccagtctggtgcagctgatcccccgcctgtacgatgccgagagcggcaccgtgcgggtgggcggcgtggacgtgcgggattataaccttgacgtgctgcgccgcgaggtctccatggtgctgcagaagaacgtgctgttcagcggcaccattctggacaacctccgctggggcgatgccaacgccaccgaggaagagtgcatccgcatggcaaaactggcctgcgcggatgaattcatccagcgcttcccggataagtacaatacatggatcgagcagggcggctccaacgtgtccggcggccagaagcagcgcctgaccattgcccgcgccctgctgcgcaagcccaaagtgctgatccttgatgactccaccagcgccgtggacaccgcgaccgatgccaagatccgcaaggccttccgggaggagatccccggcacgaccaagatcatcattgcacagcgcatttcctcggtgcaggatgcagaccgcattctggtgctggagaacggccagatcaacggtctgggcacccacgcagagctgctggcgaccaacgccatctatcaggaggtctacaacagccagacgcagggcggcggcgattttgacaagcagggaggtgcgcagtaatggcagtaaaagaagtacatggccccggcccgcggggcgcacgggggccgcgccccaaggtggaaaacccgggcaagctgctgaagcgcatcatggatgaggtgttccgcaactatctgccccactgcatccttgtgctgatctgcatcgtggtcagcgcgctggccaatgtgcaggccagcctgttcttgcagactttgatggacgattacatcgtgcccatgacccgccagcaggaccccagctttgcaccgctggccggtgcactggtgcggatgtgctgcatctaccttgtgggcattctggccgcatgggccaacgcccgcatcatggtcaacgtaacgcagggcacgctgcgcaatctgcgcaccaagctgttcacccacatggaaagcctgcccatccggtattttgacacccatccccacggcgatatcatgtccgtgtacaccaacgatgtggataccctgcgccagatgctcagccagagcattccgcagctggtgtccagcgtcatcaccatcgtgtcggtgttcttcagtatgtgtatgctcagctggcagctgaccatcgttaccatgctcatggtggcgctgatgctgttctgctccaagcagatcgcaaaaagttcttccaagtacttcatccagcagcagcgggatctgggcaaggtgaacggctacatcgaggagatgatggaaggccagaaggtggtcaaggtgttcacccacgagcagcagacccttgccggcttccatgcgctgaacgaccagctgaaggaaagcgccaagcaggccaacgccttctccaacatcatgatgccggtcaacgcccagctgggcaacatcagttacgccatctgcgcactggttggtgcagccatggctgtgggcggcgttggcggcatgacccttggcaccgtggtggccttcctcagcctgaacaagggcttcaatatgcccatcagtcaggtgtccatgcaggccaacagcgtcatcatggcactggccggtgcagagcgtatcttcaagatgatggacgagcccagcgagaccgacgagggctatgtgacgctggtgaacgccaagtacgaccgcaacgaccagctggtggagacgaacgagcgcaccggcatctgggcgtggaagcacccccaccacgacggcactaccacctaccacaagctggcgggtgacatcacctttacggacgtggactttggctatgtgccggaaaaaacggtgctgcatgacatcaacctgtatggccgtccggggcagaagatcgcctttgtcggctctaccggcgcgggcaagaccaccatcaccaacctgatcaaccgtttctacgatattcaggagggcaagatccgctacgacggcatcaacatccacaagatcaaaaaagccgacctgcgccgctcgctgggcatcgtgctgcaggacacccacctgtttaccggcacggtgatggagaacatccgctacggccggctggatgccaccgatgaggagtgcatcgccgccgcccgccttgccaacgccgacggctttatcaagcgcctgccggagggctacaacaccatgctgaccggcgatggtgccaacctctcgcagggacagcgccagctgcttgccattgcccgcgcagccgttgctgatcccccggtgctgattttggacgaggcgacctcctccattgatacccgcaccgaggcgctggtgcagcgcggcatggacggcctgatgtacggccgcaccagctttgtcatcgcgcaccgcctgtccaccgtccgcaatgcagactgcatcgtggtgctggaacagggccgcatcatcgagcgcggcagccacgatgaattgatcgccaaaaagggcaagtattaccagctttataccggtaatctggccgagaactaagcaatttcccaccttctcacaaagctgccgcacagccatgccgccgtgcggcggctcttttttattcccatgaagaagcaattctggaaaatccgcagattttccagaattgcaaatataaaaataattttccgctgaagatggccaaagcgcacgcggcggccatttaaaatcgtccgctccacggtatacaaatgccccgggctgtgctagaatggagcaaacgagtagaaaaggctggtgagtgtatgcaccctctgacggaatatccccgcccggccatgcgccgggacagctacgagaacctgaacggcccgtggcagtacgccatcaccgcttcggcacagcgcccggcgggctgggacggcgagatcctggtgccctacgcgccggagtgccgcgcctccggggtggggcgcacattgcagcccgggcagtggctgcactaccaccggtactttgcgccgcccgccgggacgggcggacgggtgctgctgcatttcggtgcagtggactacgcctgcgctgtgcaggtgaacggccatctggtgggcggtcaccggggcggctactggccctttacgctggatatcaccgcgcagcttaacggcaccggccgcaacagcctgtgggtggcggtgcaggaccccaccggccacggcacacaggcgcggggcaagcagaccttgcagcccggcgggatgttctaccccgcgcagagcggcatctggcagacggtctggctggagcgtgtgccggaaaattacatccagtctctcactgttacgccggactacgatgcccgcaccgtgactgtgaaagtgcatacctctgcacccggcggcgcggtgaacctgtgggcggtggtgcgcgccgggggtgtgaccattgccgaggactggggcagcgacgaggccgaccaagacggtgaggtgacgctgcatattgcggacgagtatttcttcccatggagcccggacacgccctttttgtacgacctgaccgtgggcactacacagggagaggaagagcagttcgacaccgtgcacagctactttgccctgcgcaagtggagctgcgcaccggacgcaaggggtgtgctgcgcttctgcctgaacgacaagcccattctgctcaacggcctgctggatcagggctactggctggagggactgtacaccccgccctcggatgcggcggtggagcgggagctgagcgaggtaaaggcgctgggctacaacctgctg

SEQ ID NO: 965 - DNA, 22750 bp, unidentified
  source 1..22750: mol_type = unassigned DNA
  misc_difference 14286: note = a, c, g, or t
  misc_difference 14287: note = a, c, g, or t
  misc_difference 14288: note = a, c, g, or t
  misc_difference 14289: note = a, c, g, or t
  misc_difference 14290: note = a, c, g, or t
  misc_difference 14291: note = a, c, g, or t
  misc_difference 14292: note = a, c, g, or t
  misc_difference 14293: note = a, c, g, or t
  misc_difference 14294: note = a, c, g, or t
  misc_difference 14295: note = a, c, g, or t
cgtcgggggttttaagtgacaagtattgcgccggaagatctgctccggagaagtgtttaaagtcatggttgcatatgacggattgagcacgttgctcgttgaaaaaacaagtattgaaaaggatggagaaagaaggcagtgtatgaagaaattatatgtaataagtggaatgacgggaatgacaggcaatgagcttgcacgtcagattgtaaagaggcgcgatgatgtgattggttttgataatttttttgcgtcatctacagaaacaatcaaggatgtgatcgcttcggagcacctggaattttttgaaggcgatgttaacaacgatgcacagatgaaagagctggaagaaaaggtaattgcaagaaaggcagactatgaaaaggtgacctacatcaactgtgcagcagtcgtacatacggaacatttttatcatgttgaccgtacatttgagacgaacgtgatcggaatgaaaaagtttttggagcaggcgatccgtgtcggggcagacagttatatcaactgttcgacgtcagaggtatattcgatggcatcctggaaagagggtggcgtaaaagaggatgatttcctgctcctggcaacggcagaacacagccagagaaccagttatgcaaccggaaagcttctgacagaattttttatgaaagatgcggtagagcgtggaatgataaaggggtgttcccttcgttttgccaatgtttacagtaaaaatgagctgctggcaaagcatgtgatcccgcatgtcattaccagtctgatgaaagatgggaaagtgactctgctagaaaactccaaagtaaataaaagaaccttccttcataatattgacagctgtgcagctgtgcttgcagttgcagacacagatgtagctctggatggaaccatttataatgtggcaacagagcaggaagtttccatgatcgaactggtagatgtatgtgcgaaagcgatcgggattgaaaaaccggagattatttttgaaggatatcgtgaatccgatccgcagagacgtgtattatctgctgcaaagataaaggcgcgtacgggatggaaaccgacgatcacgttggaacaggggatcaaaatgtgtgtagattacagaagacaggtggaagaaaagtaaatgaaaacggttatagttgcagttgcgggtatgtctagccgatttaatcaggatatggaagaaccggtgctgaaaggaatttacacagagagggatgttcgtaagacgctgttatattccatcttaagaaaatgcaaagggtttgatcatgtagtgctggtaggaggataccagtatgagaaactggtcgaatatgtgtctgcttgtaagaaggatttcccattccagatccagatggtatataatcccaagtatcaggaatttggaaccggttatacattaaagctgggactggaacaatgtctgcaggataacagttcagaaattaccctgatcgagggcgatttgtttttcgatgaggcatctctggatgatgtaaaaagatcaacaaggagtgttgctacctataacgataaaacgatctatagcaacaaagcagtgatcgcatatgtaaacgaggcacatgaactgaaatataagtttagcaccaatcatggatcggtggagatcacagagccgtttcgggcaatttataattcgggacagatctggaaatttgctgatacagacgttgtgaagcagctggtatcagattgcccggagacaatgtggcatggaacaaatcttgagtttattgaggaatatttccaccagatcagtgaggaggagagagagttgcttcctcttaaaacatgggaaaactgcaatacgaaagcagattatttaaaatacgaggaacagttataagggtaagacggatgaacaaagatgaaagtgcgaaaaagataaaagttgcctttttcccgtataaaatttcgatgtgggattctctggagagtatatgggaagctgcagatcgggatgaaaactgtgaatgtcaggtcataccgataccgtattattccaaaaacgcagatggggagattgaaaaagaacattatgagggagcagcgtttgctaagaaagttccgatcatagattatcagacctattttttggaacaggaaatgccggatgttatgtatatccacaatccctatgaccagtacaataaggtcactatggtgcatccgcgttttttttccacagaactgaaaaaaggcggaggcatcctggtatatgtgccatattatatttcgggattttgtaaaaaatacgaaaatatgttaccaaactgtgccaatatgggagcagtatacagcgattaccttatcctgcagaatgaaaatctgaaaaatgcgtacgcattttgcggttacccggaaagaaggttactggtattaggaagccctaaggtagatgctgtctataagatcagggaaaagcagttctcccaaatagatgagtggaaaccagtgatagaaaatcgtaaagtgattctgttaaatacgagtattactacctgcctgagaaatgacaactggctggaacagatccagaaactgattgaaccgatcttgcaggataacaggctggcattgatctggcgtccgcacccattgttgcttgatacgatgagatcaatgttacaaaagcaggcggaatatgacatgctgttggagcgcatccggaaagcaccaaatgccataattgatggaagcgatacagcggaagctgcaatgaaagcatcggatgccatgatcagcgattacagttcactggtaatgcagtataattttaccggcaaaccgtcctatttactgaccgggaaaagcgaaaatcgtaaggattatgttttttgcgattatttttcaaactatttcagagaagatggagaggatctttctgattttataaatatggtattggctggcattgatccaaagcagcaggaacgaatggaatatgcaagaagttcaatggcaaataccgatggaacctgtggtgaaaaagtccattgcgagatatgtaaaaaagtaatgacaggagtgaacagataatatggatgaaattaagattacagaagaacagcgggagcggatcagaaaaatccagttggaaatgctaagggaagtacatcggatttgtgaagaaaaccatatcaaatatgtgttgggatatggaaccatgcttggtgcagtaaggcataagggatttatcccatgggatgatgatgtggatattttaatgctacgtaaagattatagaagatttcgcgaggcatgcaaaaaagaactgcccccaaaatatttccttcaggatgaatgttccgatgaatattacctctggggatattccaagctgcgcaatttgaatacaacttatgtccgttgcggacaggagcatattccatataaaaatggagtatttatcgatatctttcctctggataatgtgccgtggtttttaccattccgtattttgcaggatgcatatggttttgtactgagaaaaatgttgtgggcaaaggttggaaaaaataccgagaaaaatccactggtacgtctggtatacaaaatattggcaccaattccaaaaagcaccatatataagttgcgcaatgtgatggtacataagggaaataaggtttcagacagagtccgctgtctgctgtttacggcaccgggaaaagaggagaataaaaaggccaacagtctgtattccagatacggatttaaaagggactggctgttagatcgtgaaaaatatgtctttgagggagaagaattctggggaaccagggcctatgacgattgtttgtcatacgtatatggcgattatatgaaacttccaccagaagaaaagagagtgggacatgcgccagtatctaaattagaattaaatcaagaagggctgtgatcatagataaatcatactgggatacattctatgccggaaaataaatgtggaaaacaaagactatgccagcagataagagcagtaggtttcatgggaagtgtagaagaattttgtgagaaagtttcgatgggagaactccagttatgatggagttactctgaataatgttctctcacaaaatcatcaatacttctggtatatccatgagcatccagatagtttcttaatgcacattcttctactttgtaaaaaggataagtgtgtgttgtggcagttatgatggggttcctgtaatcaccgtagcggttggtaaggatttcgtcatactgttttggtacagcaaccataatgttttcaaatggtacggtaatcgtttcatcaaaccattcttttggggtagcgatctggcggccatttgtaaaccagaaaccatctttggcaatgtcattgccgtcattttcatgatataacgcgcggatggaatccgagagttgtatcagagtgcgaaggatatttgtatcacgtgcaatgtgggtactgcatagcgattcgatttcttttacattttcttctcttgtgatctcgctggttttctcccagttgcggacacagaacacgattttctgaatcaggtactgttgaagggaactcagttcgggatcatccgggagataatcaagcgggaagatatcgatccccatattacgataaggaaagccgtgaaaacgctgcatatagtcggaaagcttccagtcggacgaaaccgttgcaacgacagactggcaggttggcaaaaataagttatccgttttggcataaggtccggcgagtgcaatcccatttggaagttcagaaggaagaacacggatcagcttgttgtaatcaggtcgtttgagagcaatatccacatcatcatcccacggaatgaagcccttgtggcgtattgcgccaagcagtgtgccatattcggcaaaataggtaatatcatatttatcgcagatgtcgatgatgatctgcagtaattcaagctttgccgcccaggcgcgcttcatcatctgtgggaccaaaaaaccattgcgatattcgtcttggaaaaagtttttagggaaaatcataatgggggactcctttaaggaataaaaaatactattagatatatcggctgaaataaatgaaaaatgatatatattatgaatagaaaattttcagggaagattaagaaaaagagggcaaatgccgatacactatatagctaattatcaaggaagatgattacagagatacaagcggaagcgtatctttgaaaaaaaggacacggaggggaatatgggcagaatagttgtaaaccataacatgcagtcgatgtatcaacatcggcagttgaagattaatacagaaaatgtagacaaatcttcagaaaaacttgcatctggttacaagattaatcatgcgaatgatgaggcggcagagcttacagtatctgaaacgatgagaaaccagattagaggtttgaacaaggcatccaataatattcaggatggaattggtttggttcagacagcggatgcggcattggaagagacccagacgatattggatcgtatggtagaactgacaacacaggctgcaaatgatgtaaacaccgaggaagatcgtaaggcaattcaggacgagatcagtcagttgaacaaggagatcgaccatattgcttatgacaccaattttaaccagaattacatgcttgcagagggaacgccaaaagcgaaaccaggatattttcatgttcagacaggttctctggcagaacagagtattatcatcaattttgtaaatgcgagcaaggaaagtcttggtgtagataaggttgatgtatcgaatcatgaaaaggcatcagaatcgattaccatggtgcaggatgcgatcgagaaagcagcaggatggagagacgattttggagcagtctgggagcagttagcgcgtgcggtaaagaatgcagattacacatcccagaatacacagcagtctgagagcaatattcgtgatactgacattggtgatgaagttctgggatataccacaaaccagatcctggtaaatgcgtcacagagtctgttggcacagtataatagcagtaaggatgcggttctggtattattaaggtaatatagttagagatgggataacagcggttgattaatatatgtcatgttgatcaactgctattattttttgggggcaaagtgtgagtttgtgaaaccgcagaatgatctgtactggaacaataaatatgtttttgactgttatctgacaaaataaaggagatatggcatgcaggcgattatcttggcagcaggaatgggaaaacgtttgggagagttgacgaaaaataatacgaaatgtatggtggaagtcggtggtgtgcggctgattgaacgtgcgcttcgcatacttgacagaaaaaaattaagccggatcattctggttgtcggataccagcataaaaatctggtttcttttgttgattctttgtgtcttaaaacaccggttgagtatattgtaaatgatgtataccataagacgaacaatattttttcactttctctggcaaaagatcagatgatgcaggaagatacgttgttattggaatcagatctgatttttgaagagaacctgatcgatatgctgttagaagatgaccgggatacgcttgcattggtagacaaattcgaaaactggatggatggaacctgcatcgtggtcgatcaggacgataatattactgatttcattccgggaaaattattaaaataccatgagaaagaacattattataaaacagtaaatatctataagttcggagcacagttttcaagagatgtatatgttccatttttggaagcttatgcaaaggttatgggaaataatgaatattatgaaacggtaattaaactcatactgatgctggataaaaatacgatgaaggcaaaaagactaaatggcgaattgtggtatgagattgatgacatacaggatcttgatattgctcagacgttatttatcgaggatgatgtagaacgatatcatcatctgatgcaacggtacggaggatactggcgtttccctcatttgcaggactattgctatctggtaaatccatattttccgacaaagcgtatgcaggaggagatggaatcgaattttgatgtgctggttcgtcagtacccgtctggtatgacagtcaatacgcttctggcggcaaagagttttgatgtgcatgaagaacacattgtgatcggaaatggtgcagcagagctgatcaaaggattactggaagaactgaacggaaaactgggtgtgatccgtccgacttttgaagagtatccaaaccgctgggagaaagatgttattgcatacgactgtacggaaaatgatttttcatatacggccagccagttaatccaatactttacagaaaatccggttgatacgcttgtactgattaatccggacaatccgaccggtcattgtatgaatgcagacgagataaaacggctgctgcagtggagcaggcaatgtgatataaatctgatcatagatgagagttttcttgatttcgcagatgcggaaaatttatcgttattatcggaacaggtgttaaaagaaaacaaaaacctttatgtggtaaaaagtatttcaaaatcatacggagttccgggaatcagactgggaattttagcaagtggaaatacagatatgatcgggcgtttaaagaaagatgtatcaatatggaatatcaattccatggcagaatttttcatgcagatcctggacaagtataaaagcgactatacagattccctgcggaaaataaaggaggaaagaagtcgttttctgattgaactttgtgcgatcaaaaatctaaaggtctatccgtcacaggcgaattatttcatgtgtgagattttagatggaatcagcagcgaagaactggcaggaagacttttaaaggaaaatatcttgattaaagacctgacaggaaagatacataatggaaagcagtatatcagaattgcgatccggggagaagaggagaaccggatactggtggagaaattgaaggtatgtatgaagcagtagaagagagctggggcctgaaatatggttattataaaacaactgcaaagatagtagaaaatgcttgcatagaatgcacaataatgtcacaattgtaaatgctattgaagttcaagaatgtatcgtggtgatacatggtaaaatacgtaacaagaggagaaatatggaagagaaaagagatgtgatatatctttcttccagagaggctttttttaaagttttgtgaatagagcggaggcttgaaaatatggcaaatgaaattgttattgttattagtttcatttttactatagctgcaatgtgtaaagtatggaatttatatgcaatgaaaaaatatagtgaatccaaagaagagaggttaggattgacatacggattttatgtagacaatatgcaatttgttgaaattgaaggaataggaaatgatgaaaatggagattttgatattgcaaaggccattaagaaaatagaaatgccggatgatgtaaggatcaaagcataatgaataaaatagattttttagaattttataatggtgtagttaaaaaactaggggtgcatttggaaaatgagtataggcaatttcatttttgcgataatcctgattcattgtatgaagaatatctcaatcaaaagaccatgttaagagttttataccaaaagaaaaatggtgaaagtaaaactttattagacaggcataaagtatgtgcctgtatgaccgcagcaatcattaaggtaagactggtaagtggaaatatccaaacggatgatagtttttctttatccgttgcatccaggattaacgaacaactggcttttatgagtacgtgagagttatttttaggtttcataaggcttcacaaagaagagacagacaaaaaaagatgggcatatcagatgttagatgatctggtatgctttttttataatagggagtgcctcacagctgctcccaatactccttaaacttcacctccgtcatcccttccccgatcatccgatacagctccatctgctttggaatcagagcgctgtaaatggactgcgcataatccggcacctccgcaagaacggttttttctaattctttgtagaaagcataggagggtttaaaatcccggagttttgcaaaatacagtgtctcatacagataggtatggagaaaatatagtttgatttcatcatagtattctttgaaaaatggagtttttttcatgaaattccagacagcaagctggacgtcggcatgcatttttagggtttcttcctgtctcatatcatttcgcatggttccagaatcattttgtctgtaataatagtaggcatcgtttaagattacgattttatttgcaaaatataaaagcgggtatacaaaaagtggctcctcataaatgacatgttctgcgtaggctgtatgagcctctttcagcagagtgtggcggtaaagtttattccagcagccataggtaactttttctgagatcagaaatttttttcggtcactgacagaagaaatttcaattacttccggtgtaatgttccgaccggagtccacggcacccagacggtctgtataataaaaatattcaaactggatgatatcagcatccgattctttggctttttcataagtttccaacagaaaattttcagagacaaagtcatcagcgtcaacaaatgcaatatattcgcctgttgcatactgcagggcaacatttcttgcaccgccctggcgcatattttcctcaagttttaagatcataatgctttccggataggcgcgttcaaattcctgcagcatgttccaggtagcatcctcatctgtggatgcatcgtctacaaagatcagttcgatctggtcaaatccgattgtctgctgtacaagtgacataaagcatttcggaagatattttgttgcattaaaacatgggatgatgacacttacttttttcatagatcgaaattctcctggtaaaaaggttgcgtatggtataataaacaaaaatggtatattattaatttatcacaacaaaaaggaatgcacaatatcagtctgaaaagcagggaggttacaatgtctggaaatatagcgatcggtatacaggatttttccacaatcatccagggaaactatttttatatagataaaacgccttttattaaagaatggtgggattgcggggacagtgcgactttgatcacccgtccgcgtcgttttggaaagacacttacaatgagtatggtggagcagttcttttccatagactatgccggcaggtcagatttgtttgaacatctggcgatctggaaagaagaaaaataccgtgaactgcagggaacttatcctgtcatcagtctgtcatttgcgcggattaaagagagagattatgagaaaacaaaacaaaagatgtgtgaggtgttaagaaacatatatataaagttttgttatattaaagacagtgaaaagcttacagatgccgacagagcatattatgagcgtatgttggaggaaaatataaaagagacggatgcgacatcttctttatatcagttatcagatttcctgtatagatattatggaaaaaaagttatcattttgttagacgaatatgatacacccatgcaggaagcatttgtggatggttactgggatgaacttgtcgcattcacccgaagcctgtttaattcgacatttaagacaaatccggcactggaacgtggaattatgacgggaatcacaagagtaagtaaggaatccgttttttcagatttgaataacttaaagatagttacgactacatcaaatgaatatgcttctgtatttggttttacagagaaggaagtctttgatgcattggaacagtatggtcttgagaaagaaaaaaaagaggtaaaaagatggtacgatggtttcatttttggggaacacaaagatatttataatccatggtcaattttaaattatctcgatacacagttatacaaaacattttgggcaaatacaagtgcaaatagtctggtaggaaaattgattcaggaaggaaatcgtacaattaaggaaaaatttgaaaaattattgtgcggagaatacatctggtcagaaattgaagagcagattgtatacaatcaattaaatggaaatgaaaaagcagtttggagtcttttgctggcgagtggatatttgaaagtattatcttatgaaacgtatcaggatattgaggaggggaagatgccgaaataccagcttgcgttgacgaatctggaagtaaagttaatgtttcagggtatggtacatgactggtttgctcctgtacaaccagattacaatgattttgtaagggcaatgttacttggtgatgtggatgcgatgaatgaatacatgaatcgaattgttatacagacatttagttatttcgacaccggagagagggcatctggggcagagcctgagcgtttttaccatggttttatattaggtctgcttgttgacctgcgggatagatattaccttaaatccaaccgtgaaagtgggtttggcagatatgatgtaatgttagaaccgaaaaattcaaaggaatgcaaagcagttattttagaattcaaagttcgaaatccacgaaaggaaaaaagtattcaagagacagttctgtctgccttaaagcagatctgtgagaaaaaatacgatgcagacctgcttgataaaggaatcagaaaggaacagatatatcattatggatttgcatttgaaggcaaaaaagttttgattgggacagacagggaggagtgaatatgcccaccaatatagcgatcggcacacaggagaacaaccacatgttatcagtctgcatcatcaccaaaaatgaagaacacaatctggcacgctgcctgaaatcattccagaacaccggatttgaactggtcgtagtagataccggatcgacagatcagacaaaaaaaatcgccgcagaatatacggaaaatatctatgatttcccatggtgcgatgatttttcggcagcaaagaattttgcggtttcaaaagcagcacatccgtatgtgatggtcattgacagtgatgaatatttacagcagattgatcgggtacagttagagaaaatgattgccgaacatccaggtgaggttggcaggatccggagaatcaatattatttccggaaaagatggaaagcaggaaaataaagagtggatcaaccgcatttttgcaaaagaaagttttcattacacgggaagaatccatgagcaggtaactgcctgtgacgaaaaggaatatcgtacatacgaagcaccggtcgtcatcggccatacgggttatgatcttccgaagaaagaaaaaaaggcaaaagcgctgcgcaacataagactgttagagcaggaattaaagaattcaggatgggatgaaaaagtgcatgccacgcagttagatcagaatatcgcaaagcaggatacggatgcagagcagaaatctaaaattacggatgcaaaaaaagagcagcagatcccgtatctattgtatcagcttggaaaaagctattacatggcagaagattataacgaggcatgcttctggttcgcccatgggctcagttatgaccttgaaccaaagttagaatatgtcatcgatatggtggaaacctacggctatgccttgatcaacagcggacgcgccggggaagcacttttctttgaaaacatttacgaagaatttggaaatagtgcggactttcagttcctgatgggactcatttatatgaataacgctatgtttgatgcagcagttggagaatttttgaaagcggtcaaacaccgggactgcaggatggcgggagtaaattcctatgcagcttattataatgttggagttatttatgaatgcctggagaaaatcagtgaggcaaagtattattatcagaagtgcggtaattatgagccggcaaaaaaacgtttaaaattgataaacagttaaatttgttatagtcagcttattggagaaacagagtgaaaaatataatttttcaaatgcagaatggagattagaatgggaatatatttaaatccgggaaatgaagaatttcagaaagcacttaattctaagatatatgtggataaaaccatgctgatttctgaaatgaatcagaatctgaataccgaacatcagaatatatgcgtaagcagacctcgccgttttggaaaatctatgactgcaaatatgcttgtagcttattatagcaagggatgtgattcgaaaaacatgtttgcggattataagattgcacaggatgaaagttttgaggcaaatctgaataaatataatgtccttcatgtcaatatgcttgactttcttaaccgtgcacagacagtggacggaatgatcgattacctgcaaaagaggcttttgtgggatatcaggcgggaatacggagatgtagactgttttgaccgggaagatcttattgatgtattagagaacatctatagtcagaaaaaacagaaatttatcatcattatcgacgagtgggattgcatatttcgaaagtatccgggggatgatgaagcacagaaaaaatatctggatttcttgtgcctgtggatgaaagataagccatatattgcgttggcttatatgacgggaatactgccgattaaaaagtatggcgagcattcagctctcaatatgtttgatgaatattccatgaccaatcaaagggaactcgctgaatttaccgggtttacggaagaggaagttcaaagtctgtgtgtgtcatatggtatgccttatgacagaatgaaacagtggtacgatggatatgatttaaagggcgttcagatctataatccaagatcagtagtcatgtcattgctgggacatgattttgacagttattggacgaagacggagacctatgaggcactaaaaaaatatatccagatggacatgtatcacttgaaggcgttaatcacacagcttatatcaggcagccgtataaggattaatccggataagtttcagaatgatatgtccacatttgcgagcgtagatgatgtatttacgcttttagtgcatttgggatacctgacctacgattttgagaacaagactgtttctattccaaaccaggaggtgcagaaagagtttattaactgcatagaggatggcggatgggaaccggtcatggatgcgattcgtaattnnnnnnnnnntgagcagagcaaaagaattgatggaaaagaagaatatgttgcggaaatgatcgagcaggtgcatcaggaaaatatatccattttaaagtataatgatgaaaactctatgtcatgtgtgctttcgctggcatattatgctgcaagaaaagattatgtgatgtatcgggaactcgccgtgggaaagggatttgcagatatcgtgtttgttccgagaaagtttagagatgtgccggcgatcgtggtggaattaaaatgggataaatcctcagatgcagcgattgcacagataaaaaagaagcagtacatgcagagcctgaaagattatcatggacaagtgattcttgctggaatcaattacgacagcacagattccacaaaggatgattataaaaggcatagctgcagtatagaaaaaataaatctataaaaagtacaggagaccaccatgcagacaaccatcatttacatcaccggtgtctacgacaccctcgacttattcacccaggaactgaaaaatgcctttgaatccatgggatatgcttcctttacctatgatgcccgtctcgaagaggtgagcaagcaggcgctgatcgaatgcatcgaagaaggtacaaaaaaagatcagaggtttttctgtgtgacgtttaataacctgggatataatctgtcacttccggcaggcatgaccggaacagggatgcttttgaagcaggacattttccaaagtacagcaggatcaaaaagagcaggttctgcggaagaagagccaaatctctgggaaacttacaatattccatatatcaatatcctgatggatcatccgtttcactatgaaaaaccactgcagaatgcaccggcaacatctattgtgttgtgcacggaccgcaaccatgtccggtatatccgcagatattttaaaaatatccggtatacggattttctgccacatgccggggtggaacttggcagcaggcataagccgcttgcggagcgtggaattgatgttttatatgccggggcattgccgatctacacagttgcgaagatgataccggatctgtcatccatcccggaagtcgatggagaggagatggcacaggctgtgctgtcagaactggtgcatcatcctgaccggacaacagaggatgtgatagaagaatatttaaaatataagcggaatgatatttcagaacagcgtattcatgagatcatcgtgcagatgcgttttattgactcgtatgccacgtcatttttccgtgaacaggctgtccgtattctggtggaaaacggaatacgggtaacggcatatggaacaggctgggatcagtgtgagtggagcgacaatccgtatctggtgtatggtggaaaagtacttgcgccggaaatattgccactgatgaacgatagcaagattgtcctgaatacgatgacctggtttaaagccggagcacatgaccgtatttttaatggaatgcttgcgggggcagcagttgtgacggatgattccacttatctgcgcagagaatttacggatggaaaagaatttgtcatgttttcaagaaatgagatccggactttgccagaccgtgtatttgacctgtttggccacatgcagtccacacaaaaaatggcagactgtggatatcaggcagtaaaagaacatcatacgtggaaaagcagagcggagtggatccgggaagcctggatgtagagcggaggttctcattccctccatgcaacaggttttacatacagatgaaaacgttattttggctgacacggcacaggaatggagattattatgcacatattaatgtatcgctggaaagcttataattacagagacatagagcagacttttttattactggggcatacggtggataatatcgaacagcatcttggcaattatgatattgatccggaatttgaaaaaataattgagcacaaaatacaggaaacgcattatgatatggtatttacggtcaattattttgcactgatttcgaatgtctgtcagaagatgggaataaaatatgtatcgtggagctgtgacaatccgctgatcagtatgtatcacgaatccatttttcatccctgcaattatatatttacctttgacaagacaaattatctggaatttcgggagatgggagtagagcatatctggtatcttccgcttgcggtagatacaaaccggatggatatggtgattgcaaattcgccggaaatacagaaatacaaaggggatatcgcatttgttggaagcctttatgaaagaaattcttatgataagataaaaagcaggctgccagaatatctacgggggtattttgacgcagtgatcgaggcacagttaaatatcagtggcgcaaatattgtggaacccatgctgaccacggatatactggaaaaacttcaggaatattttgaactggaaaaatcagaagggtcgttttcggatcttggactgatctttcagacaaccgtacttggatttaaaattgcggaagtggagcgcagacgtgcattgatcgaactgtcaaaacgttatcatgtcaatgtgtacagtaacagtgatgtaagtgatatgctgcggattcagtactgtggttcggttgattactggagtgagctgccgcaggtttttcgtatgtcaaagattaatctgaattttacgattccgaatatcaagagcggcataccactcagggtatgggatgtgcttggggcaggaggctttctgatgacaaattatcaggcggaaataccatattattttaaagagggggaagacctggtatgctttgacggaatcaatgatctttgtgaaaaagcagaatattatctggcacatgaggaagaacgtctggcaatcgcagaaaatggttatcgaaaagtaagggagcatcacaattatatagagagaataaatacgatgctggatattatagaagaaaatgaaaatcaggaaaatgatatatagtacatgatcagtgcgaaagatgcataatctgaagttgcatctgggatattggaatattaaacggacactacagaaaatctgtaagtgtccgtttagcaatatctgtctaacatcattccggaataaacggaggtcaggtaagggcaggaaaaattcttatgacctggttttttgtaagtgatcatcgttttgcttgcataatttaacgggtcaacagagacggttccggcggtcgtcccgagatcgtttttaaacttatttaatgttgcaaagcattcttttgcatccgtggaagtgactgcatccgtcaaaagatgtgtatcgaccttgatggcaccgtcatctgaaagttttaatccatacgactcaaattcattgtaataaggttttaccacctgtgtaaaatcgcgccgcagtttatctgcttcctgtgtgctgtcatagcgatagcttaactggatcagattgttgtatacatttaccagagactggacattgtctacaatggagtcagctgttgttttaaagccgatctgtacagggtttgcctgggagcttggtttattcagtgtcagttcaaaagcattgttgacagtaaaagtatttgacagagatgcatgctccgtaccgtttaataagaaagaagaattacttgctgtctgggtaacacaatcaataccgagtgtctgcattgctttttcggatgcatgatcggaacttggggtaacttcaaacagataggactgaccgtctgcaagaccggtctgacttgaagttaaacgcagggcaatcttgttactggcatttttggcaagatcggcatgaatcccggcacctgaagaattgaccaggcgtgcaagcttttcaagaatatgctggttgtcatcatttctgcttacggtatactgaaactcatatgaacttaaatcagttgatatatcgaatgtgtaagtacctgttttgaaatcgcattcatcagggtaaagaaactttccgacattgatctgtggggctgcaagctgttttacctccacatcaaaatgcaaagaattatcgagactctgatcctcaccaatgtaggtaacattgacagaagattcgtcggaagactttgcaacttttttgttgaatacattttcaatcccctcgtcgttgtcagaaagggcagcgattacattctggatcgaacgggtatgttctttcaggtcaatcgcaaattttttcacatccgtggaatctggaattttatacagaggagtatctttatttgtttttacaatctgattatagacagcacgaagctgactcttcttatgggtatcataacgcgataccttcgaagtgccataagtgcttaaataataatgataggcactgtcaatagcagccaagaaaacccctcctttcttccatgaaatatatacatttatcaggttataggacagcatccttgccgcctggcatgataaatgtggggattttaattatatttttaaaaattctttaaaagtatttcggtctaactatataaaaatattataccatttgagaaaaaaatgtgaaataggaaaaaataatcaaaaaggtttaaaagggtataatatacaaaaaaagattgacggaaacaagtggatatgatatagtagacaggcgatggaagtaggtcttttttttatgcctttttttaaggactgtcgctgatccttaaaaaacgtctcactacggagaccggggcagaaaaaagcacaaagaattttaatggaggtggaagttgtgcgcacaaaaataacattggcatgtacggaatgcaaaaaccgtaactacaacatgacaaaagacaaaaaagctcatcctgacaggatggaaaccaaaaagtattgcagattctgcaagacccatacgttacacaaagaaaccaaataagacgcgcgtggcaaaggagtgaaaaaatgggagaaaccgagaagttagacaaggctccaaaagagagctggtttaccggtctttcggctgaattcaaaaagattatttggccggagaaacaatcacttgtaagacagaccacagcggttattgctgtatccgttgtattaggtcttatcatcgcgcttttggatttcgcaattcagtatggcgttgatttccttgttggttttaatttttaatggaggcagagtgatttatggcagaggcacactggtatgtagttcatacctactcaggatatgagaataaggtaaaagcgaacattgacaagacaattgagaaccggcatctggaagaccagatcttagaggtccgcgtaccgatgcaggaggtcgttgagctgaagaacggcgcaaagaaatccgtatcaaagaagatgtttccgggatacgtgcttatcaatatggttatgaatgatgacacttggtacgttgtcagaaatacccgtggtgttaccggatttgttggtccgggatcgaagccggtaccgcttaccgatatggaaatgagaccgcttgggatcaagacagagaacattgaggttgattttgctgagggagacaccgtagttgtcaccggaggagtctggaaagataccatcggcgtgattcaggcgatgaatcctggcaagcagagcgtgaccatcaatgttgagcttttcggccgcgaaacgccggtagaaataagtttcgcagatgtaaagcttgcaaattaagcgagcaatcctaatcaggaaagaatgaattaaggaggcaattccaatggcaaagaaagtagaaggatatatcaaattgcagattcctgctggcaaggctacaccagctcctccagtcggacctgcacttggacagcacggtgtgaacattgttgagtttacaaagcagttcaacgccagaacagcggatcagggcgatttaatcatccctgtagtaatcactgtatacgcagacagaagcttcagcttcgttacaaagactccgcctgctccggtactgatcaagaaggcttgcaacatcaagtccggttcttccacaccgaacaaggataaggttgcaactctctccaaggcaaaattacaggagatcgcagagttaaagatgccagacttaaacgcagcatccttagaggcagctatgagcatgatcgcaggaactgcaagaagtatgggcgttaacgtagagcagtaagacacgagagtgtaatgcatcagagagcaccggcggtgttcttatggaacgatatagtgggagggtcctctcccgatactaccaccaggaggtttatattcatgaaaagaggaaagaaatatcaggacgctgtaaagtcttttgacaaggcgaatcagtacgatgttgctgaggcaatcagcttagtaaaaaagaacgctacagcgaagtttgatgagacaatcgagcttcatatcaagaccggttgtgatggacgtcatgcagagcagcagatccgtggcgcagttgtactgccgcacggaacaggtaagactgtaaaagttttagtattcgcaaagggcgtaaagttagatgaggcacaggcagcaggcgctgactacgttggaggcgaggagttagttccgaagatccagaacgagggttggttagactttgatgtgatcgttgctacacctgacatgatgggcgttgttggacgtcttggtcgtgtacttggaccgaagggcttaatgccaaacccgaaggctggaactgttacaatggatgttaccaaggctatcaacgacatcaaagctggtaagattgagtacagattggacaagaccaacattatccacgtgccagtaggaaaagcttctttcactgaggagcagttaagcgacaacttccagacccttatgggtgctatcaacaaagcgaaaccgtccagcttaaaaggtcagtatgtaaagagtgcaactcttacatctaccatgggacctggcgttaagttaaacgtaaccaagatcacaaactagtttgtgttggtggcgaaaagtgttgacagccgcaatatacagtgttataatgcagaagcgttgtaacgcggtgcgtccgtacggatgcagtcgtctcacatgagacagatgccacagcagtggcagatccacatctgtggattgcatataatggccgaagacagcaggtgccgcaaggcgtaatcgcagagcctgccgagggactttcatgagcaatcattgagaatgagattctgatccctctctgtccaggcagagagggatttttatatcctttcggatttgttatatgcgtaaaatctaaaaaggaggtgcacgattcgtggcaaaggtagaattaaaacagcctatcgtacaggaaatttctgaaaacatcaaagatgcgcagtctgttgtagtcgttgattaccgtggacttaccgttgcagaggatactcagttacgtaaagcattaagagaagctggtgttacttataaagtatataagaacacattagtaagccgtgccgtagagggaacacagttcgagagcttaagggacgttcttgagggaccgaatgcattcgcaatttctacgacagacgcaacagctccggcaagagtattagcagatttcgctaagaaagctccggctcttgaagtaaaagccggcgtagttgagggtaacttctatgacgaggcaggcatgaaggcaatctcttcgattccgtcaagagaagttcttctttccaagttacttggaagcttacagtctccgattaccaatcttgcccgcgttcttaatcagatcgcagaaaagggcggtgcagctgacgcagcagtagaggctgctccggcagaggaagctcctgcagcagaagcagcagagactccggcagaataatccggatcgaatgtagtgaaaaaagccgcagggatctgcgggcagaaaacgtatcatcgtgatacaatctcaatattaaatggaggaaaataatcatggcaaagatgacaacagcagaatttattgatgctatcaaagagttaagcgtattagagttaaacgacttagtaaaggcttgtgaggaagagttcggcgtatctgcagcagcaggcgttgtagttgcagcagcaggtgctggcgagggcgcagcagcagaagagaagactgagttcgacgtagagttaacagaagttggcccgaacaaagttaaagttatcaaagttgttcgtgaagctacaggcttaggcttaaaagaagcgaaagacgtagtagacggagctccgaaagtattaaaagaagcagctgacaaagcaacagctgaggatatcaaagctaaacttgaggctgagggagcaaaagttacattaaaataattgcgggtgttttatacgcagtgattgtaacagggcggttgccggataattccggcagccgcttttatactttataggattcgggggtcaaaaggtggttcataacttagtgattgtcaaattgcacaaagccgagactgttt

SEQ ID NO: 966 - DNA, 7710 bp, unidentified
  source 1..7710: mol_type = unassigned DNA
atgaacaaattgaaccataccaacacaatcaaaaatgaccgttttccatcttccctgtttttggtgtattttctcgtattgctgttaatgtctggtattcatacaggaattatcgtaggtatgaatgcactggggtggaacaaaatcatacaggtaattttaccgcttggttattggactgttgtggcagttggattgacattttttacgaaaaatgtgatccggaaaagctatgaaaagccaatgcatgacctggcagatgcaactaaaaaagtggcagagggcgatttttcagtgtatgttccaacacttcacaccgctgaccggctggattatctggatgtcatgatcattgattttaataaaatggtggaggaactcggcagcattgagacgttgaaaacagactttttctccaatgtttcccatgagatcaagacgccgcttgcaattatccagaacaatgcggagctgctctgtatggaaaagacgccggagaaacaaaaagaatatgccgaagtgatctttcagactacaaagcgtctgtcggaacttatcagtaatattttaaaactgaacaagcttgaaaaacaggcgatcacgccggtagcagaagagtacgacctgtgtggacagcttgcggaatgtgccgtgaattatgagccggtgtgggagaaaaaagatattggatttgatgcagatatggaagattctataaagatcacggcagacgctgcgttgatggagatagtctggaataaccttttttccaatgcagtgaagttcacagaaccgggaggaacgataaagctgaccgagcagtcggatgattctgagatccgtgtgtcggtggaggataacggctgcggaatgacggaagagacaaggaaacatatttttgaaaaattttatcagggggatacgtcccacgcaatggctggaaatggacttggactggcactttccctgcgtgttttgcagttaaatgattataaaatcgaagtggaaagcgaaccgggacgcggcagtaagtttacggtgatcattccgaaaaggtagaatattggataacagacagaaagcgaatttctgggaaagcgtagaaaaatgagtgagtttgagagttttgattatacgaaagtgacggttgccgagaatcagatgtcacagtatatggatggctacgagcattttggatggaaggtggattccaatgtacccatagaaaaaggaatgggaaaagtaacaatccatttaaagcggagcagggcagttttaaataaaatggaactgacacggttacagagacatttcgaggcgtgcatgagtgagattgcggcgctcgaaaattccacagaatcttttgcaatgatcgcggcactgaccagtgggatttcaggctgcgcatttatagctggttcagtgttcgctgtgacggctgcaaaaccgatcatctggctgatgattttgctcgcaatcccgggattttttctgtggggaatcgcatatccgctttataaaaatgtgaaaaagtggagagaagagaaagtgaagcctctcattgaggcaaagcttgatgaggcggaaaaagtgtgcgagaaagggcatgcgctgttatagctgtaaagcatctgacggaaaaatacggtggcacgcttgtggcaagccaggagaaatacattttaataattccgaaacaaaacagaagcaattcgcaaacaaaacctctctatgatacagacaacaaatgaaacacagatcattacaaaaaaagagaggaaacataaaatgagcgaaacattatatttagtaacaggagcagcaggatttttaggaagtcatgtatgtcatcagttgttggagcgtggagaaaaagtaagagcatttgttcttgatggtgatccggcaatcaaatatattccaaaagaggcagagattgtaaagggagatctctgtgatatcgattcactcgaaaactttttcaaagcaccggagggcacagagacgatcgtgctccatgtggcaagcatggtcagtgtcaatcctgattttaaccagaaacttgtggaagtgaatgtgggtggaaccaaaaatatcatccagaaatgtttagagcacaaagagtgcaaaaaccttgtctacgtaagttctaccggagcgattccggaaattccaaagggacagaagatcaaagaggtaaatgagtttgatgcagagaaagtcgtgggctggtacagcaagaccaaggcgatggcaacacaggctgttttggatgcagtgaaaaaggaaggattaaacgcatgcgtcgtacacccgagtggtattttaggaccacaggactatgcagtgggggagactacaggaaccattattaaaatcatcaatggcgaaatgccgatcggcatgggcggaagttttaacctctgtgacgtgcgtgaccttgcagcgggctgtatcgcagcagccgataaaggacgaaaaggcgaatgttacattcttggaaatgaggaagtaacgttaaagaaaatgtgtgaactgttagacaaagatcttcactgtggtacctgtaaattttatctgccgctcggattggcaaaactgctcgcaaagcagatggagagaaaggcagcgaaaaccggtgcgaaagcattgatgacgacattttctgtctacaatctggaacgcaataatgcatttgactattccaaggcagaaaaggaactgggctatcatacaagaagctatgcggagacattgcatgatgaggcagtgtggcttagagcagaaggaaaaattgcataaaaggcagtggaaaggaaaaaagtttataacggagatttttgtgatatgaaaaaagtatgtgttgtaaccggaggcggctccggaatcggttttgcagctgcaaaagaggcagcaaaaaaagggtactatgtaatgatagttggacgaaatgaaaaaaaacttgcaggtgcagtagaagaattgagaaaagacggatgcgaagcagaagcgtatagctgtgacgtttcagacagggaacactgctttgcattggcaaggcatgcggcagaatgtggggcagtaaaggccgtgttgcatattgccggaatgagtccgcatatgggagatgcggagaaaatcatgcaggcaaacgcacttggaaccgtcaatatcaacgatgcattttttgaagtgatcgcagagggcggctgtgtgatcgacacaagttccacttctgcttacatggcaccgtcgtttattatgccaaaaagggtttatccgcttgcatgtacagaccggaagctttttatggataaaatgatgaaaaaagtaaaaatgtttccacggaaaacaagagagggtgtcgcctacagtatgagtaagcattttactatctggtttgcaaagcaggatgcagcacgttttgccagaaagaatgcccgggtgttaagtattacgccaggaaactttgagacaccgctcggaaatctcgaaaaagaggaagcgtccacctatctgaaatttgcggcaatcaagagaaatggacgtccggaggagattgcaccgctttatgttgcactgatcgatgagaggttgagttatctgaccggcacagacattctctgcgatggaggctgtatcgcaggcggagccagtgcctttgcgagataaaagtcatagtaattagccaatcaaattgaatcaattgtatttttataaagaatccgctatactgaaacagatttagtatagtggattttttgtattggggagaacattttgattacagtagcaatcgtagaggatgaagcggcagtcacaaggaagctgacgaatatggcgcagtatgcagtatttgcaaatgcaaatggtgcaagcagttttcttgtgataaaataatatagataaattggggggataaatgtgcagatacattattttcaaagatatcattcgaaggagaatgtagatacatctaatactatgctgatgttatctcgcttatataattataatgcggataaattctttgtaatgttgaatgctctaatactgggacaagatgagacacctgaaataacatttgagcttcaggtagcaggagacgaaagtgttccagatgcgattataagccagaaaagttttaaaatagtagttgagacaaaattacataatcaatttcagcaggatcagcttgaaaaacatctgactcagtttggaacagaggagataaaggtgcttttaacgttagatccaaaacctatgaaagaatcattgatggatagttttggcattgtgctgaaaaagtataatgcagataggattaatgaaataaaaacaccaataaggcatgtaaatattacatttgaacaattagttgctgcaatggaagatattgtagatgagcgggattcagagatcatggctgtgcttgatgattataagaagtattgttttgatgaaaaactgatacctgatgatggaaattggatgagagcaattgttgcgggaacaacacttgaagataatttgaaatatgatttttattatgatcaggcttcaagaggctattcgggtcatggatacattggcttatataaaggaaagagcattagagcgatcggaaaattaaaaaagacaattgttgcagagttagtaaatggagaagtgtcatatattaatgaaagcggagaagctgctacaaaagaggagatagaaaagattaaagaggctattgttcatgcagagacagaatatggatacaatttaaaaaccatcaaacatagatattttatagttgagcatttttatccaacagactttaaaaaagcaagtaaaaatccgattcaaaaaagtaaatattttaatctggcagaaatgttcaaaagtaaaacgttgcctaaaactgatgaaatagcatcaatactggatggaaaaacatgggaagagtttcattaaacagtggattttcataaatatgaagaaaataatgttactgtaatagtgttcatatagaggtgtgtattatgggaaacgaatcaggtgaatggattatgcatggcatgaagtgggacaacccggattgcattcattctgtagatgaagcaatcaagtatataaatgaacttggctttttaccattatttaagaatgaaatagatgggttttcacttgaagaaagaactgttccagagtactggtggagtgatgatccagagattgatccatggatgtggcgggctattatagcaaggcggcatgatatcgtctatggaaagttctttgataagaaggcaggatttatatcaaaaaaatggcttcctgtatttgctaattaccgccgggatggatatgattttgatgcattatatgatgatgggaaagcacctaataagcataaaaagataatggtcaattttatggaaaacaatgctgattcagagatttattccaatgaattgaaaaaacaagctggatttggtaaggatggagaaaagggatttgatggtgctataacgaatcttatgatgcagacctatctgtgcaactgcgattttaagaagagagtgaataagagaggtattgaatatggatgggatgttgcagtgtattcatctattgagcatatcaatggatacgattatgtgacttcctgttataaggataatccgcaggattcatggaaacagctggtagactatatgcatgagatgtatccgaaggcgacggataagcagataagaaaagtgttaaaataaaacaatgcatttttgaggtgaatatacataaaatgaattcaaaaaaatccgcagattattgcaagctgatagaaaatgtaaaaaacaaatatcgaaaaaatcctatatatgctaagaacctgacacttggttggtgcgatttgcgtcgtggagaagatttgtgtcaggaaattaacttatggacatattggcaagggagagattacgctaagaacacaccacatattaaatatatgctgataggtcaggatttcggaccgcctgaaaaggaagagataaagggtacgattgcaaatgtccgtaagatgaatgatggtatagatgtgatgtttcatgaaaatgtagatttggaagcaagggattcacagacggataaaaatattgtcggatactttgaactgcttggtaaaaatgaaattgacaagaaaaaatatccagatttgtttttctgcaattgtaatttgggctatcgcagagataagtattctggaaatatgaccagaaagatattggcaaatgatgcagctgaaataaaatcattgattgacattatagagccggaaaacataatctgtctggggcttgatacatctgtggttgtaatacgaactctgattgataaaaagttttcctgtaatagagtatctgaacttataggaactggcgaaccttatatttatggagaaacatatatataccctgtagcacatccggggtattggggtacaggtacaagaggggaggataatgttattgaagattggaggagaattagaaaatagggaggtgccacaatgccatttaagatagttcgcaacgatataacaaaagttaaagctgatgcgattgtaaatactgccaatccaaatccaatatgtgcaagtggcacggatttagcaatatatgaggcagcaggaaaagaaaaacttctcgccgaaagagcaggtatcggtaagattgcaagaggtgatattgattcttacatagatgctaattatgtcagggaaagtcatagaaaagaatatccggtgcgaagcagaagcaacgcccgcatgagaggattgacagaggaacgagaataaagatccatacaatatattagttgagaacaatcgagtatataaacttggaggatgggaatttcttgatatagccaataagctttttgacaatgaaaagcaggtggactggggaagctatgcatatcagtgcacaaaggagcaactggaaaaactgatggaacagactggatgtgaaatagataagatgaatgaactggcatctgagaaaatctatggtattgtgtttgttgaagaggtgtaaatcttttagagaccggagaaattctggtctctttatttcgattaccactgtcaaataaagccaaaatggtttatactttttatcaagtgaaagaagaaagcattaaaagtagatttgatggcaaaattataaaaggaatgatggatatactatcagggtaacaaaagaagaattttatgctggtggcaatagtgatccacgaaatccgaatatcttaaaaatgtttggttttgtaaatgttggtgagcgtgccggaagtggtgtcgataagattatgactgcatgggcagaacaaaactggaaaaaaccggaatttgatttctcagagcgcagtgacagggtaacattaaagctcgaagttggacaagtgatatatattccgggagttgctgatataagaaacacaactgagagtgatgaagcagagacaataacaactatgtcgaaagttgacaaagtacttgcttatatccggcaaaatggaagtgtttcaatgcaaaaagtaatggaaacctgtaactacagatctagaactggagcaagaaagttaatagataaaatgataaatgcggattttatagaaaaaactggagaaggaaacaaaacgatatataaaattaaagaatag

SEQ ID NO: 967 - DNA, 15836 bp, unidentified
  source 1..15836: mol_type = unassigned DNA
ccgtacttcttacgctccttcatacgaggatcgcgggtcaggaagccagccttcttcagcacaggacggttctcgtcgctctgctgcagcagggcgcggctcaggccgtgacggatagcgccagcctgaccggaaacaccgccgccggaaacgcggacgacgacgtcgtacttgccctccaggcccagcaggaccagcggagaacggacgatcagcttcagggtctccagaccgaagtagttgtcgatatcacgatcgttgatggtgatcttaccggtgccggtgtaaacgcgaacgcgggcaacggaatccttacgacgaccagtgccgtagaaataaggtttggtttcgtacatattcgattgcctccttcttagaactcgatcttctcgggcttctgagcagcgtgagcgtgctcggcaccctggtagcagtgcaggcgggtcagagccttatcaccgatggtgttggaagggatcatgcccttgatagcgtaggtcatagccagatcgctgttctcagccatcagcttgctgtactggaccttcttcaggccgccgatgtacttgctgtgggtgatgtggaacttctgctcggccttcttgccggtcagaacagccttgtcgcagttgatgacaaccacgaaatcgccgcagtccacgttgggggtgtaatcgaccttctgcttgccgcgcagcagaacagcggcctcagcagcgacgtggcccaggctcttgccggtagcgtcgagcaggtaccacttacgctcgacttcagcgggctttacgagagtagtgctcatatctatttcctcctgataagctttttgtacgtttcaggcacccttttggggcgcgagtgtcagtatacaacacaaaaacgcgcctgtcaacatgatttttggattttttcggcggaaatttttgaacctctcaaaatcgcttgttttctctcaaatcctctcgattcctgaattccgatttttgtaaaagttttttgcccgccccggcatatttttgccatttgcccgctacaaatcccgctgcggttgtggtatactataaaggatatgggcggtgcacagctgcccttgccaacacaaggagaacacatccatgccaaatgagatcgaccgcacttcttcggcgcagcgccgcagctccaagctgctgacggcgatggccattttcatctgtctgggcatcgcagcctacatggtgctcaccctgctggtgaaccggcagacccccgcgacgcctgacacccactataccggcacgaatggcatctctgtctactacgacagcagcgtgtggagcgtgtgccgcatgaccgaggacgcaacccttggcaccgtgctggagctggctaccgccgacacggcagacagcgaggactatcaggccgtgctgttgcagcggggcaccgccgacagctacgaaagctttatcgaggactcggaagccgacctcaagcaggcctacggcgtcatcaagccccgcaaggtcaacctgaccgtggagggtgcagcggtggaagcggtgcgctgcgatatccgcacctactacgccgtgctggccaccatcacctacgacagcggcgatgtggtctatgtctcggcgctgacaaagctggcgtccatcagcgatgtggtcaatctggtagaaagcgtgagcctgtcatgagcgaccttcgtgcaatgcagcggctctgcggtctgatgcgcaaggccgtacaggactatgaaatgattgcccccggcgaccgggtgatggtgggcgtttccggcggcaaggacagcgtggcgctgaccatcggtctttccatgctgcgcaagtatatcggcttcgattacgaggtggtggcggtcacgctggacccgcagttcgaccatcagcccatggactactccgcgctggcagagctgttccggcagcacggcatcccctacgaggtgcgccgcaccgagatcggccctgtagtgttcgagtaccgcaaggagaagaacccctgcgccctgtgtgccaagctgcggcggggtgcgctgcacaccgccgcgcaggagctgggctgcaacaaggtggcgctggggcatcatctggacgatgccgtggagaccttttatatgaacctctggcgggagggacgcatcggctgcttctcgccggtgacctacctctcacagcgggatctcaccctcatccgtcccatgctgcttgccaccgagtacgaggtgcagtgcgccgtgcgggaggcggacttgcccatcgtgaaaagccgctgccccgccgacggtgttaccgtgcgggaacagaccaaggaatttgtgcaggagcgctgccgtaccgaccacgccttccgccaaaagactctccatgccttgcaggagagcggcattgacggctggcgtcccgtccacacgggccggggcagctttatcgtaccaaaaaaggaaacagatcatgcagaaacaaccgtttgaaaaacacgtctgggctgagatcgacctcgaggcccttcggtataatttccgggaggtaaaggcccgggcaggggcgctgcccctgtgcgcagtggtcaaggcggacagctacggccacggcgcggtacagtgcgcccgggtgttcgccgaggagggcgccgcatggctggcggtcagctgcctgaccgaggctgtgcagctgcgcaaggcagggcagactttgcccatcctcattctgggtcatgtgcagcccgcctacgccgccgctctgatccagaacgacatcaccgtggcctgctactcccttgcgcaggcacacgccctgagcgaagccgccgtggcggcaggcggcagggtacacatccacctcaaggccgacaccggcatggggcgcatcggctttgccctgcgcaccgattttgacgccgccatccgggagatgctggaagcctgtgcgctgcccgggctggaaatgaccggcctgttccagcatttttccgtggccgatgataccgccccggagaatgtggcctatactgccgagcagcacgcactgttcgtgaaagccttccacgcactgaaggccgccgggcgggagcctgcccttgtgcactgtgacaactctgccggggtcatgctgcacccggactggccggagggcttgccccgggagcgctgcatggcgcgccccggcatcatcctgtacggctacgaccccagcgacgaggtgcgctttggacgctttaagccggtaatgacccttaagaccgtggtgagcatgatcaaggagatgcagcccggccagtgcgccagctacggccgccgcttcaccgccgaaaagcccactaaggtagccaccctttgcaccggctatgccgacggctacccccggcttttgagctgcggcaaaggcgtggtggagatccacggcaaggcctgcccggtactggggcgggtgtgtatggatcagatgatggtggacgtgaccgatgtaccggaagtgcgcgaggacgatgaagccatcctgtggggcggcaccgtgagcgacaccgcagagaccattgcccgcaagaccgataccatcccctacgaagtgctgtgcggcgtttcccgccgcgtgccccgtgtctaccgcgaccacggacagatcgtggccgtggaggactggatcttagaagcataaagctgcccggaggaactacatggcaagagacaacatccgcaacttctgcatcattgcacatatcgaccacggcaaatccaccctgtccgaccgcattctggagctgaccaagagcgtggacgagcgcaccatggaggaccagatccttgacaacatggatatcgagcgcgagcgcggcattaccatcaaggcgcgtgccgtgaccatgaactatactgcaaaggacggcaagacctacgagttcaacctgatcgacaccccgggtcatgtggactttgcctacgaggtcagccgcagtctggccgcctgcgagggcgccattctggtggtggacgccacgcagggcgtggaggcgcagacgctggcaaacacctatatggcactggagcacgatctggagctggtgcccatcctgaacaagatcgatctgcccagcgcccacccggacgaggtggcgcaggaggtggaggacgtgatcggcctgccctgcatggacgcgccccgcgtctccgccaagactggcctgaacgtcgatcaggtgctggagcgtgtggtcagtgatatccccgcccccaccggcgacccggatgcccccttaaaggcgctgatcttcgacagcatctacgacagctacaagggcgtcatcgtctacatccgcgtgttcgagggctcggtgaagcccggcgacaccatccgcatgatggctaccggcgcagagttcacgctggtggaggtggggcacatgggtgccacctccctgaccccctgtgcccagctgcaggccggtgaggtaggctacctgaccgccagcatcaagacggtgcaggacacccgcgtgggcgataccgttacactggcagagcgccccaccgcagaagcgctgcccggctaccgtcaggtcaaacccatggtgttctgcggcatctaccctgccgatggtgccaagtaccctgacctgaaggacgcgctggaaaaattgcagctgaacgatgcctccctgacctttgagctggagaccagcgccgcgctgggcttcggcttccgctgcggtttcctgggtctgctgcatatggagatcatcaccgagcgcctggagcgggagtttgatctggacatcatcaccaccacccccagcgtgcgctaccgcctgaccttgaccgacggcacagtggaaatgatcgacaacccctccagctacccggaccccagcaacatcgtcaagcaggaggagccctttgtggatgtgcatctgtacacccccaacgactatgtgggcggcctgatggatctgtgccagagcaagcgcggcgtgctgatcgacatgaagtatctggacgatgtgcgggtggacctgcactacgcgctgccgctgggcgagatcgtgtacgacttctttgatgccatcaagagccgcagccggggctacgccagctacgactatgagttcaaggagtaccgtgagagcgatctggtcaagctggactttttgctcaacggcgaccccgtggacgccttgtccatgatcgtgttccgggacaacgcctacgccaagggacgccgcatctgcgaaaagctgcgggacaacatcccgcgcaacctgttcgagatcccggtgcaggcagccatcggcggcaagatcattgcccgcgagacggtcaaggccatgcgcaaggacgtgctggccaagtgctacggcggtgatatctcccgtaaaaagaagctgctggaaaagcagaaggaaggcaaaaagaagatgcgtcagctgggcagcgtttccctgcccagcgaggcctttaccgccgtgctcaagctggacagcgacgacgattgatctgcaaatatgcaaaagggatgctgcgtgcgcggcatcccttttttgatgggaactcccaaatgtgaaatccgcccatggcagagacgcactctttgcttttcctactaaatatgttataatttatttatatatcagtttttgtatccgtttttggaaagatgggctgcggccttgtgctgcgcccttctctatgcaacgttccccggcagaaaggatgtggcctttatcaaagcaaaacacggaaaaggcgcagcacaaagcggcagacacacacacagcggcagctgcgcacagagggcaacgcccccctggaagcaggtgctgctgacgctgctggttcttgttgccctgctcgccctgctgggcggggcgctgtggcagaatatctgctataaccgcatccactatacggcagagttctatcagatccattcccgcaagctgacccagagctgccgggtcgtttttctgaccgatctgcatctgcgggagtacggagcagataactgtgagctggtgcaggatgtccgcagccttgccccggatctgatcctgctgggcggcgactttgtgacctacggcgaaggcaccgattatgataatatgctctccctgttccgtcagctgagcgagattgccccggtatgcggagtgctgggcaaccacgaggacgagctgtattttctggacaacgaccgggaactggtggaaaagttcaccgccgccggggtgaccgtcctgcgcaatcaggaggcgcgctataccatccacgacaacgttatcagcattctgggcgtggagggcagcccggcggatttttctaactacggtgccagcacctttatggacagcgtggagccgcagacagactacgacctgcgcatctgtctggcacacgttcccacctactttcccgagcatctggaaaattattcctttgagctgggtcttgccgggcacacccacggcggcatcgtgcgtctgccgaagatcggtccgctttataccgccgaggagggctttctgcccgactatgccgggggcagttatacacttgccaacaacgccaccctcattgtaagccggggactgggcgattccagccgggcgccccgcatcaacaatgtgccggaactttcggtcattgacatcgactaagcagcctgcgctgcgcgtgcaggccgctgcaaaagggtagaatgccatggatgacatcaaagaaaaaatcaaacaggcgctgcgtcatatctggacaaataaataccgcctgtttctctgcctgctgaccttgtgctgtctgttcgggctggttcactatttcaaaagtgcggacagcgccactgccagcatctccttcaattactccgaggcggcgcttggcatgaaccccaacaagacccgcttcaacgcctacgagatcgtgtcggacgaggtgatggagcgcgccatccggcgggtgggcttgcaggacagcctgactgcctcccagctggcccagtgcctttccctgagcccggacggcaccggcagcgccaacggcagcgagtatatcagcaccaactactatctctccatcaacacccgcaagctgaacctgggcaaccgcaagcccacagatcttttgcagagcgtgtgcgaatcctaccgggagatctttctgagcaactactgcgataaccagagcatcctcaaggaaaagctggaagtgaccaccgcgtgcgagccttacctgcgactgaacgagctggaggtgcgcgccgccgcgctgaaccgctatctgaacgcccgtctgggggaaaacaaaagctttacggacgaggcaaaccccgacccttccaccaacaactttaccacactgggcaaaatgatcaacaatctggtggattacgacctgcccaacgccatggcctttgtcatcgaaggcggcgttgcccgcgacccggccatgctgaccagcattctggaatacaagaacaagatcgacgatattgacatgcgcacccagcaggcttactatgacgccgacaaaaagggcatttccatctacgaaaaatccatgacctccatcatgatgatccccaccgtggatgaagcaagcgagtactatatgtcccgcaccaagaccgccatggatgcgctggcgcgggcggcagacgcttctctggccgatgccaccgactaccagtccgagatcgtgagcacgaattatgtgatccagaagatccgggagctggatgccggccagccgcgtctggccgaggcgcaggccatggtgaacaagctggagaccgccatcaacgagatctcggagcagctgtttgtactggacaaggcgtatatcaagtacaaatcccagaactatattacctttacctacggctcggcctccttcctgcagcgcctgagcctgaaaaagaccctgatggagtccgttgccgtgatgctgggcagcgcatggctgctccacgaacgtaaacgcagaaaggcaaggcaccgcagatgaaaaagtttgagatcctgcgctatctgaagcgtttcagcctgctgatctttctggtgtcgctggcaggtgccgccgccatctacctgtatgcggacggtcggcagaagtacactgcatcggtcattatccgctataccaacgacggcatctcggacggctacaccccggacggcagtgaactggacgtcaacgagatctactcctccaccgtcatctcgcaggccatggatgcactgggtgcttccgggcggctgagcaccatccgttccaacatctcggtgaccccggtgatctcggaagatcagcagaccatcaacgacgccctgctgcaaaagggcgaagaggtgacctatttcccggatacctacaaggtgagccttgtggtggatggagagcagggcgcgggttatgcccgcaatatgctggatgccatcatccagagctactgcacctattatacggaaaaatatgtggagcagaagctctcgctcaacccctcgtccggtctgctggacaatggctacgattactacgagtgcatccgcattctggaaaacgataccaacgagatgcaggactatctgctgagcaagcgggagcactacccgaattttcgctcctcccgcaccggctacacctatgcagacctgtgcgatatctattccgacttcaaaaaatacaccatcccggcgctgtacgcctatgtgctcaacggcccgcaggtgcgggacggcacggtgctgcaggagtatctggccaacaccatcgaaactgcaaagcagaacgaacagatcaccaccgagcagcgggacagtctgtggagcctgaccgaccagtatgtgtacaagaacgccgatctgctgcaaaactactttactgaccggggcgaggtggtgtcctcggactatatcctgaataacatcgagctggaaggtgctggcgataaggcacagaccacctacgacggtctggtgctgaaactggtatcgctggaacagcaggtcgcatccagccagatcgaccggcagtttcaggaggagatcctgcaaagcttccgcaacgtggattttggcggtacaggcgagcagcacgccaagatggaaagcatgatcaacgactacgaggcgcagctgaaaagctactacaagatcatcaataccagcagcaaggagctgaacctgtacatcagcgcggattatctgaagatgatcagctcggtgcaggtggctgccgccatcaatgtcaagctgtatctgatgctggcgctggtgctgttctttgtcattggctgctgcggtgcaattctgctgggccgcatctcggatgcggtggattatctgctgtatgtggacaaaaagaccggtctgcccaaccgcgaaaagctcaacgtgtatatcaccggcatggccgaccgcatcctgccggaggactatacctgctttgctttgcagctggacaacctgaccgagatgagccgccgcttcggctaccatgtgggtgacggcatcctgaaggatttttccggtcttttgcagctgatgggcgataccgacggcaccgtgggctacaacggcgcgggcaagttccttgccttctttgatgaatgcagcacccggaaggcagaggtcatgatccgcattctgcaaagtcaggtggacgagtacaataagctcaacccggagtaccccatcctgttcaccgccgcatgggccaccacctcggaggaggagctctaccatgtgcgcgaccttgtgcgctgcgcacagaaaaagatgtccctgatcgcagaggagggcggcgctgtccttgccggaacggagcgtggtgaagcatgatccagaaccgacgcgcttaccagctgatccactgccgcacccgcagccgtctgctggcgggcgctgccgccgtgtgcggcgcagcctgcggccatgcagaccttgggctgtaccatctgctgcaccggggcggtgccacgctgccggacagcacacaggccgaccgcgccgcgctggcagccctgtgcccgaaacccacagcagaagagacctgcccgctgctgccgcagcaggacccggcggtgaccctttcggtcattgtgccggtgtacaacggcgaagctaccatcggcccctgtctggacagcattttgcagcaggagaccagctgcaccgtgcagctgatcgtggtggacagcgattccaccgacggcacagccgccgtgctggaacgctaccgggcactgcccggggtgttgctgtgcaattgcagtgcgccccgcagcgccgccgccgcccgcaacgaggggctacgccacgccgtgggccgctggctgatgttcgtggacagcgacgatctgttattgcccggtgccatccgcaccctgctggaggccgcacagcgccttgacgccgatgtggtgcagggcggctggcagtacctgtacaccgacggcacccacggcccggtgcagcgctacccggcggcagtctacgccggtgccgccgcgccggagcggttcgagctgcccgggatgccatggggcaaggtgtaccggcgggaactgtttgcacaggtgcgctttccggcttactatacctgctttgaggatgccatcatccattttctggtattccggctggcaaagactgtggcctctgtgccggagatggtctatctgtggcgcaaaaaccccaaggggcttaccgccacaagtcaacaccgccctgccgccgtgcagagctactggatcatggagcagctggcagtgcaggatgctgcgctgggcctgccccacgatgcgttataccgctgcaccctgacgctgcagctttcggctttctgctatgccactgtatccggcctgccgccggaaacgcagcaggctgttttccggctgtgctgtgctttgtacgcaaaggcgctgccgcaagagggcgcactgccccgccgtgcccgctggggtgcccgggcgctgcggcagcaggactttgggctgtggtgccgctacggcagaagatttcagttgttataatataaggagtacccatgatacgagtgctgcattcggtcagcaatatggaccgcggcgggatcgagaccatgctgatgaactactaccggcatatcgaccgcgaaaaggtccagtttgattttatcgtcaacaagcaaaagcccggcgattacgacgacgagatccgccgtctgggcgggcacatctaccagagtccgggattaaacccgctgcactacccggcgtatctgcgctttgtgcagcagaccgtggccgcagacccccgcatccgcatcctgcacgcccacaacgaggcgatggggctttatgccctgaagggtgcggagaaggccgggctgcaagtgcgcattgcccacgcccataatatctggatcgtccgggactacaagtggccgctgaagatgttctgtaagcagctgctgcccggcgccgccacccacctgtgggcctgcggccgggatgcgggcatctactactttggcaaagcggactgggagcgccggggacagatcattcccaacgccatcgagccggagagcttccgcttctcccccgccgtccgcgccgaaatgcgggcacgctacgggctggaagaccgggtggtgctgggtcatgtaggccgctttgatgtccgcaagaaccacgagcgtctattggaaatctttgccgcctttttgcagctggagccccgggcgatgctggtgctcatcggcaccggcaggctggagcaggctgtccgtgcacaggcgcaggaactgggcatcacagaccatatcctgtttgccgggttgcaaagcaatgtggccgactggtaccagatgatggatctcttcgtcatgccctcccgcttcgagggtctgccggtggtggggatcgaggcgcaagccgctgggctggggtgcgtattttcggacgcagtgccggcggaggtgctgctttcttcccatgccatccagatcccgctttccgccagcaatgcagactgggcagcaggcttgcagcggatgctccaccagccctgcgaccgctctgctggtgcagaactgatccgacaggctggctacgatatcaacatcgccgccgcccgcttgcagcagcagtacctgcaactgggagggcaggcgtaaccccccggcggctgcgggaacacccacaataaaaggagagcccttttcatgcgcacattggatcagatcctgaccaaaaaggattacagccggaaaactccggcctctttattttataaggacagcccactgtggcaaaaactgctgaccatcggttgcgtggtctttttggccggtgccgggctgggagagtggaaaccaatcaacagcgcagtgggcggccttcccaaagccatctctctgggggtgatcgggctggcaatgctgtacaccctgttttacccggacgaaaagcgtctccgggagttatggaagcctaccctgctttatatgtccctgatggcggcgctgtttttctggtcgatggtcatctggatcgaaagctttgccgcagtgtcttccatgatccgaagctgctccaagatcgtgttccagagtattgccatcctcactgccgtggcgctggtctatctgttccgggaaaaagccatcgagctgtttaccatcagtatctgcattgccaacacggccatcatgctgctgagcattcctggctacggttttgcagccagcatccagtctctcgttacctgtttgatcaccttcggtgatgcggatggctatgcgctgcagctggagattcacgacctgacctttgtgttcgggcagatgatcttgtactacgccgtttttgctcctcgtactacccggcaggaaaagcgcaagcgctggctgtatctgctgctctgctgctggttttttctggtcggtatgaagcgcatcgccatcccggcggtggttctgttcgtcctgatcgctctgcttctccgcaagcgcaaagtccccggctggttttacccggcagtgggcgtctgctgcatcctgttttttctggcattcctctactgtgtgcgctacggtgttatttcaaggttgctgaacagttttggcattgacatgatgggacgggactacctgtggagcatggcgaatccctactatgaattttctatcacctatatcggccgcggttttgaatatgtggacaccatcatcgcccagtggtataatgacggactcatcaaccagccttaccccttccacaacgacatcctgaaggtctttgtagaggtaggctttccgggttttctgctctggtccagcatccagtatgttctgattccgctgttctggcagcgctatgcagaccaagagaccacgttgctgtatctgtccgagctaggctatatgacggtgacctacctgaccgataataccgccttttatttctggagcacgatggcgctgcgtctggtgacgcttgcctacgccatggagcgcaaaaagcccccggaacccaaggtgtggatgccggacagtcggcaggagatgcgggaccgcatccatattctgatgaaggaagtgtgacggcaaggagtgaaaacaatgccctgtatctcgtttatagtgcctgtttataatatggagcgcctgctgccccgggcgctgcgctcactgcgggcgcagactttgaccgacttcgaggccatcctcatcaacgatggctccaaggacggcagcgccgcgctgtgtgcacaggctgctgccgaggatgcgcgctttcgcttcatcgaccagcccaacggcggcgtagccgctgcccgcaacgcgggtctggatgcagcccggggcgagtatatcttctttctggatccggatgactgggtagagccggatgcggcagaagtgctgtatcatgccgcccagaatgctgatgcggactgcgtggagtttgggctgtatctggacagctatgatgaaaatgaccggctgctgcacacgcagaccagcggcagcaccctctccggcgtgtaccggggcgcgcccttcaaggaacatttcgacgagacggcgtcctcgtatctggtcaccaataagctgttccgccgggcgtttctggagcagcatcggctgcgtttctcctgccatcagctgggggaggacgggctgttctttgtagccttttatcgtcaaaatcccggctgtctggtggtgctggaaaagccgctgtaccactacaccgctgcccggcggggcagcctgtccaacagctaccacccggagcgtctggaggataacttttatctcagcgatgcagtgtgggacaccgttgccgcgtggggcttacaggacagccccatgcaccgcgcaaaggcgagctactgcacgatccgcgacctgatgatgggaatcaagaatcttggatgcagcccgctttccctttccgagcagactgcttggctgcgcagtaccctgcaaaagccccgggtgcgcacggcggtgcgcagcaccccactgcacgccatgcagagccggaacgaccaggtaaagctgttgctgctcaagctgcggctatgccgcgcggtgctgctgctctcgggcgcaaatcagcgtaagaatacctgaagagaaacgcaaaaatccccccgctgccgactggcagcggggggatttgttaccgatttaaatgaaaatcagcgcttagttctgcttcatgcgagcgaagcagtcagagcagtagaccggacggtcctcacggggctggaagggaaccttgcaggccttgccgcaagctgcgcagacagcgtcgaacatctgacgctcgccgctgttgctgcgtgcgccgccattcttgcgggcgtcacggcagggcttgcagcgctggggctggttctcgaaaccgcgagaagcgtagaactcctgctcaccggcagtccaaacaaattccttaccgcagtccttgcagaccagagtcttgtcttcaaacatagtagtatctcctctttagttagttcttgcccacggaaggattgtaaccatacctttggttttgggaccatcgcgctgatcagtaagcttaccaggggcttgaatagataaacgccctcggattgaggactttcctattgtaccgttatttttgagatttgtcaaccaaaaaacaaccgttcgcccttttatttgtacacatggcacaaaccgacagcatatatttgggtaaaatcaccgccttaagatggaaaagcggcgcgccgcacaggttatgcgcagcggcagataatttatgatttgcggttcagaaacacctgcgggtgtttctgaaccactttttcacacaagcaaaaaggggctgccgcacattctgtgcagcagcccctgcaaagccctttgggaaaagcttacttctcgatgacttccttggtgtcgcgggcgatcatcagctcctcgtcggtagcaataaccagcgtgcgcacctttgcgccccaagcggtgatctcgcacacatcgccaacagggtgcttgttcttctcggtgtcgatgcggatgcccagccaatccatgtggtggcagatctttgcacgggcaatggcatcgtgctcgccgatgccgccggtaaagacgatggcatccacgccgcccatagctgcaatgtagctgccgatggtctttttgatctggtagttcagcatatcggaagccagctgtgcgcgcttgttgccggccgcggcagcctcttccacatcgcgcttatcgctggaaacaccggagatgcccagcagaccggacttcttgttcaggatctcgtccagctcgtggccggtgatgttcagggtgt

SEQ ID NO: 968 - DNA, 9370 bp, unidentified
  source 1..9370: mol_type = unassigned DNA
  misc_difference 8220: note = a, c, g, or t
  misc_difference 8221: note = a, c, g, or t
  misc_difference 8222: note = a, c, g, or t
  misc_difference 8223: note = a, c, g, or t
  misc_difference 8224: note = a, c, g, or t
  misc_difference 8225: note = a, c, g, or t
  misc_difference 8226: note = a, c, g, or t
  misc_difference 8227: note = a, c, g, or t
  misc_difference 8228: note = a, c, g, or t
  misc_difference 8229: note = a, c, g, or t
ccagccatgcaaagccacggcccagcagctggacgtccagctcatcctgcttgagatacatatcgttcagggtcgtgatctccagctcgccgcgggcggagggcttgacctgctttgccatccggacgacttccttgttgtagaagtacaggccggtgatggcgtagttgctcttggggtgctggggcttttcttcgacgctgagcaccttgccgtttccgtcgaactccacgatgccgaagcgctcggggtccggcacatagtagccgaagacggtgcagcggcccttgttctccgcgttagccacagcggtcttcaggatcttggagaaaccgttgccgtagaagatgttgtcgcccaggatcatggcgcagcagtcgtcgccgatgaactcttcgcccagaataaaggcctgtgccagaccatcgggagagggctggaccttatattgcagatggatgccgtactggctgccatcgcccagcagcgcctcaaagcgcggcgtatcagtgggggtggagatgatcaggatatcctgaatgcccgccagcatgagggtggacagaggatagtagatcatgggcttatcgtagacaggcagcagctgcttgctggtgaccatcgtaagcggataaagccgggtgccggcaccgccggccagaatgatacctttcattttgtgcactccttatattatgaaataaaaaagttgtgcagcttgtacaaggcacggcggcgtatccgccctgccctgtatggattcaaagcggagctgcgtccgctgtaaacaatgttgcgcaatacactctgctcaccgtgcaggcttgcgatagtattacaccttattttactatcaaatcgaaaaaaaagcaaggaaagagcgcccgcctcaaaaattttgtggcgggcgctctcttgtttcgtcgcggcagggactcagaacttgaacccccatttacagaaataccgcagcaggctcccggtctgccacagaaagggcctgaggctgcggtgggccgcacgatgccacgcatggatggcggtgtactggggcacgagataagcctttcccttggtgcgcatcttctgggtcaggtccgcatcctccacatacatgaagtaatgctcatcaaagccgcccacggccttgaactctgccgtccgcaccgccgagaagctgccggtgcagaactcgatctccacgggggcagacaggtcttccccttccatgagataggcgcggttatatttctcccagaatttcaggaacggcagctggcggtagaccatcggccggagggcgcagcgccgcaggggcagatgctgggtgcggccgtccgggaaacacagccccggccgggccatcacagcatccgggtgggcggccatccagtcggccagatcgctgagggtgtcggcggtgagctggatgtcggggttcaggacgaagtgataatcgctcgtcagctcgggcaggatggtgttgtggccggtgccgaagccgccgttctccttccggcagcgcacctccacccgctggcccggcagggtgctcagagcgccgctccggacggcggcttcgagacgtgcgccgctgccgtcggggctggcgttgtccaccagatagagggtcagcgggtggcggcgggtgtattgcagcaccgtctgcgccgcccggagggcttcgtcgcagccgttataaacaacgatgcaagcagagagttccaagttttatgctccttgttttatggctcagacctttccgccatgccaaagcccccctcgatggggcaacaatgacgaccgccgccagtggcggaaacagggagtcattgttggggcagcggccagcaagacgcgagcgaagcgccgcggatgctgggagccgcaacccggctttggcgagcgaagcgagactgagaggttgttcctcttttgtttattccagcggcaggatcttcaggctgaaatcctcgcgctggatgtcgaagttggggttggtgcaggggtcgcctgctgccagcaggtcgccccagcgggcctgaaaacgcagcacctcaccctgaaagcgcttctgcttttcggggttgtcctccacgccgcggctcttgctctcgtagtggtagagctgggcgaagggagtgaagacgttggtgtagcctgcctgacgaacgcggacgcagaagtccacatcgttgaaggccacggcatagctctcatccagaccacccacctcgtcgtagatctccttgcggatgagcagacaggcggcagtgtcggcgtagacgtcctgtacatagttcagccgtcccatatagccgtcggagctggcgggataatacttgtgcagatggcccgccacgccgccaatgccgaagccgacgccggcgtgctggatggtatcgtccgggtagagcagctttgcgcccacgcagcccacccgcttctgctgggcgtacatgaccatctcttccagccatgcggccgtgatgacctcagtgtcgttgttgaggagcagcagatattcgccggtggcgaacttctcgccgaagttgttcagggcgctgtaattgaagcccttgccctcccacgtgacgaccttgagggtgtcggggtgttctttctgcatccgctcgtaggcccggaaggtctcgggggccttgctgttgttttcgatgaggatgatctcaagatccggataggtcgtgcgggcataaatggactccacgcaggtctccagatcgtggatatggtcgcaggtggggatgaggatgctcacccggcccggatgggcgatggtgtagtcggtcttgtaatagcccggcgtacccgggatgagggagacatcgtccacggccacgccgcagcgggcataatgggccttgagggccgcgatgcccgcatcgatgcagtaggtcttggcggagatgtcgctggccgtgctgccggggctggagcgccagtaatagagggcatgggggatgtggacgatcttcctcgccttttccgtcaggcggaggaacagctcgtagtcctgactgccgttgtactccatccgctcggggccgcctgcggcgtccatcagccgacgactgaagagggtcaggtggcagatatagttgttggagcggaggttgtccagcatgaaatcgggcttgaagtggtagagcaccacattctccaccttgccctcgaaggtcgcctcgtcggtgtagacgaagtcggccccctgctcggcgatggccttggcggcataccagagggcacaggggtggaggatgtcgtcgtggtccagcagggcgatgaagtcgccggtggccatctcgatgcccttattggtgttgccggggatcagctcgttcttttccagcttctggtagcggatgcgggggtctgcggcggcacgctgccggaccatctcccccacgcccggggcagtgccggcgtccacacagcaaagctcccagttccggtaggtctggttcacgaccgagtccagcagctcctcgaggaagtccagcggggtgttgtacaggggcaccacgatgctgatcttggggcctgcgggctgatcttccgcctgatgcaccagcagttccaccgaggcgaagcggtccgcgcgcatgaccctgcccgggaagagggcggcatactcgcggcgggcacgggcctgctcccgcacgccctcgatcccgccccggcgcagctcccgcagcaggacgaagaggggcagagtgtgccagagctggcggctcttgctgacggcgtagcgcatgggccatgtcatcttccagaaggtcgagccggtcacttcggccagcgtcttttccagctgctgctcgtggctgcggctgagggaaaggtcgctgcgcagccgggcgatcagctcggcttcctcgccgcaggtgcgctcggcgcgcaccatccggtcgcgcaggatgtccatttccagctcatagccccgcaccatcttatacccggtaggctgggagacgcagaagagggcggactgctgggcgcggcccttgctgcgccagccgaagtcgcggaaatatcctctctgcgccagctgctcggcccagcccgccatgacggtgctctcactgctcaccagcagtacccgggcgggcagcttctccggcagcgtctcataggccgggtccaccacgaccagaagctctgcctccgagccttccgcccacgcctctgccgctacgcctgcccggcgcagcgccttggtcagcagaaggctctgctctcccagcagggccaccgaggcggcagccgcctcctccgcgatgcgctgcgccagtgcacggcagcgctcccgctcctgcttttctttcttttccttctccaactgcattccgttctctccacctaatatcatttatcgtatcgtcccagcgatttcgggacgtgaagcgcaaaaaagccgtttcttgggtacaaacgtgtacagtataccaaatcgcgcctcatttgagaagtattttgcgcaattcctttcgttttttacatcccgagcaggcggcgcagccagctgaacagtccgccgccggaagagctgccgctgcccaccgtccggatggaaacgccggagtagtagtgcttgaggatgtcgcggtagcccatcccctcctcggcggcatagcccaccgcgccgcactggctcatgcccacgccgtggccgaagccatagtagttcatgcagggcacgcccgcagcatctgcgctgaaatcgaagcagtagcgggaggacacgaactggttgatgtagcggtagctgcggccgttggacaccagcgtgttgtactggacgaagccgccgaggtctttgtgggtggtatcggcgctctggtaaggttcaccggtgcggctgtccttgtactcggtgtagtcgtagtccttgccgatgacgcggcggagcttttcgtggtactggcgctcgtaggggctttcgacgctcttgaggtagggcacatccgaaccccacgcatcgaggctggagcaggtgccgtaaacgccggtctgggtgttatagcccgcgctggccgaccagacggcgtcgatgacgctgccgttgtaggtcagcacctcatccttcaccgactccaccgccttacggatggccgagcgggccgaggcggggatgtcctccaccggggtgtagatgagggcgttggccgaagagccgtactgcttgtggtactcgaggtaggagtggatggccacggcctgggccttccacgcctcctgcgcggcgctggcgctgacatagctgccgatggagccaagctcggtgtaggtgatgcccacgaggcagtccacgaggtcgagggtcacgttcctgcgcaggcccttgcccttgatgttcagatagggcatggtgatcttatctttggagccgaagagccagctcagacaattttcttcttcccccgggacgagggtggtgtttgcgccgccgatggtggtggccccgggcgcggcatcctcggcaaacgccgccgggacagccacacacagcatcaccgctgccagcaccagcgccgccagacggcgcgtgaaactcagactctgcttcacagtcattttcctcctgtcgttttcgacatttccatagtcagtatcagtgtaacacactgtgcccccgacggcaaggacggaagttgtgcgaaaatgtgaaaagacgcctttgcaagctccgggaattgtgataaagtatagcaggagagaacaggtccgcctctgacaggcaggacaaggagggccggaatggacagcagagagttataccccaccgacgagcagcgccgccgcatcatggatttcatcatggcggcaggcgagacgctgctggaaaacggagcggaggtctttcgggtggagcagacgatggagatcatggcccgcagcttccatctgcgggagttccacgtctatgtgctgaccaacggcatcttcgccagcgcaggcacggcggagatcgccgaggtgcggaacgtaccggtgcggacgacccacttgggccgggtggtggcggtgaacgccctttcccgtcagatcgccgccgggggcgtcacgctggacgaggccgagtgccgtctggccgaggcccggcgcatcccctttcccaagggccggacccagcttctggccgggatgagcggcgcagcctgcttcgccctcatcttcggcggcacggtgcgctcggcgctggcagcggctgtggccggcttcctcgtcagcggctatctgctgctctgcgagaaaaaggggttatccagcggcttccgcaagatctcggcggcggcccttatcacgctggtctgcatcgtcgggtgctccctgctgggcatcgagtccagccatgccatcatcggcaccctgatgatcctgacccccggcatcgccttcaccatgggcatccgggacttcgtgcagggcgactacctctcggggaccatccggatgatcgacgccctgctgatcgcagccagcatcgccatcggcaccggtctcgtgctgagccttacttcgatcctgacgggggtgacggtggtatgatgacgctgacaaatgcccagatcggccagctggtggctcagttctttctggccggggcggggacgctgagcttcgccgtcctcttcgcctgcccccggcgcaccctcccctgctgcgcactggtgggcgcagcgggctggttcgtctatgagctggcggtcttatacggagccgatgccgcggcggcttccctcatcgcggtcatcccgctgacgctggtgtcccggctcttcgccatcctgctcaaaacgccggtaacggtctttctgctcaccggcatcttccccctcgtgcccggcgcaggcatctactacacggcctactacttcatccaaggcgaaaacgccctctcactggccaacggcatctctaccttcaaggtcgccgtcgcgctggccgtgggcatcgcgctggttctgggcctgcccatgccaaaggggcatgggtggaagagcaaataagctgtaacaacaaaaagtacccgcagacgtgtcttttccgtgttttctgccgcatccaaattccttgcactgcgcctgcgcctatgctataatcaggctgtacttatatagtaaaggagtgtccgctgatgtctattatggaaacgcttgccgcccgccgcacctaccgccgcttcgcccagaagccggtgccgcaggatgtggtggaggatatggtcgaggctttgcgcctttcgtcctgcggcgcgaaccgtcaggccgtgaagctggtggtggtgcaaagccctgagatggtggtgaaagtccacccgctggtcaagtgggccggttatctgccgccggagcagggcacgcccaaagccgacgagcagccggtgatgtatctggccgtcgtgcaggacagcgccatccccggcgacctcaacaccgacaccggcatcgcgctggccaacatcacccttgccgcgtgggacaagggcgtgggcagctgcatcatgggtgccatcaacaagcctgccctgagcgagctgttgggcatcgccgagccggacaagctggccttcatggtggcgcttggctaccccgcccacaccgccaaggtcgtgcccatgaccgaagagacgggcatcaaatattatctggacgaggaccgcaactactgtgtgcccaagcggagcagggaggagctggcgcgagagatttaaccgctccgtcacgcctgacggcgtagggcaggcgctccttcgtacaacctctcagtctgcttcgcagacagctccccttgtaggggagcctctggcgaagagatgaagctttacggaatgccaaggcctctcctcggtaggagaggtggcacggcgaagccgtgacggagaggttttgcatatattcatacttcatcctcaatattctgcataattgtttgcaattcggtttcaatttgatggaatttttgcacaacacttgacttttcaaattgtacaacctatactaaacacgctctctgatttttcgatgaatcgcatcgcagcagagaactgcaaatgatatgcacataaagaggagtgtttgaatatgaaaaagatctctcgccgcagctttctcgctgcttccggcctgaccattgctgctctggctctgaccgcctgcggcggctctgcctccaccgcttcttccgctgcaagctctnnnnnnnnnntgaggctgcttccaccagcgctgccgctgctgagctgaccaccgttgaggctggcaagctgaccatggccaccaacgccgccttccctccgtacgagatgaccaccgatgcaggcgcatttgagggcattgatatcgataccgctcaggccatcgccgacaagctgggcctcgagctgcagatcgacgacatggactttgacgctgctcttctgagcgtccagcagggcaaggccgacatcgccatggctggcgtcaccgtcaccgacgagcgcaagaacgtcatggatttctccgacagctacgctaccggcatccagtccatcatcgtgcccgagggttctgacatcgcttctcccgacgatctggccggcaagatgatcggcacccagcgcggcaccactggctacatctactgctccgatgacttcggcgacaatgcagtcgtggcttacgacgatggtctgaccgctgtgcaggctctgaacaacggtcaggtggacgctgtcgtcatcgacaatgctcccgccaaggagttcgtcgctgccaaccccggtctggtccttctggacaccagctacgccgaggaggactacgccatcggcatggccaagggcaacaccgctctggaagacgctgtcaacgctgctctggaagagctgaaggcagacggcaccctgcagtccatcgtggacaagtacatcaccgctgaataatcagcgcgtttctttccgcgtcagggggaggcggcctgaaaaggctcctccccttttttgaaatccaccggttacaaaatttttacaaaaagaaaggcgaggatgcgaatggccgcacaatacgagctgctgaaagagcttctcaacagcgggacgccgctcagcttcgggcagaacattttctttaagttttatcaggcattcatcctgaaggaccgctggctccagtacatcaacggcgtgggcaccaccctgctggtcacagccatcgcgctggcgatgggcgtcgcgctgggcagcgtggtggcgctggtgcgtgtggcccacgaccagcagcgcaccggccgcatgaatccggtgctgggcttcttcaacgcggtgtgtcaggtgtacaccaccatcatccgcggcacgcctatgatggtg

SEQ ID NO: 969 - DNA, 6271 bp, unidentified
  source 1..6271: mol_type = unassigned DNA
atggagatttacgagatgattgatttacaggattgtccgagatgcttcggaccatctatacttgaagaagaggaccatggttattatgtaacatgtctggattgcggatgtcagtcagcaacttttgagtttaagaacgatgatgaaagactggaggctgcaagaagaacagcagagttatggaacaccggtaaggtaatctatacaggacgcaccgagtaataagttagaaaaagaattgattagaagagttaattaaggagacatcaggttatgaagagtaaagaagaattatttaatatgacaatagttgagatgagagagtatattaattctctttctaactcagaaatcgatgaggttgttaagatatttgaagaggatgatacagagaaagatccacttacacttcttacagcacctaagctttttgattatatgaagcacgctaacggtacagttgatattgaattttagtcagtatggataataccagtaatataaggaagatgaatttatgaaatattcaattgatacacatactcatacactggtaagcggacatgcgtataatactatagatgagatggcggcgtatgcagcaggcatcggagttactcatcttgcaataacagaccatgcacctaagatgccgggaagtgcaggcatattatatttttctaacatgggaattattccaagacagaaatgtggagtgaagatatatatgggctgtgaggtcaatatcatggattatgatggtaatattgatcttaaggaatacgggctcaaaggctgtgatgttgttatagcaagtcttcatattccatgtatcaagccgggaagtattgaacagaataccaatgctttaattaaggtgatggacaatccatatgtcaatattatagggcatcctgatgattcaagataccctgtagattatgagcgtcttgtgagagcagctaaggagaagcatgtgcttcttgaacttaataatacttctcttaatccgtcaggaccaagacagggagcttacgagaatgatgtgcatatgcttaatctgtgcaaggagttaggcgtcagtatttctataggaagtgatgcacatattaaagagagcatatgtgattttgacagggcatataaagttattgaagatacagcatttccagatgaactgattgtgaatagtgactacagattatatgagtcgtttatcggcagaaaagattgataatggttgatatatgactaatactgtggtagtatttggaatgaaattcgattatgtattcagaccaaggaggatgtaatggttgttttattagcaggtggagcaggatatattggctcacatacagcagttgaattacttaatgcaggacatgaagttgttattgttgatgattatagtaacagttgtccggaatcaataaagagagttgaagagattactggcaagaaggtagtttcttatgaagcagatgttaaagataaagaagctatgcagaagatttttgcagaaaatcatatagactgcgttatacattttgcaggacttaaggctgtaggtgagtcaacaagattgccagctaagtattaccgcaataatattgatacaacacttactcttattgagtgtatgaaggaagcaggagttactaagattgtattctcatcttcagcaactgtatatggagaccagaagccaccatataatgagacaatgcataagggtgactgtactaatccatacggatggactaagtcaatgatggagcagattcttacagactgtgcacaggctgatcctgagcttacagttatattactcagatatttcaatcctatcggagcacatgaatctggaaagattggtgaagatccacagggaattcctaacaatcttatgccatatgtatcacaggttgctgcaggtgtaagagagcagcttactatattcgggggagattatccaactcctgatggaacatgcagaagagactacatccatgttgttgaccttgcatgtggtcatcttaaggctgttgaatatgcagatactcacaagggtgttgagatatttaatcttggaacaggaactccatacagtgttcttgaaatcgttaatgcattccagaatgctacaggggttaaggttaattataagattggagacagacgtcctggagatattccagactcatgggcagatgcatctaaggcacatgatatattaggatggactgctaagaaatcattagaggatatgtgcagggatgcatggaactggcagagtcataatcctcatggatacagagattaatcatatatggctagattaggagattataatatccgtagaattatatttgcaatacttgcggttacatggatggttgttatattttctttttcggcaagaccgggagaagaatcagaaaaccagagtattaaggctggaatggctgtgtgtcatatttttgttccgggatttgataatatgagtgaggaacagcagattcatatggcacagacaattgactatccggtaagaaagaccgcacatgcaatggagtatgcactgcttgcaggacttgtattaggtgtggttacagcagtagtaattaatataagatatgttgctatatcagcatttatagcaatattatatgcggcgacagatgaatttcatcagctctttgtgccgggaagaagtggaagagtaacagatgtgcttattgatggctgcggtgctgttataggaactcttattattatgggaatttcaagagttattgccagaataagacacaataagaagtctggaatatagcttaattatttacaggagacgaagaagcttatgagcagtacagagacacttgacaatgcaaagatgactaatggaccaataacaaggattttattatcatttgcaggaccggtgcttttgggtcagcttctgcaacagctttataatattgcagatgcagcaattgttggacagttcttaagctctaaggcactggcagcagttggtgcaacttcttctcttacatatattgtatgttatttctgtataggttcatgtataggaataagtgttcctgtttcacaggcatttggcgcaggaaagaatactgatttaagaaaatattttattaacggagtctactttgcacttgcgattgctgtcattatgacagcagtcacagcgtctatgagtggactctttttaacgtggttaaagacacctgaaaatatatttaaggatgcacatgtgtatcttgttattatattcttaggacttccgttgacggttctgtataacttctgtttcggacttcttatggcctttggcgacagtaaaaaatcaactatatttatggcagtatcaactgttattaatatttttcttgatttgtttctggttgttgttgtgaagtggggagttgccggagctgcaattgctactatattttcacagggaattgcaggtgttcttagtgctgtatatatctttaagaagtacaaactgttatttccagttaatgcagatgaaagaaagttcaatccgtattacatgaagaacattattaaaatgtgcatgccaatgggactgcaatattctattactgcaattggcgcaattattctgcaattttatgtaaatgcacttggagaagacgcaattgccggatttacatccggatataagattaagaatctgattctgtgtccgttaaatgcgttgggaacagctctttcatcattcgttggacagaatttcggagctaagagatttgaccgtatcagtgaaggatttaagagaactttagagattggtcttatctattctgcaattacgatgatagtatgtttctttaccggcagatatatggcacttatattcgttaatgcagctgatacagttgttgtcggttacactgtgaagtttataagatacataagtgtgtttaatgcagaactggcacttttatttactgcaaggtattcagttcagggtatgggctatggcaaatattctatcctctcaggacttgctgagatggctggaagggcagctgttgctgtacttctgataccacattttggctttgatgcagtgtgctggaatgaggggcttacgttccttgcaggaattgcagtaattctgccaatttatattaaacttttttgccatttgcgtaaaagtatgatataatttttacaattttgggatgaaagaaggatggtctatgtctaagattatattaacaggtgacagaccaacaggtagacttcacttaggtcattatgttggatctttaaagcgcagagttgaattacagaattcaggtgaattcgagaagatttttattatgattgcggatgcacaggcattaacagataatgctgataatccagagaaagtaagacagaacattatcgaggttgcactcgattatctttcagttggtattgatccagttaagtctaatatatttattcagtcacagattccacagcttacagagcttacattttattatatgaacctcgttacagtttcaagacttcagagaaaccctacagttaaatctgaaatccagatgcgtaatttcgaggcaagtattccggtaggatttttctgttacccaataagccaggctgcggatattactgcatttaaggctactacagttcctgtaggagaagatcaggagcctatgattgagcagtgccgtgagattgtaagaaagtttaactctgtatacggagaggctcttgttgaacctgagattcttcttccagataataaggcatgtttaagacttcctggtactgatggtaaggctaagatgagcaagtcattaggaaactgtatctacttatctgacactccagaggaagttaagaagaaggttatgagtatgtacacagaccctaaccatattcaggtatctgatcctggacaggttgagggtaacacagtatttacttaccttgatgcttttagcagtgatgaggattttgctgaattccttcctgattataagaatcttgatgaattaaaggatcattacagaagaggtggtcttggagatgttaaggttaagaagttcctccttaatgttatcaacaaggaacttgaaccaatcagagcaagaagacatgaatatgaaaaggatattccagaagtatataatatccttaagagaggtacagaagcggcttacgctgttgcacaggacactcttaatgatgtcaaggctgctatgaagattgattattttaatgatgcagaacttattaaggttcagtcagagaaatacagcagaacagagtaattattttaatcaaatatacacacggaggcttttctattatgagacatttacttagtccgcttgatttaagcgttgatgaactggcaagattattagaccttgcaagagatatttcaaaggatccatcaaagtatggtcatgtatgtgatggtaagaagatagccacattgttctatgagccaagtactagaacaagattaagcttcgaggctgccatgattaatcttggaggtcaggtattaggcttttctgaggcttcttcaagctcagcgtcaaagggagaaagtgttgcagatactataagagttatctcttgttatgcagatatatgtgcaatgcgtcatccaaaggaaggtgctccgatggtagcttccgagtattcacacatccctattattaatgcaggtgatggtggacatcagcatcctacacagacacttactgatcttatgacaataagggagcttcgtggttcacttgataactttactatcggtttatgtggtgaccttaagttcggaagaacagttcactcacttataagttcattagttagatataagaatgtaaagtttgtccttatatcgcctaaggagttaagaattcctgattatatcagggatgatgtgcttaaggctaataactgcgatttcgtagaagttgagaatcttgaacaggctatgccagaacttgatattctctatatgacaagagtacagagagaaagattcttcagtgaagatgaatatttaagaatgaaagacttctatatacttgatgaagataagatggcacttggaaagcctgatatgtatgttcttcatccgcttccaagagttaatgaaatatctgttgatgttgacaatgatgacagagctgcttatttcaagcaggttcagtttggtgtatatgtaaga

SEQ ID NO: 970 - DNA, 7992 bp, unidentified
  source 1..7992: mol_type = unassigned DNA
ttagcgctggatacggccggaaccgtcgccgccagccagcttctcgacctcagcaacagtaaccatgttgtagtcgccttcgatggaatgcttcagagcggaagcagcaacagcaaactcaacagcttcctgggtggtcttgccgttcagcagggcgtagatcaggccgccgccgaaggagtcaccgccgccaacgcggtcgatgatgcgcagctcgtacttcttgctgaagcagtactcgttggaagcaacgtcgtacagcatggcgctccagccgttgtcagaagcagaatggctctcacgcagggtgatagcaaccttctcaaagccgaacttgtcagccagctgcttggcaacgctcttgtagccttcgcggttgatctcgccagcgtagatatcggtggcctcagcctcgatgccgaacacgtccttagcatcttcctcgttggagatgcagacgtcaacgtactggcacaggtcggtcatagcagcgcgggcttcctcgcgggtccacagcttgccgcggtagttcaggtcgcagctgatcttaacgccatgagccttggcagccttgcaggcttcgcggcagatgtcaacaacattggggcccagggccggggtgatgccggtgaagtggaaccaatccacgccctcaaagatggaatcccaatcgaagtcagcggtggaagcttcctggatggcagagtgtgcacggtcatagatgcagacagaaccacgctgagaagcgcccttctcgttgaagtagatgccaacacggtcgccgccgcggacgatcttgctggtgtcaacgccgtaacggcgcaggctattgatagcggcctgaccaatggcgtgtgcgggcagcttggtcacatagacagcgtccatgccgtagtttgccagggaaacagcaacgttagcttcgccgccgccgaaagtgaactccaggttgttggcctgaacaaagcgctcgtagttgaacggctgcagacggatcatcagttcgccaaaagtaacgactttcatattgaaactccttgtatttattgtaaatataccgcgccgtcaggcgcaaacctgctgcacagtggcaacagattatttctgaaccaggtggatggcgaagccggcaacttcgtcagcaaagtagatggcgatggtcttgccgtccttaacattcttgctgtccatatcgaacttgacgccgcgctggctcaggtgatagatagcgcggtcaacattgttggtcaggatggcgatgtgaccatgggtgccgcggcccggcttcttcatgatctcaaattccttcttgccaacaaagatgctggagttgcccggcttaacagccatgctcagcaggctgccgatggtctcggcggtcttggcagcttcggcttcgtcagcgcagttgatgccgatgtggcccagttccaggcccagcattacgttgacagcctctttgctcatggcggtgatctcatcccatgcgccggccttgatcttgtcggacttgcacatccaggtgccgccgacagcaataatctggctgtagcccaggtagttgttcacgttcttggcgttgacgccgccggtgcacatccacttgcaggtcttcagggcagcgccgatgttcttcagcttgtccacgccgccgtttgcttcagcggggaagaacttaacaacttcgcagcccatgttcatggcctgctgcatctcgccggaggtggcggtgccgggcatcatgataccgcccttgtcgataacatgcttgcagacttcggggtcgaagccgggagcaacgatgaaggaagcaccggcagccatagcacggtcagcctggtcaacggtcagcacagtgccggcacccagcagcatattgggcagttcttcgtgaatcttcttgatgcactcttcagcacatgcggtgcggaaggtgacctcagcagccggcaggccgccatccatcaaagccttgcacagaggaatagcctcgtccacgctgttgaaagcgataacggggatgataccaatttcgtaaacgcgctcaaggacagaattcataacgcattctccttacattaacaaagtttacatcagttgtgaagcggttccttatggtggaacaccgttccgcaatttgctgagtttattatacaaattttgcgtcgcgccgtcaatcggtcaattttaccagtcagagcgaggccgtttttggcaatattgagggggttccgccttgtgggatgctacttgcgaaaaacgccgtttgctggtatacttaattccacaatgcggaacaattccggcccgatgggagcagaaccgggcaaagttataaattatgaattttttgttaatttttgcggaggatgcgttatggaggaccaaaccgtaaaaaatcctgataagggcggtgtgcagagcgttgcgcgcatttttgagctgatcgaagtgctggccgcccacccggccggagccagtttgcagcgcctggcggaagacgctcacctggccaaaagcacaacccaccgcctgttgggcagcctggtcagcctgggatatgccgcgcaggacggcgaaaccggcaagtaccgcctgactttaaagatgtttgaaatttcttccggcatcgtcaacagcatggatgtgatgagcgttgccaaggtacacctggaacgcctggcccagcgcaccggcgaagcggtgcacctggtcatccgcgatgcacaggatatcgtgtacatatataaaacggaaagcggccccatgcggatgtccagccgggtggggctgcgtagcccgctgtactgtaccggtgtgggcaaagccatcctggctaccctgaccgaagaagaggtggaggatgtgtggcggcacagcaacccgcaaaagctgacgggccgcactgtgaccgatttgcctgctttgtgcgcccagctgaacgaggtgcgcgcctgcggctatgccattgacgatgaggaaaacgagcttggcatccgctgtgtggcgctggccatacccggccccggcggcaaggcggacagcgcgttctctatcagcggccttgccccctacatgacgccggagcgcatccggcgcattgctgcccttgcgctggaaacccgcgccgacatcttgcgcgaccttggggtgcagggtgtgtgaagacatggccgacatgagcttgtgagggcaactcggaatttttggaggaagtaagtatgttaaacaacaaagggttcgacttttgggctggtgattatgacaaaactgttggcatttctgatgaggaaaacacatacccttttgccggttataaaaaggtactttggttcatttttcagactataatgcgagccggaaatgccgttgtgctggatattggattcggaacaggcacattaacgacaaaactatacgagcgaggctgttccatttatggacaggatttttcatcaagaatgattgcattggcatctgagaaaatgccaaatgcacagttatatcagggggacttttcaaaagggcttgtcgaaccattgaggaactttcgttatgattatattgttgcgacatactctctgcatcatttgacggatgcgcaaaaaagcaactttctgttagacttgcgtaactacttaaaggaaaacggtaaaattataatcggcgatgttgcctttgaaacacgaaaggacttagaagagtgtaaattgaaggcaggagacacatgggataatgatgaaatctactttgtcattgaggaactgagaaaagattttccggctctttcatttacgaaaatgtccgattgcgctggagtcctgattttggactgataagttcgcgtttgcgaaacgaagtgaaacaataaaagcccctgcggggcttttaagcgacagaacggttttgcgttagcaaaatggagggatttcatcccgacaagttccagtttgtagaccaatgcttaacaaatgtacaacaataatagacaagccttgcgtacaggactataataaaataataggaaaagatgacaacaagggaatgcggtaaggcggccggaatttcccggaaaagtggggaatggaatgaacctgatctttacagcctttgccacactggagggctaccgcgagggcagcaatgccaacctgggcagcgaggtattctaccgctgcattgtggtcagccttgtcagcgcaaaacagaaaaaccagaactgcgatgcagcccttgtgaccaacaccgctgtgccggaaccctatgccgcgcagctgtcccaggcgggcatccgtgtaatcgcctgtccgtttgacaactaccgctttgaagcggatttagactggtccctggcgtattacaagctgtgcgccatgcagtatctgctcgaaaccgagcattacgaaaactacctgatgctggattccgatacctttacccagcgcggctatcaggatatctggcgcgaagccgcggaagcggtgctgctgtatcaggtgccccatgcggccagccagcccatgacggcccgcatctcccacacctatgatgaactttggccggagggcgctccccatgtgctgacccactttggcggcgagttcgtggcgggcagcacggcccggctgcaggattttatggccgaatgccgcaatgtgtttgaccggatgcagcagaccggcgtgcgcagccaggacggcgacgaagccattttggatgctgcggcctaccgcagccagctggcgggcaagcccgtgcgggccgccaacgcgtatgtgttccggtactggctgggcgggcatttttattatgtttccacgaactactgctgcgaccccgtctgcgtgctgcacctgcccggcaaggcgaaaatgcgccagctgacggtgctctaccacaaatacacccgcagcggccgcatgccggaaaaccaaaccgtgtggcggctctgctgcctgcctgccgcccgcccgccgctgctgcgcagcctgtgggtgcgcctgcgggccaaaatcggcatttgaatccacccactgacccccaaggaaaggaacgctctatgcaggagaaaaaacgtattcccctgaaacgtctgcaccgcctgcgcaacgcccgcaaacaggccgcggagaccgatgacctgacccccatgatgaaagccatcaaggcggtgcacagcgtgaccagcaccggctctacccagccggaggacctggaacgccagcgtgccgcccaggagctgtttgcccgtttggttacccccaacctgttgatcaacaccacgcccatcaccgtcaacaatgtttcggcggagtgggtgcggatgaaccaggggcatgaccgccgccatgtggtgctatactgccatggcggcggctacacctgcggccagctgggctatgcccgcgtgctggccagcaaactggcgctttccaccgggtgcgatgtactcagctttgaataccgccttgcccccgaagcgccgtatccttccgccattgacgatgccctgcgcgtctgggactacctgatgtatatgggcatcggcgcgcgggatgtgatcgtggccggggattcggcgggcggcaacctggcgctggaactggcccttgccgtaaaggcccagggccgcagccagccgcgtgccctggtgctgatgagcccctggaccgatatgacgatgcagggggcatcctatcagaaatgtgccgcactggaccccatgctgacccacgactatattgattcctgccgcaccgcttaccgcggagcaaacagcaccctggagtgggaggaccccagcctttcgccgctgtttgcggatttaagggggctgccgcccactttgatccaggtgggaacgaacgaaatattgaaatccgattctatcaaccttgccaaagccatgacggaacaggaagtatacgccgtgctggaggtataccccgaatgctggcatgtgttccagcagatgccgatcccccatgccgcacaggccatggaaagcgttggccgctttgtgcagaaaattttgtaacggcggaaccccgccggataggagggctgccatttgcccgaaacctggtataaagtcgataatgtcgccaaagtatttctggcgtccatcaaccggcgggatccgcgggtgttccgcgtcagctgcaccctgaacgaggatgtggaccccgaccgcctgaatcaggccctggaacagaccgcacgggaaaacccgcagttccaggtcacgctgcaccgtgggctgttctggcattattttgaatccaccaacctgaaaccgcaggcggtgccggaaacgctggccccctgtgccatgctgtacggcccgcagatcaaaaacgaactgctgtaccgcgtcagctattacggcgcgcgcatcaatgtggaaatgttccacgccatcagcgatggcaacggcgggatggtgttcctgaaaacgctggtgcacaattatttgcagctgaaaaatcccgaactggccaatgttcccggagaagagcgcgccagcaagggcgaatcggcccaggatgcgttccgcaagtactatacggcgtccaaagcggcggaggaagacccgctgaaccgcaaaaagtctttccacctgcatggccgcaaactgccgtatgaccagtcccagttttttgaagcccacctttctgccgcccaggtgctggccaagacccgcgccatgggggtaacgatgaccagctacctggccgctgcccagatgctggcggcttatcaggaaatgccggcgctggaacgcggtaaggttatctcggtcagcctgccggtcaacctgcgcagctattacggaaccgagaccgcccgcaactttttcaactccatccgcatcagctgggtattccggggggacgaaacgctggaaaccctggccaaaggctttgatgccaaactgcgggaagccctgaaggacgagcgggtcaaggcccgcatggacggttttgaaaagctggaacagatgcccggtatcaaactggtgccgctctttatcaaaaacgcggtggtcaacctgttcaatacgctggaagccaaaaaagttaccctgaccatctccaacatggggcgcatcccactgcaaaaagagctgcagccctatatcaaaggatttacggcgttctgcagttcgactaccgcgttcaccacggtctgttcctgtggggatgatctggttttgggcaccacctgggcgttccgcagcaccgagatgctgaaaaacttttaccgccgcctttctgccgaagggttggatattacactgtatgcaacggaggtggatggagaatgaaaacctgcccccattgccatatccaggttggcggcagcgcacagtactgtccgctgtgccagaacccccttgtcggcacgccggaaccggaccgctaccccaaggtggtgccgcccgcgcggcagacatcgctgttttaccgcatcgctgcctttgtgctgctgggggcggcggttatctgcggcgtggtggattacatcatgatcgaaggcaggcatatgcactggagcctgctggtgctgatcggcgcggtgggggtgctgatgctgctgcgcgcactgctgcgccagggccgcaacgcccctaagctgctgttccagattttgatcggcacttcgctgatcgtgacctttgcggattattacgccgggtggaacggcattgccattgacgccattgtgccgatcttgtgcagcgttaccctggtgctgaacttcatttttgcctttgtcaaccgccgctttaccgagaacggcctggtttacctgctgctgaacattgtggtgggcgtggtgccgtatatcggcttaacgctgcgccacagcgtgcgcccgccaatggcctgggtcatctgcctggttatcagcatgatcacctttttggggctggtcatcttcaagggccgcagtctgctggcagagtttgaaaaacgcctgcacctgtaa

SEQ ID NO: 971 - DNA, 14115 bp, unidentified
  source 1..14115: mol_type = unassigned DNA
atgaaagaagactggaaacccggaaccatgatttacccgctgcctgccgtactggtgagctgcggaagcactccggaggaatataacattctgactatcgcatggacggggacgatttgcacgaacccgcccatgtgttatatctccgtacgccccgaacgccactcctacgacatcatcaagcggaatatggagttcgtcatcaacctcaccacgaaagacatggcacgggccacggactggtgtggcgtacgctccggaaaggactacaacaaattcgaggaaatgcatctgacacccggaaaaagcaccgtagtcagcgcgcctcttatcgaggaatcaccgctttgcatagaatgccgggtaaaggagattatggctctcggttcgcacgacatgtttatagcggatgtggtaaatgtccgtgccgatacccgtaatctgaaccctgaaaccggcaaactggaactggcggaaacgaatccgctggtctatgtgcacggcggatattatgagctgggagaaaagataggcaaattcggatggtcagtggagaaaaagaagtaataatgcgataaaggttttaagagatggagctgcgacgaatcctgatgggtttatatctgttggccttccccgccatgatgtggggacagactccggttgtgcccggtactgccgacgaagagcattccagacaccgcaaggaaactccggtcaatttcggtttcaaaggcggtttcacctcttccttgttccttgtatcccagttcagcgtcaacggagtgcccattgacgaagtgcagaacaattacaaaataggatatttcggttcccttttcatgcggataaacttcgaccgccacttcctgcaaccggaaatatcctacaacatcaaccggtgcaacatcaccttcgagaaacctctgcccgaagacgccgcatcaggagcccggccggaggaagcctccattacatcgtccatccacagtatagacatccccgtcatctacggatacaacttcatcaaggaggggccgtacagccttgccgtctttggaggacccaaagtgcgctatatatgggacaggaaaagtgacatcgacttcgagaatttcgaccaggtgaatatccgtgaaaggctgcgtccgctcaatctcagtttcaccgtcggcgtatccgtcaccatctcacgcgtctttttcgacttccgttacgacatggggctgcacaacatctccaagagcgtgacatacgatattccggccgacaacaacgctgctgacgaaaacacgaaaaacgaaatccgttttcaccgcagggacaatgtgctgagtttttctttcggagtgttcttttgacagtaaatttcttccttttctttcaatttattcatttatttcccgtaaatttgtgcgcttaataagagaacacagatttatcaaacttatctaataagcagaatgaaaagagatgatttaattttcgaacttatcgaaaaagaacaccaacgtcagctcaaaggcattgaactgattgcatcagagaactttgtaagtgaccaggttatgcaggcaatgggctcctgcctcaccaacaagtatgctgaaggataccccggcaagcgttactatggtggttgtgaggtagtagaccagagtgagcagattgccatcgaccgcttgaaacagattttcggcgcagaatgggccaacgtacagccgcactccggtgcacaagccaatgcagccgtattcctcgccgtgctcaatccgggcgacaaattcatgggactgaaccttgcacacggcggtcacctctcccatggctcactggtcaacacttccggtattatctatactccctgcgaatacaatctgaaccaggaaaccggacgtgtggactatgaccagatggaagaagttgccctgcgcgagaaacccaaaatgattatcggcggcggttctgcttattcccgcgaatgggactacaagcgcatgcgcgaaatcgcggacaagataggtgccatcctaatgattgacatggctcatcctgccggactgattgcagccggtgaactggataaccccgtgaaatatgcccacatcgtgacctccactacccacaagactctgcgtggtcctcgcggtggcgttatcatgatgggtaaggacttccccaacccctggggcaagaaaactccgaagggagaaatcaagatgatgtcccagttgctggattcagccgtattccccggtatccaaggtggtccgctggaacatgtcatcgcagccaaagccgttgccttcggcgaaatcctgcaaccggaatggaaagaatatgccaagcaggtgaagaaaaacgccgctgtcctggcacaagccttgatagaccgtggcttcaccatcgtttccggcggtacggacaaccactccatgctggtagacctgcgcagcaaatatcccgatttgaccggtaaggttgccgagaaggcgttggtatctgccgacatcaccgtaaacaagaacatggttccgtttgacagccgctcggctttccagacttccggtatccgtctgggtactcctgccatcacaacccgtggtgccaaggaagacctgatgctcgaaattgccgagatgattgaaaccgttctgtccaacgtagacaacgaacaagtcatcgcagaggtacgtgcacgcgtcaatgcgaagatgaaagaatacccgctgtttgcttattaataagcaaacagaattaaaaattaagaattaaaaattaaaggctgcgcaatgttcgctttgaactgcgcagcctttaatttttaattctaaacgcgcggagcgcgtttagctcagcccttctatatttccatccacaatatcaatgtgttcggcttgtggtttctttggtaatcccggcatacggagaatttcaccggcgatggctacaatcatttccgcaccgttattgaccacaatatccttgatgtggaactcaaagttgttgactgcaccgtatatcttcgggtcggcagagaaggagtactgcgtcttggcgatacagacggggtaatggctgatacccatctgctctatcagtttgataaccttgcgggagtggagactgtaagtcactacgcttgccccgtagaggttgcaggctaccttttctattttacgttccacgcaatcgctctcttcgtaggtgaaggtcagcggttcggatggtttgttctcgatagtatctactaccagattggcaaggtcaacggctccctctcctcctttggcaaaggcgttgttcacggcaaaacctacctcaagcttttcttcgcaatggcagcggatagcttccacctcctcgtccgtatcactggcaaaacggttgaatgccacgatgacctgctggccgaatgaacgcaaattgcgtacatgcttgtccagattgccgaagccctctttcagtccttccatattgggttccttgatgcggtccagactgacgccgccatgcatcttcaatccttgtgcggtagcaacgattatcgtcaacttgggctgtaggccgctcttgcggcacttgatgttgtaaaacttctccgcacccaggtcagccccgaaaccggcttccgtcactacataatcgccgaatgtcatggccatttttgtggcaagaatggagttgcaaccatgggcaatatttgcgaacggccctccatgaacaaaagcagcagagccttcggtagtctgtaccaggttggggttgatagcatctttcaacagtacggtaatggcacctgctactcctaactccttcactgtgaaaggagtaccatcgaaacggaatcccagaataatattttcaatacggcgacggaggtcatcgaggtccgttgccagacagagaatagccataatttcggaagccggggtaatatcgaagcccgactcctcggtaatgccgttggtgctcggtcccaatccggtgacaatgctccgcaaggaacggtcattcacatcaagtacgcgccgccagatgatttctttcagtccgaagccgtccgcctgatgctggtacaagtaattgtcgagcaaagcggaaatcatgttgtgtgcggaggtaatggcgtgaaagtcgcccgtaaagtgcagatttatcttctccatgggcagcacctgggcatatcctccaccggcagcaccgcctttcatgccgaagcaaggacctaacgagggttcgcgtaaagccacaatcgctttcttgccaatcttgttcagccccaatgccagcccgatggacacggttgttttaccgatacccgctttcgtagccgtgatagccgtcaccagtatcagattgctcttcttcactttctcttcatcaatcagatgcgtaggaatcttggctatgtaacggccatagttctctacttcgtcacgcgggatatccacactttcagccacctgctttatcttcttcagctctatgctgcgggctatttcaatgtccgatttcatacagagtcttttctttaaataacaactttaatgttttgaaagttgcaaaagtacgaaagatgtggcaaagtacaaaagaataccgtattttcacctgaccacctgcatcttctatctatttgaaccgcgacgtatccactgcctcccgttgcttctccttatatccaccgaatttataagtaaacgatacgccgaattcgcggaagcatgagtaatgattcgtcacattctgcgtcttgaaacggatgcggggagaaatctgtcccgtctcaaaaatatcgttgcagtagaggttgaggatggctttgttcttagcgaagccgtagcgcagggcaatattcacattgcccgacgtgggcaggtcgtaaatgccttgaatggctttgctatgcacaaatccggccaccgtcagcttcaaatcgggcttggtggagagagtaaaagtattgttcatctgggcaatgccatagcattgctttctgtcgaaaggaatatcccagaaatcaccatccttttcgcggtgccacaagccgataagggtaaggcgcgaattcaaccagttcttcaccttaaacgggatagaggcttgtatgcctgcttgttgctgataatcgaaattgagtgtcttatagatttcaaccagacgttcggaagattggtaaagcgtctgtacggagtagtctttggtgtggttgaaccaggcgctgaagatgtatttgcttttcaaaatataggtcattttcagctcatactcttgtgccggtttcagcaacggattaccatgcagctcagagtatccaccgccgatgtaagagacggcatcctgcacggcccagtagtcgggatagtccttgtcgctgctcaaggagagctggaggatatgtcccggtgccggcatatagttcaagttgacaatgggataccagtcccactggtcccagacgggagtcttgtaatgctccacagccagggaagcgtccaaagcaagtttgtcgccgaaactcttgctgaaacctgcatagatattccaggtctgctcgcggcggcgggacttcatattgctcaaggcatccgatgaggtcagttgtccgccggtttcggggtcataataatattggtagctgttgtcgatgctggtagtatagatggctccgtaattcaaatcccaaccttttcccagactgtgctcctgggccagaaagaatttccagcggttgatgcgctgacagtcttccgtgtagaaatcgagttcctcatcctgcatacggctatgcagtagttggttggacggagagcggtagtaggtcagttcggcaccggctttgaggccgaaaggggtacgatagtccagacggccgttgtgcagccagtcggtgctattgctatgagttgtggacacctgcgtgcccgtcacgcccttccagttgtgggaggtggaatagccaccgttatagacgaaactcagctgatggttcttggcgatattatagtccgcccctaccctgaaattatgggtatggctgcggccacggcccacctcatctgttgtcatggggtgaaccgagccgtccgccagggtgtgcacagcctctttgtcggtagtagagtagccccggccatggctgtgcgagtaaagaaaatctgctgagaatttatttttgctgaagagcaggctggcgcgttcctcaaagccttcgttgtgcttctggcgatacttgacgtagagttcgccttgccaggagccggggccgcctgccgattgtttcaaggtgatattgataagtgcgccacgcacctggtagcgtgcaggggcgttgtacatcacttccgccttctctatgcggctggcagggatgctgcgcagcaaggcatagagctgccctgtgctgagggtggttactttaccgtccaggataacggtgactccctggcctgccaactgcagcccgccattcatctcgatgacgccgggaagctctttcacggcatcgtaggcattgtctacggggaggttccggataaggcggggcaggtcgtacaccagcttgccttgcgctgcctttacgatggggcgttcaccggtaatcatcacttccggcaaggtctgataaaggctgtccagacgggcatcggtcgtgataaggctgtcggcgctgaggatacggttgtcgtccgcaccggaggtggttgcagtgccgttgttctcttgtgccgaaaggctgatgctcaatgcacagcatacaagagggagtaaatagaatcgtttcatgttcttctttttatttatgttcatattcttcttctgtaaatcttcgtctgcaaagtacggcagaatcagcagaaacttgtgttatcagcggcttaccaagtgttatccagtgttatcgggagtgttatttagtcttatcggatgatagggttcacaatattagtcttacctttgtatgtataaaagtaaccggaaacaaacatgaaactgccattcaaatatattgccatacttgtcatcgtctccctggccggcatcttcgcctaccaagcctactggctgacggggctctaccataccatgcacagtgaaatggagagggacatcaccgaagccatgcgcatgagcgactataacgaaatgatgatacgcgtggataaaatgaagcaggacgacataaaccacggtgaagtcagcgtatcagccggatacagcgatgacggaaaatcatttgtccgtagcagtaccaccatctcccgtgaagattctttggacaacaccaccctgcacgaaaccttcatgcccaaaggagacagtgtttacgtgacccacccgaacgattcaacccgcgtggaagtcagtgtcagggactcggacagctctccccaatccgcattgagtgccaaagggggactggatgtgattttgcgcgaccaaaacagtatgctggaactcgccacctacttccagcgcggactgcattcgggactggacatcatttccgaccccgacgtaatgctttatgacagcctgctgacttcattcctgcatgaccgtaacatcaatcttccccataggctgctacatcttcacaaaggcagcaaatgggactctaccattctctatatagatacattggtaaacatcggtacccccggctatgtgcctacctcaaaagccgtggaatataattattctttcgacatcaatacaagtcaaagctaccgtctcatcatggaaccggccggcacgttggtcttgcgacagatgtcgggcattctcaccacatcattcgttattctgatcgtactcgctttctccttctggttcctgatacgcaccatcctgaaacagaagacactggaagagatgaagagcgatttcaccaacaacatcacccacgaactgaaaacccccatcgccgtagcatatgccgccaacgacgctctgctcaacttcaaccaagcggaggaaaaggcccagcgcgacaaatacctgcgtatctgccaggaacagcttcagcgcctcagtggactggttgaacagatactttccatgagtatggaacgccgcaggactttccgcctgcacccggaggagtttgcaatacgtgatattctggaaacgctcatcgaacaacacaagctgaaagcggaaagctccgtccacatatcggtggacatcgaaccggaagatttgagcgtacttgccgaccgtacgcatttcagcaacatcatcagcaacctgatagacaacgccatcaaatattcgcacggagaagccgaagtgaccatccattgccgtaaggtaaccgtcgaaggacagaatgaacagaccgaaatctccgtcagcgaccacggtatcggtattgctcccgagaagcagaagcacatcttcgacaaattctaccgcgtacccacgggtaatctgcacgatgtgaaaggctatgggctgggattgttctatgtgaagaccatgatagagaagcatggtggcagcgtatcggtaaagagtgagttgggaaaaggaagtacctttacgataaggatatgataacattatttgttagggtactttacattacttgttaaggagctttacattacttgtaacaaaagcgacaattatggaaaagataaccgtacttctggttgaggacgaacagaccctcgccatgattatcaaggacacattggaagggcagaacttcatcatccacaccgcagcagacggtgaagagggattgcgcaagttcttcgacctccgtcccgacgtgctggtggcagacgtgatgatgccccgcatggacggctttgaaatggtgcgccgcatccggcagaccgacaaacagaccccggtactgttccttaccgcccgctccaccatcaacgatgtggtggaagggtttgagctgggtgccaacgactacctgaaaaagcctttcggaatgcaggaactcattatccgcataaaggccctggtaggcaaagctttctcctttacagaagaaaatcccaaggaaactaccgtttttgaaatcggtgactaccgtttcaattccgtcactcaacgacttgcttttgcaggcagcaccccgacttcacctgacgcggatacggaagtggaactctcccaccgcgagtccgaaatactgaaacgcctttgcgagaaccgcaaccaggtggtcaacacccagaacgtattgctcgacctctggggagacgacagcttcttcaactcccgcagcctgcatgtgttcatcaccaaactgcggcataaactggccggagacgagcgcatccgtatcgtcaatgtgcggggaataggatataaactaatagtgaactaaactaaaactaaactactatttatgagaaagttattattcattacttttatctgttcctcactctgcgcctatgcacagagcgagattccggaagacacaataaagaaccggcctcccgtaaagaaagagcagattcccttttctccaaaagagaacaagcgtacgggccttgatgaaagccagccccaacaaagtctgcagggcgaacagcaggaagagataaatctccatctccctccctccgactatgtggagcccctgccctggacggacatgaagaagatacactttcagaagaacatctttgaatgggacttccagcgtttcgccgatttcctgctctcgccggaagtcgtactgacgatgtacggcagccataacacctatcctgcaatgggctccatcatgcaggctggcgcaggaattacttattacagtcccgacggacattgggaactgagcggcggagtgtatgccgcccactattccatctcccaaccttcatccattaccggtgcccagtatgccaaaagggatgccccccggggtactcaatgggacataggctacaatgcctccgtatcctaccgcatcaatccctacatacgtctacatgccttcggccagtattcgggctacgggagaagtaactcctttcatggatatatgaacccgatgtatccgcaaagcggttatggcatggtactggaactgaaagtgacggactggctcgacctcaacggagggatggaacgaagatacgaccccactaaaatgaaatgggtaaattcgcccatcttcgcccctaccattcgtataaagaaatagaaataatacaaagatatttccagaaatagagggaaacgagtatctttgttcagtccgcccctatgcggcagacagcaactgaaattgtgaacaaagaactatgaaacgaatcttcttctgcatcatcattttacttgcaggcatgtcatccgtcagcgcacagagcgagatgcctgccgatacggtacgtactgcagtacgtggcgaagcgtctcccgaaggcatgtctccgtccgaaaaggaacttctgccggacgtgaagaattacgacggcttcctgctggatatggggctgatgaatctgtccgcccccactcttcccaaattcactttggagataccggatgccagcaaagactatagccgcatcttccagttgaacccgaacgtgacttattcacaaggtctttcgaacatattctcactcagcaactcccggtatttcagttcgaatcccttcggactgacgggcttctggggctctaccgacaacctgcaaatgggaagtttcactttgaagaacggcatgcgcatccatacgtacggcgaatatgacaaggacggctggaaagtgcccaacccttccgcactgccttgggaaaagaacaatttcaaaggggcgttcgagctgaaatcagccaacggagccttcggcatacgcattgaagtgcagcagggaaggaactatccatattgaaaggggccgaagtgacaatgtgactctggcagccccagcatgcttcttttgtctgtcttcaatcgcgcatttataaacgtaattatgaaaaggaaaatattggtgataggcgccaacggttttaccggcaggcgcatcctggacgatttatcccataatcagtcttaccagacaacgggctgttccctgcacgacgacatctgtccccattcgggcgactatcgctttatccgtacggatatatgcgaccgccaggcggtggaaaagcttttccaggaagtacagccggatgttgtaatcaatacctccgccctctccgtccccgattactgcgaaacgcaccatgcagaagcggatgccgtcaacattactgccgtggagcatctggcagaatgctgtgaggcgggaggcagccgttttatccatctttccaccgacttcgttttcggtggtgatacggaccgaccctatacggaggaggatattcccgctcccgttaattattacggctacaccaaactggaaggtgagaaacgtatcgctgccgtttgcagggattatgccatcgtgcgcgtagtggtggtgtacggtgccgccctgcccggacagcatggaaatgtgctccaactggtggcaaacagattaaggaacaatgaggaagtgttcgtcgtatccgaccaatggcgtacgcccaccttcgtgggagacgtgtcgcaaggagtggagaagctgataagtcatccgcaaaacggtatctatcatctctgtggcagcgagtgcctgaccattgcagacatcgcttatcgggtagcggacgtattggggctgaatcgctcgctcatccgtcccgtcaccacgaaggagatgaacgaaaagacaccacgtccccgtttcagcgggctgagtatagaaaaggcacaccgggaactggggtatcgaccgtatacgctggaggaaggaataaagctgatgttcggatggtaaataatgcaggtgcggatggcagcagattcgactacagcaactccggctctgcaagtccattctctttgcgatacacacgtaccatctccagaatcacatctccatatttctccacccctttttttccgaaatacggaatgcgtacaagcatggccttatccgaaggaagcagattgctgatgcctagaattgccttctgctgaatgacggtgtatacgggcagccctaatgcggaagcttctgcattgcgccatgctaccaagcggttgtaaagttccggatgcagcacatccgtgggtacttcaacagccgcagcatcgcgtttccgctcacgcggacgtttctctttatcagcctgcttactgcttccctgcccttctttggcagaagcacttctccctttgcctttacccttctgcgaagccgaatcatcaatggaaagcagtgctttctgcttcaagtatcctgccatatggaaaccattctccagcacataatccagcaaatcagtcttcatgtcaaacacttcctccagctcctccatggcatcccggagcttcttcttcaactctttattatcagaagttaccgtactcgccatcaccgcatccagcggttgcaactgctcttgaaaataagtggcggcagagtgtatgcgcccctgcaaagtcgggtcggctgcatagtcctgcgcagtatcaatcaggcgggtatactggatactgaacttctgggctactttcgtcactttgtcgtgaaaacgttccatttcctccttacaggctgcgagttgcttgggaaagagcttgtacaagtgttcgtctatcagccgcacataccgccgcaaagcctgctccatgggctggaaatcgaacaagcccgacagcagttccaggaaataggtctgctgcaaggaacggaagcgtttctcgtccggctcgtttctccgtgcctccatcgtgaaggtatctactgcatggtcactgataacggcctttgcagaaagcggggcactgagcaccactccctccaatgtcttgcagcggctcagagccacataggtctgcccatgcgcaaaggaggcactggcatcaatcacggcacgttcaaacgtcagtccctggcttttgtgaatggtaatcgcccacgccagcttcagcggatattgccggaatgttccttcaatatcttctgtaatctccttggtttcctcatcaagcacgtatttggcattcgtccactcttcctcttgaagtaagaaggtagcgtcgcttcccttactgcgcacttcaattccatctgccgacacggctgtcacctctccaatcatgccattgtagtaacggtgctcaccggaggtgtcgttcttcacaaacattacctgagcaccgcgtttcagttccagtacttcatccgtgggataggaatattcgggaaactttccgtcaatcttggcacgaaaggcatacgagcgtcccggaagttgttccagctcatggtcattaatccgttgggcctgataattgtgggtcaccaggcggatgtatccttcttctttatctggtacgaaattgggaatataccggcggttcaaggcttccagcacttgcccgtcacaacggttttcgcgaatgcggttcagtaattcaagaaaagtcccatcgttctgccgatagactttctttagttctatggtgcaatattccgtctgcttcaatgcctggctggagaagaaataaggcgtgtcatagtatttgcgcagcatctgccactcatcgtctttcactacgggagacagctgctgtaagtcgccaatcatcagcagttgcacgccgccaaagggtttgttccggtcgcggaaccgcctcaagacggcatccaccgaatcgagcaagtcggcacggaccatactgatttcatcgatgaccaataaatctatgctgcgtataatgttgattttctctttcccgtaacgaaaacggtaggttgccttgccatctgcgctgaatgagctttcgggcacataaggagcaaaaggtacttggaaaaaagagtggatggtgacaccgcctgcattgatagcggcaattcccgtcggtgcaagtacaatcatccgtttcggactctctgccctcagttttcgcaggaaagttgtcttaccggtacctgccttgccggtcaaaaaaagatgagtgcctgtgttttcaatgaattgccatgcaagcgctatttcgggattattctccat

SEQ ID NO: 972 - DNA, 7433 bp, unidentified
  source 1..7433: mol_type = unassigned DNA
ctaaccattcacgtactccaatgcaaacctcgtccctttctccaaatcccggttcacgttctttcccaatatatctttcagatattttgggtgcaggccgaagcccggacggatggagcgaacgttccactccgtaatcacttctccggccttcatatcctcggccacatagagagaacgtgatgcggaacggctacctctcattttctccgtcaattcgtaagtcattttccccaaagataactcagccatgcgcacatcttttaccatttgggcaaaatctttctcttccatagaaaaagaacaatccgggccaccaatggaacgattcaaaataaagtgcttttctatcatactcgcaccttgagtaactgccacaatgggagaaacactccccaaggtatggtcggaaagtccactttttacctggaaacgttctgccaaatcacgaatcatacaaagattggcttcctcaaccggagccggataagaagaggtacacttaagaaccgtaatatcattatttcccattctgcggcaagcttcaacagccaattgaatatcttcctcggtggctatgcctgtagcaagtaccatcggcttatgcttcgaagccgcgtattctatcaatggaatatccgtaatttcgaaagaagctatcttataaacgggacagtccaaagcctcaagcatatcgacggcagtcttatcaaaaggagaagaaaaacagatcagtccttcttctttggctacatgaaacaactcttcatgccactcccaaggagtataagcctgttcatacaaatcataaaaatattgcccgtcccatatagagccttcattaattataaaatcaggcttgtcacagcgaagcgtaatggtatcagcccgataggtctgcaacttgacggcatcggctccggcacgttttacagccctgacggtttcaatggctgtttctttcttaccgttatggttggcagacatctcagccacaatcatacacttatctctcatgtctttactatttaatcgtccttagaatactttcaagctcttccatactatcagtctgaagtatgatataccctaaacggtctaaagagttttttatttttttttcagaataaggtcttatttcagaccgaaaaacagccgatgaccgggaagagcttagaaaatccacacaacgctgatagttgagcggattaaggaactgtaccgctgagcatttttcatgtttgcgaaggacatcaacgggcaaaccaagagaacagttcaccagatttctcagcatatctatcccggttgacaatggaaccaaatcagaggttatataatctcctccaagccggcaagcaatttctatgatataagcgcccgattcattcagctttatttctgtatgcgaggggcaattattaagtccaatcaggcaaagtgcttttgatacggtctccgaaaccagctcccactcctgtttcgttatacgcgccggttcaatgtgcgtatcttcaacaaagaagccttctgcctcaccgatacaaagtttctccgtaatagtgacaacggtagttttattgttttgcgtatatgtttcaacactgaattcacggcctgttataaagccctcgacaatggcctttccggtacgggaataaccgagagcttcggaaaaagcaagtacaagttctttatgatttgtaaccttttttactccgcggcttgcagaggaatctaccggtttgacaatatatggataatcttgcaatgtgcccaagtccgtatctttatcacaaagcatgaaaaatggtacatcaatcccgttggccgcaaacatttccctctgcaagtatttgtttgtacagatttttgcgacctcagtggacatggacggaagccccagctgttccccgacataggaaaccacatttacaggcgcgtcacttgtagtaagtatgccgtcaacagagtgacgtttggcacattccaaaacaccttccttatccatcgtgctgacaagaaccggttccgaggcgtaccccattcccggagcattcgcatccatatctgcgactatggtatgcaatcccatatcgttcgcctttcggatgacaggaacctgcatttcacctgcgcccagtatcaataatcttttattcatataaccgaatttatcacatcacagatctttcttgcctgtgcttcactgaaccggaaatcattaaacaaattgacgatatgcttcgcctccacttccgcaacaggagaagaaacacctttgaacatgtatgaaaccgaagggaaattagtcccggcaaacagaccggccttgaatattgcgtcaagaaccttctgccggttctcgatgacaatcatgaacctccagttctggaaatcatctcccatctgaatcgattcaggaagcagattcctgtatatcttgtttattttctctttttccgcaatcacttttgggagctttctttcaatgatgtcaaaatattcctcatcggtcatttgcaaatttgaggcgtccagccaaggatagtcagccggaagcatatatctgacattctccaggagacatttccttatatataccgaatgcttttgttcactaatactatcatactgataatcaacaacttcgtaccccccctaaaacttgcatagccaccataggaaagttctatgaatttggcatatccggtactgtaaaggcagagatccacattttcaggcaaggaatctgccaattcgggaatgcacaagcaacaatcatcaatgatacaaagatttggatcgagacttttcactgcccggtaaaattctttgttgtcatactttttcccgtaggcatgcacaaatacaagaccggaatattttcccgcctctatagctgtcaaacatttctcggttgacatggcatggctttcatctatgtctataaactcaaaaccgacacctgctttcataaacgacaggggcactacaggacacacatttgccggcaataagaacggtttatcaaaatggttgccagacagataattatacaatatggccgaagctctttgtgaagttacttgcatatcaacagacttttaaacaaattgacaaaccgtttgggaatatccggagtgatggcatgtcttttacgaatggccatcttatccaaattctcagcaacaagagtaaaggcagcggcatcggtataatcacccgccccctgaatcagcccttcacgcaaaaacatataatagtcgtgctcctgattatcaacataataccctcctataacaggagttccacaggccaatgcctcattcatcatcgtagaggcaggcaatatggcgacatctacagtactaaacaagtctgcaatggaaccggcagacaaattcttctgataggttactttggggtcatcaaccatattctcggctgcatacgaatcaccgacaattgccgttatcttcttcacattgtctttggctttaattgcatgaatggtctgatacgtcaaattcaagaaatcagaaccaccaaaagccaccaatacatataaacctcctgaataattgttccgtttattctgcagcgcaacattgaagaaaggcctcctcaacaatgaaaattgaagcccaaaggcaaattgagtatatggttcacacgaatagtcatcacgcgtgtaacccaatccctgattgactataagatcagccacatagtgcttgtcgtgcatatcatccacacacaccagacagcaacctttttgcttgatggcacgctggtaatcagtagtaaagaaatagttgtcaagtaccacaatttcgtcaccttgcaaaagggaaaggaactcatcataatgcgattcttcttgtaaggggatgaaaggacataccttctccatctcactcacctgataaggggtaggatggcaagtaaagaaggtacaatcaaaatcgtccttcagcatatcggccaaagccagagtacggataaagtggccgtagccgatggtagcgcttgcgtcggcacggaaatagattttctgcattacatcatttatgaagcaactcatacttcatctctgccaatgcccagtcagtctgtgtatcaaggtcctgcacttcaagttcggaaagtaccaacccggctgtattctcaccccaaaaagtccggctctccacaaaggaagcagtacgagagaaatagaactgaccggcatcgtgataaatcggttctaaatcttgggaacgtgcatttttgtattcgggataaaccatactaatttttccatccacgatgtgaaggctgcgctgtataggataggaataagccacacaagtgaaaacggaatctatctccgaattcatttttccgtatgcttcccggagtctttcgggagtgacaaaaggagccgttgagtaaatgcaacaaaccgtttcaaactccctgccttgctctttatacttcctcagtacttcaagaattacatcatcagtaccagcatagtcatttgacatctcggcactccgcataaaaggaactttggcaccatacttacaagctattccggcaatctcctcatcatcggtagaaaccatcacctcctcaaaaagaccgctttgtaaagctgcctctatggaatatgcaatgataggtttacccataaagggcttgatattcttacgcggaatacgtttactgccgccacgtgcaggaatgattgctatatttttcatttctctacaaattctataaccttttcaatcacatactcctgttcctcgtccgtcaacgtgggatacatcggaagactcagacaatgttcgtaatactcttctactataggtaaatcgcctttcctatttccccactgctgatagtaaggcatcagatgaagcggagcataatgaacctgcgcatagacattgttctcgtgcagataattataaaggcccaagcggtcagctacttgaatgatataaaggtgataagcatgatagacatcggcagtattgaacggagtcttgatgccatctattccggaaaacgcttcattatagcgtcttacgatttcatggcggcgttcaagacctgctttcgcacgctccagctgagaaatacccaaggcagcctgaaaatcagtcagacggtaattgtagcctaactcctgcatctcgtaataccagccaccatgatgctcgtgcaataaagcagggtctttcgtaatgccatgcgtacggtaaagacaaagcttgtcatagagctccttgctgttggtggtcaccatgcctccctcacccgtagcgatatgtttcacgggatggaaagagaatacggcacagtcggcaaaacaaccgttaccacaatgttgtttcttgcctttactgtccatgaaatagccgccgggagcatggcaggcatcctctataatccacaagccgtactcgtcggcaagctttctgaactcttccagatccaaaggatagcctgcaaaatcaaccggaacaatacctttgtaagtaccgcggggagaagctttaagcatggcttcaagtttacggatatccatgaggtaagtatccttgtcaatatcacagaataccacctcgccgccacaatagcggatgcagttggcactggcagcaaaggtcatgggagtgacaatcaccttgtcacccggctttacattcagtgcggtagctgcaagatgaagccctgaagtggcattgttcaccgctacggcatattgtgcacctacatattcggcaaatttcgtttcaaattccctgattttgggaccttgtgtcaggtaatcgcttttcaaggtatcgatgactgcccggatatcctcatctgtgatatgctgacgaccgtatggaataggcttgcttatcatttcacctcgaaattagggtcaacgtatttctttatattctcgcgcatagtctctactgtctcccactccgtattgttgtcactgctgtagtggaaaccgtcgggaacgggtactgcattgtgatgtctgatgaactcttcgcgactgtgcttgaaagatacagaaggaagaatgacataatatctgcccaaatcgattgtatcaagagcatcggttacagtaatcatctcctcgtgcagcttctctcccggacggatgcccacttccacctgcggcagattgggtgcaatggcggtagccacgtcctggatatgataggaaggaatcttaggaataaagatttcaccacccaggtgatgtccgatggcatacatgaccaaagcgacaccggcttccagcgaaatgttgaaacgggtcatgcgcatatcggttatgggaagttccttcgccccgttgtcacgcttgttgataaagaaagggattacggaaccgcgggaacccatcacattgccataacggactacggagaacctgatgttcttggaaccgctgatattgttggcagcagtaaacagcttgtcggaagtgagcttggtggcgccataaagattgatgggggcacatgccttgtcggtagaaagggccaccacatgctgtacaccggtggcaagagcagcctttatcacattctgcgcaccgtgtacattggttttgatgcactcttcgggattgtattcagcggtatccacctgcttgatggcggctgcatggataatcacgtccactccttcgcaagcctgcgtcaggcgttcgaggtcacggacatcaccgataaagaaacgcagttgcggatacttatgaccgggatatttctgtttcagctcaaattgcttcagctcatcgcgggagtaaataatgattttctttacttgcggataatcacggagaatggtttccacaaacttctttccgaaggaacccgttcctccggtaatcaatacggatttattgttaagcattataatgaaaagttttattcatcgatatattcccacggatagggattgtctgtcacattctgaaactcatcaaccgcttcctgctgttcgggagtaagtgataaggaatcccaagaggcgatgatggaacggccctcgtcggccaaagactcgtcgaacacttcaccgtagcaggcggtaagcagacggagcttcagtaaggaagcgggaagggcatcgagcacatcccaacaacagtccagcactttctggacatgccgctgcttttcgccatggtccacaaaagaggcgctgtaacccataagaagggcaagacagacatttgcctgctcttcgatggtagtgccttttacacccgaccggtacaaagccatggtaagacggtagacctcaccgttccgccgtgacaagtcatcgctatagacgggactgccgtccatacccaaatacatcagttcgtgcgcagcacgctgaagagtgattgcttcttcggaaagagacat

SEQ ID NO: 973 - DNA, 5548 bp, unidentified
  source 1..5548: mol_type = unassigned DNA
ttatttccggtcgttctcccggatttccacacggcggattttcccgctgatggttttggggagctcatcaacaaattcgatgacacgcgggtatttgtagggagccgtcactttcttcacatggttctgcaactccttgacaagctcttctccggtgcgtgccttgtactcttttgccaacacaatcgtagcttttaccacttgaccgcggatttcatcgggcacaccggtaatggcacattccactacggctgggtgggtcatcaatgcactttccacttcgaacgggccgatgcggtaaccgctacttttgataacgtcgtcggcgcggcccacgaaccagaggtagccgtcttcgtccttccaggctacgtctcccgtgtagtaaatgccgttgttccatgcctcgtgggtacggttggcatcgcggtagtattccttgaacaatcccagcggtttgcctttgtcggtacggattacaatctgtccctgctcaccggcttccacggaacgtccttcgtggtctatcaggtctacgtcgtattgcggattgggcaatcccatgctgccgggtttcggttccatccacggcatggtggcaacggtaagggtcgtttcggtctgtccgaatccctccatcagcttgatgcccgtcaacttcttgaaggtctcgaatacggcggggttcaatgcttctccggcgatggtgcagtattccagactggataggtcgtacttcgtgaggtcttcgtggatgaggaatcggaagatggtgggcggcgcacaaagcgacgtgacgtgataatcttgtatcttctccagtatggctgcgggagtgaatttctcgtggtcgtatacaaatacgttggcgccggcaatccattgtccgtagagcttgccccacacggcttttccccaaccggtgtcggcaatggtgaggtgtaggctgctctctttcaggttgtgccagaagctgccggtgacgatgtgtcccaacggataggtgaagtcgtgggccaccattttgggctctccggtagtgccgctggtgaagtacatcagggagatgtcatcgttcgtattcggatgttcaggtttcacgaaaggagcggcagcctcgatacctttgtgaaagtcttcgaatccttcgggaacttccggcccgacgcttacgaggcgtttcacagaaggagactccggcatggctgccgtgatatggtcggtgatgacgctttcgccggcgcagactatcatcttgatgtctgcggcgttgcaacggtatacgatgtctttcttcgtcagcaggtgggtggcgggaatcaccactgcaccgagtttgtgtagtgccacaatgctgaaccagaattcgtaacggcgcttcagtatcagcatcaccatgtctccgtggccgatgccgaggctttggaaataggaagccgtcatgtctgtgtaccgtttcatgtcggcaaaggtaaactgccggcattcgccctggtcattggtccacaacagtgcgggtttgtcgggttgctcggcggcccaggcatccactacgtcgtagccgaagttgaaattctccggtacgtttatcttcaggttcttgatgaagtcctcctgtgaggtgaaggatgtttgagataaaaatctttctaccataactttattacataattactgccaggaattttacagtctttccgtcaagcgccttcatgccgtgcggcagtttggagttgaagtatagactgtctccttcgtttaagattaagtctttgccgtcgatgctgaccatcatacggccttccagtacgaggttgaactcctgaccggcatggctgttgtaatgtatcggctcgctgtccggtttcggttctacggtcacaatgaacgggtctgccgtgcggttgatgaaaccggctgccagcgattggtatttatatgccttggtacgttctatactggttccttttccggcacgtgtcaggaagtaggagctcattttgggctcttgcccaaacatcagtgcgtccagtgatatgccgtagtgccgtgctatcttctgcagcatgctgaccgagatgtcgaattctccggtttcggccaggcggtactcttctgcagaaatgtcgcagtcacgggcgatatcgtcggcagtcagttccaatacgtcacgcagtccgcgcaggcgttcggctatttgtctgatttgttcgtccataattatattttttaatgggttgttattaaagtgtggcaatgtgccaataggctgcacaatgtttaattacaccgtagctcataggcatatcgggacatcgttacattagcacattaaatatcatttactcgctttgatggctttaatcacagtggaggtgaatccttcatgttccagctcgttgattcccttgatggtaattcctccgggggtacacaccttgtcaatctcaacactggggtgcgtgtcgttgttcagaatcagctcggctgcccctttcacggattgtgccaccatgcgcatgccgtctttgggatagatacccatttcaacgccggcctgcatggctgcctggatatacttaagcacgtaggcgatgccgcaggaagtcatggcagtggttgccgcaatcttttcttcgggaatgagcatggcgagtcccatctggttgaaaatgtccagcatcagttgctcctgctccttggtggcattgcggctggcgatgagtgtcatgctttccatctcgctgatggcggtattgggaataagacggaacatggtcatttctttgtctgctacatagtgtgtcagcttttcaaaaggaatgccggctgcaacggatataagaatctctgtgccttttagttccagttcctttatcactggctccatcagccatggcttcacggcaaagattatcatatctgcaccggctgccgcttcctggttgtcattggtcacttgcaatgcggggaattctgccttcagcttgtccagcttgccctgggtggggttggagacaatgatgttaccggcagggatgattgttccttttgccagccctcgggcaatggctccccccatatttcctgcaccgataattgctgctttcatatctttttgttgttaaaagagttgttttgctggcaaaggtagataaattttctacaaaaaacgaccgagagagaaaggtattctgcttttcggtcgtttcttttgctggctgattatttgtgtcaaatattaaagtactttcttgaagcgttccaagaattcctttgcttcatccatgccgaggcacagaggcggcagcaggcgaagtacattcgtaccgcttacaccggtgaatacatgctgctctttcagtagtcttaggcgcagttccttgatgggttcttcaaattccagccctatcatgagtccgcgtccgcgaacgtccttgatttgagggaatttctttagttccgttatcaggaagttgccgacttgggctgcattctctatcaggttttcctgctctatcacatccagcacggcaagggcggcactgcaagctaggtggtttccaccgaaagtggttccaagttgcccgtatactggtgtaaacattgggctgatgagtacgcctgccatcgggaaaccattgccgatgccttttgccacggtgatgatgtcggctttgatgccgttgtactgatgggcgaagaacttgccgctgcgtccgtagccgctttggatttcatcgagaatcaagaccgtgttgtgttccgtacaagtctggcggagagcctgcatgaattcgtctgtcggcagttggatgccgcctacaccttgtatgccttcgataatcactgcgcagacatctcctttggaccattcggccttcatggcttcgatgtcgttcaacgggaggtaggtgacgtgcccgcagttgttgatgggagcgatgattttaggattgttcgttacttccaccgccagtgaggtacgtccatggaatgcttttgagaaggatatcacacgggtacggccattgtagaaagaggcgagtttcaaggcgttttcattggcttcggcaccgctgttgatgaggaagaatgagtagtcgtcatagccacagacttttcccaagcgttctgccacttgctgttgcagcttgttaattactgagtttgagtagaatcctaacgtagcaacttggttactcaccatctctacataatgtggatgtgcatgtccgattgagatgactgcatggccaccgtagaggtcgaggtattcggtaccgttctcgtcccatacatggcagccttttcctttgacgatgttgatgtcaaagagagggtatacgtcgaataaattcattttttttagaatgcagaaggtttcaaccgtaatcctacggtctcttccaggttaaacattaaattcatgttgtggactgcttgtccgctggcacctttcaggaggttgtcgatgcaggaaatgataagcagcttgtcaccgtgcttctccaggtggatgaggcatttattggtattcaccacttgtttcaggtcaatgttcttttccacgacaaatgtaaaggaatctttggcgtagtattcttcgtacatacggatgatttcttccagagccactttggtctttactacgatggtagtgaagataccgcgcgggaagtcaccccggtaggggataaaatctatttctgcatcgaaactgttttgcagctggcggagtgattgcttgatttcgggcacgtgctggtgctcgaaagctttgtaaacactcatgttgttgttgcgccagctgaagtggctcgtggcacccggtttcactccggcacccgtacttccggtgatggcattcaccatgatgtcatcattcagcatcaggtgcttggcgagcggcagcagccccaattgtatgcaggtggcaaagcagcccggattggctacatgctttgccttgcaggtggcgcggcggttcagttccggcaagccgtaaatgaagtcgtggtcaggagaggctatgcggtagtccatggagaggtcgatgattctcagctcctcgggcacgttgtggctttcgaggaattttctcgtgtcgccatgtgccgtacagaaaaacagcacgtcgatttcttccagcggaagctggtcggtaaataccaaatctgtttcaccgtacagtccttcgtgtacatcagtaattttgttgccggcgttgcttgaactgtttatgaatacgatttccgcttccggatggttgagcagtaaacgtatcagttcgcctgccgtgtatccggctccgccgatgattcctactttaatcatttctataatatctattggattcttctggtatgataatcaataatataatgtatataattacacctgcaaaagcagtaaagacggtagcgaacgtataaacgatgcgtactaaagatacgtcaagtccgaaaaagtttgccagtcctgcacatacaccggaaagtattcttccggttcggggacgtgtcagtttccgtttcttgtccgtcat

SEQ ID NO: 974 - DNA, 40504 bp, unidentified
  source 1..40504: mol_type = unassigned DNA
catcttccagttcttttaaccattcttcaatattgggtttcatctgaaaattgttgcgatagccataataccaatgctcataatctacaaaaattgctgccttcggctttccgccttttttcttaaaccaaaacacttcttcaccccctttaatttgttcccataaaataccatacgtattaatcatactaaatttgtatgtaaaaatcaaataaatttgcacaaggcattttcaccccatgcaaatttatttttcatataagcctcatttctgaacagctttgccgcaaaacgatttctcatctgccctcagggctattaaacttcatcaatcgccttgccgatatcatgacgcatatacttattgtcgaagttaacccattctgttgcttcataagcattggcacgggcttcctttaacgtctttccggttgccgtaacacctaatacacgtccgccgtttgtaacaatttttccgttttcatcaaattttgaaccggcatggaacagataatatccgtccttgtccttgaaattttccattcccgtaatttcaaagcccttttcgtatgccagcggataaccatcagatgccagtacaacgcagacacatgcattgtcttcaaactgtaagtcaatctgatcaagtgtgccgtcaatgcaagcttcaaatacatcaataatatcattcttcattctcggaagaacaacctgtgcttccggatcaccgaatcttgcattatactctaataccttcggtccttccggtgtcagcatcaatccgaagaaaataacacctttaaacggtcttccctccgctttcattgcatctaccgttgcctgataaacatacttcttacagaacgcatccacttcatctgtatagaacggacttggtgaaaaattacccataccacctgtatttaagccctgatcgccgtcttttgcacgcttgtgatcctgcgcagaagacataatcttaatcgtgttaccgtctacaaacgaaagtactgacacttcacggcctgtcataaattcttctacgacaatggtattgcctgccgaaccaaatttcttatctaacatcagttcgttgacaccagccattgcatcttcctttgtttcacaaattaaaacgcctttaccgagtgccagtccgtctgcttttaacacaatcggatactttgatgtttcaagatattttttggcttcttccggtgatgtaaatgtttcataagccgctgtcggaatatgatacttcttcatcaaatcctttgaaaatgccttagaaccttccaaaatcgctgcattctttctcggtccgaacactcttaaaccttctgcttcaaatacatcaacaataccgccgactaacggatcgtccataccgacaaccgtcaggtcaatctgattgtcctttgcaaaggctgccagcttatcaaattccattgctttgatgttgacacattcggcaacttctgcaattcctgcatttcccggcgcacagtaaatctttgacaccttactgctctttgaaatcttccagcagattgcatgctctctgccgccgcctcctactacaagtactttcatcttttacctctccaatattcttatttctgatttgctatcatattaatggcagcaggaagcagtttccactctgcctgttccattacacgtttctgaaggatttccggtgtatcgccttcttctaccataacaggcttctgcgcaataatttctccggtatccattccctcatctacataatgaacggttgcacctgttacctttacacctttttcaagcaccgcttcatgcacgtgcagaccatagtagcccacaccgcagaaagatggaatcagagaaggatggatattaataatccggtggctatactggtgtaccatttcttccggaatcttaacaagatacccggccagaacgattaaatccaccttcagctcattgatcttttcaagcagcgccttatgaaaatctgctctgtctgcatagtccttcggagaaatgcagagtgcttcaatcccgttttcctttgctcttgtcagcgcatatgcattggcattgttgctgataactgctacaagctctgtattggtaattgtaccgtcttttacggcatcaataattgcctggagatttgttccgcctccggaaaccagaactgcaactcttagcatacagttactcccttctcaccggcttctacacgaccgattacgtaacctgtttcacctgcttttgcaacagcggctaacaccttgtctgcatctgccggatcaacagcaagtaccataccgatacccatgttaaaggtattgtacatcatcttttcttcgatttcaccgtcattctgaagcatcttaaagattgcaggtacttcatagctgttcttttcgatgactgcatgtacaccgtcatgtaacattctaggaacattttcataaaaaccaccgcctgtaatatgactgcagcccttaatctttacaccggcatttttaatttcttttaatgtctttacataaatctttgtcggagcaagtaatgcttcacctaaagtttttcctaatgcatcataatatgtatttaatgcttcttctgtaattttaaatacacttcttaccagagaaaatccattgctgtgtacaccgcttgatgcaataccgattaaagtatccccggctttgatgtcttttcctgtaattaaatctttttcatctacaacaccgactgcaaaacctgcaaggtcatattcgtctaccggataaaatcccggcatttctgcggtctcaccaccgattaatgcacattcggactgaagacagccgtctgcaaccccttttacaatctgtgcaatcttttccggttcattcttaccgcacgcaatataatctaagaagaataacggttcaccgcctgcacatgcaatatcattaacacacattgccacgcagtcaatgccgactgtatcatgcttatccattgtgaaagcaagctttaactttgtaccgacaccgtctgtaccggatacaagtgttggcttttccatatccttaaacttatccattgaaaatgcacctgagaatcctcccagaccgccaagcacctccggacgcatggtctttgccacatgctccttcattaattcaactgatttgtaaccggcttcaatatccacacctgcttttttgtaatccatttttttctccattctgctgccttgcagcttaatttttctgtagcgttcaatctataattattttgtataattcttataaccgacttcctgaaggtgcgcatcttttttctgtacgctttcctttaatcccgcagaataatcctttaactttgaaagaagttctgcatcggatgttgcaagaatcttcgctgcaagaagtcctgcgttggcaccgccgttaatggctacggttgcaaccggaataccgcttggcatctgtacaatcgaataaagagaatccctgccgcctaaagaagtggtgtgcattggaataccaatgaccggcatcggaaaaattgccgcacacatacccggtaaatgtgctgccattcctgcacctgcaataatgaccttaaatcccttttcttctgctgtctttgcatattcaaagaatacatccggttctctgtgtgccgaaatgatcgtcatctcataagagattcccagctgttcaagaatatctgctgcctttgccataactggcatatcagaatcgcttcccatcacaattcctacttttgccataacttgattcctccattctgccggttcatacctgcattttgattttatttgtagtattatttaattgtactttgttttatattttccgtcaatatcttaatccaaaaactgttattttaaaaacggtttgtttaattcttcacagcctgcaagtacaaatctgccgttttcaataatgacggtttcgctgccatcttccgatactgccgaaatactgccgatttcatcatacggaattgtaatgtccgtatggcagttaaaatacgctttttccggctcggtctttcgcagtatggaaatttcattatcccgtgaaataatttccttaccgttcggattgtatacaatattgtcttccgctctggaataacatgtatcaccgattgcaaaatgcggtcccattttttccacaataagaatcggcagcttgtatacaatgtcgtattgatttgccatcacatacgctgttgtattcgttccgattgcaaattcaccgattggcagggtgtcatggttcaataacacattttctttaaaatactgtctgctttttttcgcatcttcaaaattatcacaggaataatccgtgaccataccatctttaaaagacacctttaaattaataaatttcaaatcattcagataaacactgctgacatttaaaatgccttctgttccttttaaaacgggagaggtaaagacttctcccaacggaatgttgacatcggcaagacagttttcaaaaaccgtttccttctgcggattggtgattttctggagagacacacgcatatccgtctgattattaccacatcctttgacatgcacgtattccgcgccgtccaaggtatcaataatcgtctgctggatttccttatactgattgtagtcgagggtattaatccgcacgatttcatgaaagattttttcatattcgtccgcattttcactgatttccggcagcgggtatgcaataatcgtaaagcttctttcctcgcctttaatatatttgttgacaactgccgaagactcgctgtcatattttacggaaagcttctgttgtttttcatctaaatgcatggcttcttttttatcttccggctcaaacggattttcgccgaacacttccatgaccgcaggaccgccaaaaactgccgctgcttccttatgctgttcatatgcaaagcggagtgccccaagcttcctttcaacaaactgcgcatctaaatacaacgcattgtcaaaacgatggtcgtagtccatctgcttgttcgggctggttgcgtaataaccgattttgtggtgcatgcgcttattgatagaatgctgtgccgcacgatatatcgtcgtctttaagcccatctgttcaaactgacggatttcctctcttaccagccgttcaaatccgatgcagtaacggatattaaccagtttctttttgctgatatctttattgcccagttcaaatccgatgcggtatccttccgtaaaggtcgatgccatttgttcaatctctgtctgggaaagcgtatttaaaaatgctgcggtacgaagttcattttccgtaatatactcaccataccggtataaatatctcaaatccgtcaaatcgctgtccataataatgcgcaccgcaaaatccagcgacgggtctaactgctcccgcaccctgtactcgataaaatcatcgctgtaatcactcatataccagtaaatggaatcctttaactgtgccgcaatattttcaccgtccttgcaaatgcagtaacattcaacaaaaagttctaacaataccgtaaaatcagctttacgctgttctgctgcaaacacgatacacccgcgcagttctgtatacaaaaacgataaaatcctgcctatgtcttctccaagccgtgcacaggcataagacggattggcaaagctgttatcatattgtttcccgataatgtcttcatacaaaaccgtattccagtgctgcaattcttccaatggcagtttatcatatccaccggcttttcttttctcattccatttatccacaagtaaaagaaattctgccgtgtacgtaaaatatgctgccagtccggcatcttctatctctgaattttctttaatttccgcaatacgatcaattgccagaccgtatcgttccttcagattatcttcaaacatttacaaatcctcactattcacactatacccatcatcagcactgctaccataaatattgcaaaaataccacacatcagggaacctgctcttgaaaatgtataaaacttatcttcttctttaaagcttaacagtccgataaccaacccaataacagaaagcatgaaactgagcagtccaaggcttcctacctcgagtccggcatttccttttgcctggaatgcaatataaatgccatagccaaacgacaccagtgccgccaatcccatgactgttgatatcatgccccccaaggtctggcttttatccgaaaatttatatttattaaaaagtttcatgattttttccttttcctatgaaactgacacatttttttgtaacacaaaaacgtgagatagcccaatacaccaccgagtgtattgagcattaaatcatctacatcaaaacttcccactttagatacaagctgaatcagttcgattgcaagacttaacccgaatgtatacagcatacacccaaaaaacttaatccgatggtctgcaatcagcggcaggcagaacccgaatggcataaatgctaccacatttcccgcaatattggcaagcaccgccgtcagaccaagctgccagaagtgattaacaaaccgcttgatttctttaaatggtacaagattataccggtacgtgcgtgatacatccgtccttccgagaatttccgcaaagaacataaaatataccagtgcagcaatatacgcaataaaaatcagccatttcaatgtctttttcatttttctatttttcacacaatgcccataccttcctgatacgcttaaaataatgtgtcggatttatgtgccagaagtcttgcaccatttacaatcagcaaaactcctgttgtaacaccacatacgactgaaataatgccaaaaacaatattcccggcgccaattgacttgatttttttatataacttttcgtccatactactcctcatttattcaattcttcgataaaatcagtattgtgacacctgcggcacaatactgttgtatgaacaagctttcgtttatggcttgttcatacttctcctacttattctgctactaattccttatgcttccttcgcaccgtattcttcgtaatacttgtcaatggcagccttaatttcatcatcaataaccaccttgccgttacaaggcttgttgtacaaatgttctacaacgtctgacatgctgacaattgcatttgccggaaagccgtacttttcctgaatttcaacaagggcactcttttcgcctttgccacgttccattctgtttaaagacaccattaagcctttgattgtcacatcgccctgtgcctgaataatcggaaatgtttcttcgatggatttaccggaagttgttacgtcttcaataataactactttatctccgtctttaatcgggctgcccagtaagatacctgcatcgccgtggtcttttgcttcttttctgttagagcagtaacggatttctttaccgtaaagtctgtgatatgccatggttgttgccacgcttaacggaatacccttgtaagccggtccgaacagcacatcaaaatcatcaccgtagttatcgtgaattgccttcgcgtaatactcacccagcttttcaagctgtgcacccgttacataaagtcctgcattcataaaaaacggggactttctgccgctctttaaagtaaattcaccaaaccgcaacacattgcagtctaccataaattctataaattcctgtttgtactgttccataatctataaagcctcctgtttgtaatacttttaacaatttttaatatctttttgatgttggcgacaaaaggtcactcacccacctataagcagacttatgtggttttagaccttctgaccatgacatttcttttttattctagcataaatttcccggtgtttcaatatatggttgtttttggaagaaaaagggcaatttgcaatacaaactgcccaaccgatatatacagccgaaaagaaagtctgtttctacacccggccggcatactcttatacgataaatttttcaacctgtgactttaatacatctgccgatgcatgtgccttagaagctttttctttaatatctgacgatttttcaaccacaacagttgtcttttgtgcaatatccgttgtaccggaagctccctccgatgccgccttacttacgtcaccaataccattcattaccccactgatagaagcaagcaattcttctgaagaggccgaaaaatccgtaaccagttcgtcaaccttttgcgcatcatcattatacgaatctgccatttgtgaaaagtcttccagattctgtacaacatctgttccgacaaattcaagcagtcttgcagaatcccctgcaagattatcaaccgcacccacaacactttgtgttacttcctgaatattagaaaccgtttccttggactgttcagcaagtacacgaatctgctcggcaacaaccgcaaagccttttccggcttctcctgcccttgccgcctcaatggatgcattaagagccaaaagattcgtctgtgccgtaatccccataatagattctgccagtatgccaatctggtctacgattttaatatcttccagtgcctttgtcagatggtcactaatgtcttcatgaatttcatgtgtatgttcatattttttctgcgttgtatccttaatcacaactgcacggtcacggatactgtctgcttcaagcgcaccatcctgtgaacgtgttgcaatgcttttcgctgccgtttcaatttcatgtgacattgcatcaatctgctgtgaggatgccgctgtttcttccatggctgctgccagttcctgtgttgtggctgacacctcttcaatttcatggtcaagggaccggacattttcatcaatctcctcaaccataccgctgatattcgatgcttggccttttacctcaccaatcagtgtacctacttcacaacgcatattttcaagaaataccgaaagctgcccaaaatcgtcttttctttttaaaagcgccggggcagtcggctgtgaaaaatctccccgtcccattgtctttatagaaactaccgctttctttaacggcacggtaatactgcgtgtaatgacaatcagcaggataatcagtaaaacttcaactgcaatgaccagaccaataaaaatcccttccctgctgagcacataagccgcatattctgaccgtataccatctattttttcatcaatataatccgtataatttcctgttccgataacccattcaaatggtgcaaatgctttgctgtaagaacgtttaggctgattatcggtttcaccctccttcggataaacatagtctgtaaatcctccatcagcctgctttcctacacggataatctcttttaccatttggtaaccgttgccatcctttgtttccagacgattcgttccttctgtctgactgccaagcagcacaacattggttccatcatactgatcaacccagaaatagccgccatccccatatcggagctgacgtatctcatctgctgccagtttttttgcctcttctctggtatacacccctgcttcatactgtgtgtaaatgttctggcacaatgaaatcacattgtcaacctgattctgaatcatctcatcataagatgcacgcttatctgactctatcgtttccagtgcctttgtctgcatcgccttcatagattctgtcgaaaaaacaacacatgccgtcattgccaaaaatgcggccagcattacaataatcagctttgttcttacctttacattattcatactctttacctctttccccataataatcctgctgtcattgtttcccgttcgtccttactcacatgcattttcaatgtacagaccacacaccggaatccaacgtacaaaaatgcatttgtccttcccaggtttctgtctcccatcacgtacaatctatatttattatgtcactttttacacacttcgtcaattatttatcattatttattttttcccttcttccaccaactgtccaagctgcgctgctgctgttcccggcacatatttttcctgacactgaatcatttttttgcggttttcctgtttttgtaatgacagaactgccgcggtcagctcctctttgggattggtgactgccagtgccatgcctgtctttttaaaaaactgcatattctttgtttcacagcccggaatcggacagatgtgaatcagtggaatccgtgcagcggcggcttccgtgcttgaaagcccacccggctttgtaataaagatactgcctgcctttaaatacagcggcatcttatcagtatatccgaccagttcaattttgtccgcataccgcttctgcagccggctgtacagctgctgattgtttccacagaccataatcagcttacatttatgcagggaacgcacacggtaaagaatttccacaacttcctccaacgcaccagcccccatgctgccgcccgcaattaataaatactcttttgcagaatccagccccagctgtcttttggcttcttccggtgaaatgcgctctacacccgtgtccgccgtcggtatcccaagcggatataacttttcttttggaattccgtatttcctgaattccggtatcagcttttctgacggaatcacaacatcatcgcagtcggtttcttccgtaaacggaatacatgcataatcggtagccacaaaaatacttggcggcacttccatccccatttttttcatatttgtgataatctccgccggatataaatgcggtgtaatgatgacatctgccggatgtcgtaaaagatactcctgtaaaatatatgccattttacggttaatataataaaccggtgacggaaacggcagacggcggtataattctcccagccggtatacgaatccgaaaagcgtgctgtttttctgtaccagaccgatatacactttatcaatcacacctgccagtctgttactttttagctggtaaggatttatcattaccacctgatgtccctgtttttggagctgtttttggactgctgcccctgcggcattatgtccaccgcctgttccgcaggataaaattaaaacattcatcggtatcacctctttatccacaataactgaaatgtcattttttcacgttcttcctggctcatatgcattttaagcagtatcagcagcgatatcaatcctacaccgatatgcacggctttgggcagattagtctctgaaaatacaatgatgagccagtttacaatgtataccgctacggttcggtaaaagttcggtgaaatctgtattaccagtgaaaagaataaaaaacacaccgcaagagaaagtaccggataccacatcggtatcagtccgagcagactgccaaaactgactgcaattccctttccacctttaaaatgatgccagacagggaaaatgtgtcccgctaccggtgctgccagcaccagtgccaatccgttgctttctgctaaattcatctgtgtcatgtgaacataggcataaaccgggacaaagccctttgccatatcaaaaatcaatgtgcagattccgcaccagaacccgccgtataaaaatgcgtttgccgttcccggattggcatccctgctctgctcaattgcattttttctaccaaaaattctgcaaaatacttccgcatataatacactgccggataaatatccaatcaatgcatatattactgcatatggcatctttttccctcctgattacgctctgatatttgtattttcattatggcacttcccgcctttttcgtcaattctttgtcagactaacagctttagaaaagcagggtctgtccacttggacattccctgcttttgttggtgcctgatatttatttaaaaatatttttaattttttgcagactgatacgcactcgtatatgccgcctttatggcattgctggactttgtcgcacccgatacaccatccacaccactgacaccaccgtttgcaagaatcgctcccggaactttggcatttgcctgtgagaaaaacatttcatctgcgccgcctgccgttgcggatgcggatacgcctgtaacggcatcacctgaaattgtcacaacaaccgtaaccgtgtatccgtatgtatcgcatacggcagttcccgtataatcgccgtccgccttaaatgttctcggtgcttctgtcggttttggtgctgcttctgttctttcttccgccggctgacccgcactgccgctgtccgaacccgaacttccgcccgcactgctgtttgtatcatttccgctgtctgatgtcgcgcctgaacttccggagttctgactgtcagcgtcctgttttccctgtccgttttcctcaccggctgtattttcaactgccgccgctgccgcattttcaccgtcctgcgcgttctcgttctcctgtacttcctgtgattcacctgcactatcaccggattcgcccgaaatctgctgttcctgtgtcacaccgtccgcatttaaaacctctgacgttgtgcctgcttctccgttcttttttacacctttttctgtctgtgtctgactcagtgttttatctgccgccgtttcctgtgcagacactttatttccgttccgcataaaacacattgaaaatgccacagtacacacaagcactgcacacacagatactgccacactgactttctttataaaaatgctgtcggcatccggattttttgtaagcacccatttacggatacgcatcgccgcatatcctgcaaatacgatactgtatacaagcacatttacggcatacatgtgtagtcccatgcgcgcatacggaatattaatcagcataatatgtacatataaaagtccataaaatacataggcgctccgctgaatctgcttccactttttcggattcatctttttgcggactgccggaaatgaaatcaccgttaatccaatcatcaatacaatcagcatcagactgatcaccgctgcacaccgctggactgccggtaatgccgccggtgccgaaaataacattttaaaatatgtcatgccgtaggtcaggttgtgcgaaagcaccagaattgccgccataatggacaattccccgcgaatccgcatgagcggtccgataaactttgaacctctcggcagtgcacctgttatcatgacaatgataaaaaatgccgttcctatcgttccctttgcaaaaatgcccacaatattctgccgtacaaactgcggcattgccaccgtgcgcaggctgaatataacaatcgttacaactgccgcaccgatgtaaaaaatattaggatactgctttagcttgtcttttaaaaagtatacaaataaggaagctatcacaagcgcaataatcagtaacataattcctcctttttgagtttgttctttatgatttaagttagaaggatatactgccgttagcttcttctaactctgttctatcataaatatagaatccttttctgtcaaggtctgttactgacaataattatcaactactttttcaagacatttacggtgtaatccgaggtaaaattctgtgcaattccctcagaaatataaatctgattgtcttttgtaagtaaaatgacatcaaaatccaaatccgtattttcataaaagctttctgccttttgaagtcccattacaaaaaatgaggtagacagcgcatctgcctttgttccgtctgcgcacacaatcgtaacagacgtcaaatcgctgtctgacggatacccggtctttgggtcgataatgtggtggtaagtcactccgttttcttcaaaataacgctcatatccaccggatgtaatgactgcttgatcgctggtttccagaatgccaagatactgattgcctccctgcggactctgaatggctacgcgccatgccgtaccgtccgttttcgtgccgagtgtctgcacattgccgccgagattgaccatgccgtgttcaatgccgtattccttaaaaatctgcatgacacggctggacgtatacccctttgcaataccgccaaaatcaatctgcgcattattttttaagaccagttcgtggtcctttaacgatacattttcataggatactctttttaacgtttcctgtaattcgtccacctgcggcactttgtagtttttcgtggtaaatccccacagctccatgaccggatagattgtaatatcaaatgcaccgtccgtctttcttgaaatttcaagggactgctccactaaatatgctgtttcgtcagacactgtagcgcttccctgcatattggcagttgtgacgtcactgtccgtatttcctaccgaaaacatcgcatccagtctttgaatctcatgaattgctgccgtcacggcatcctctgcctttgctccgtatgcagtcaatgacatataggtatccattgcaaaaatatcggatgaatatttgtcattttctgaaacactttcgctctgcacgctgtctgcttttttaccacatgccgtcatgcctgccgccagtatcacgcacattgcggcgacggctgttttctttaatataatcgctgctttttttctttttgtatttctttcatttacgattcttctcataataatcctcacttctaagcaacttgttgcgaagcggcgatgagaaattcgcacaggcgatttctcctctgccatcatagctatttgtttttgctcagaaacaaatagctgtgtgaaaaatcagcacatcagtgtgatttttcacactagtttctgtccattctgaccatggttagtcacgtaaaactatatgccacatcgttggaattgtcaagctgctacatcgagtccaaaatccacaaaaaaataccgcataaagagaatcgtttttgctctctttatgcggcagtttttatttataatgtgtttactttctcaaacttcttacgccattaccggtgctttcttttgaatcaccgcttcaacagcatctacactgatttctgcaacatcggcaatctgttctaatgtataaccctttttatacatattcagaatgaacttttcactcgttttctctgttgcccgttcttcagctctttcttcgattcctgcactcagattacacataactctcacgtcctctcttatttcattactgaccgggatattatattcatgttcaattatatccagtttttcctgctctttcaacccgcttgaaagaagtgtaccgattaaacggtgcaattcgtacttttcatcatgctccggtaattcatctgtaataccaatcagcacgatgttgagtaaatccatatttcctttccaatcgtacggctctaacatttcatctttgataaggtggatatggctcatgctgtttgaagccatgttcatacaaatccagatactgaatacctgttttatatcgtcataattcgtattgacaaaatccctctctttctgcgatgaaacaagtctgctcacataaaagaccgcccggttatatctgttttttctgcattagtcagacccggttcaacgggtacaatcccaatctttggctcaccctcaatgtacattactgcatcttccggcttcatttccttaaactcatccaccgtcttaaccaaaatgtgtgccaaaatatttttttgtgccagtattcttttgacacgggtatcatactgcaccttatctcccgccgcactgactgcatttgttatttctgtattcaaggcattcccctccttttgtaacattgtaaatctgcaaaagccccctttgccttaatactattataagcggatatttctgtggaatcaactggaatttctattaaatattttgttaatatcgcaaaaaaataccgcataaagagaatctgttcagctctctttatgcggggattttatttacaaaccatgtctgcacagtattctgttattccagttttaatatttaaactacagatagtattccattggatatgtcggataagcgatttcctccagctgatccatcgtaactaaccctgccggagcgcgcagcactgccggaatccggttgacaatcgttgcacaggtatgctcaaccgttgccggttttacaacatggaattccgtatccggttcacctgtaatcttccagtcgcacatatcaccatcgtccggaccataaaccttgccgatacactgtgtttcaataaccggtccctggaatgtttcggtagttacaactgccgccataccgatacagttgcctttcggtatcgttgcattcatggttgatgagaacaaatcactgtcatggaaatacggtacacatttctgtgtctggctcttaatcgtccagcccatttttgatgcaagtgcctcattggaattccatacataagaaggttcaatctcctccgggtgtgcaatctgtttttcaaattcttccggtgttaagcctacgccgtgagcttttgcaagtgccagtccgtaatcttctacgttatagctgactgcgccttcaattttttcaatcttgtgacagccgcctgctaccatgccgaccatattcacccagaaaatatcttccatgccgcttcctacaaaagtacaaccgtttttcttggcggtaacatctaagatattggcacgaaccgggtctgttgtccagcagtacgttgcttcttcacaggttgtaatcacactgattccacgtgtcagacatttcatataatgtggaaagcagtcacttaccagactaaacagcgttacaacggcaatatccgcatccgtgttgtcaagcacttcttccgcattgtcgctgattaatacgccggtctttacacccagtcccgcataatcgccgatatccatgccgacaatagatggattacagtcgattgcaccgacaatctgacagccggtttcatacagataccgcattgtgtacttgctcatcttgccacagccatactgaattactttaatcttctccataacatcctccaattctacaccgcttccttttaaaatctgtgtcctgcggtgcaaggacagtttcagacgaatcctcattcacgctttcgcttttcactattcagcatatattacgcgaactgattgttaattatttaactttccgttgtattcagtataatgtctaatcttagatgagagtcaagcctatttttccatttttaccggcacctgaagccgcagatacatcgagcgcttgcggctgtcaaagacgttcatttccataatttcttcgcaaatataatcaccgcagatttgatagccgtgttcgcggcagtacgccaaaagctttttcgcacagtcgcgttcctcatcaaaatcttccgtataaatacatgcatacatgccattctcgattgtctgcacacagtctttcatcggaaaatcgtcatctacaaagataaagatttcttccgaataaaaggtcagtttttcaaacagctcccgccgcataatcgtccctgcattgcagtaataaacctgcggaatatgaaattccatcagcttattttttaactgctttaaaatcaattcgtacatatcaatgttataatcgtaaaaattggtatccacacacatcgagtaaatcgtcctgtccggtatgtattccagtgtaatcgtgccgcttttcggcgatttcttataccgttcaatgcttgcaaccgtcctgtcaatcgcctgcattttaaattttaattcctgcatctggacaaccgtctgttcctttttctgccgtaaaatctgctcaatcagattaatatcctgtttatcgaacaattctttaatttcttttaattccatgcccagttctttcatgtactgaatcatatcaaaccgggcattctgcttgatgtcataataccggtaatgtgtttcctcgtctgtgtaatacggtgtcagcagtcccattgaatcatacagccgcagtgtcggtacggttgtgcggttgatttttgccatttcaccgatgctgatatatctgtcttttttctccatataatttttcattcctattttgcagacattttaatgccaaaaaataaaccctaatgtaacattagagtttattttatcataaatattcttatttttccaatccgggactgctttttataattttacattaaccccgaccatcctcgtaaaattacacgggcatatataaaaataccctgtatgcctgtctgacatattcttttacattccaatatgaatctgttatttatccccacaccttttctgcgatttccttcaccagtgccagctttgcccactgttcttcttctgtaagcttgttgccgatttcacaggaagcgaatccgcactgcggacttaaatacagtctgtctaacggcacatattttgccgcctcatggattctgtcaattactgcctgcgcatcttccagcttcggagactttgttgtaaccagtccgagtacaaccttcttatcgccctctacatattttaacggttcaaatccgccggaacgctcatcatcaaattccagataatatgcattgacattttcctttgcaaataatgttgccgctacgctgtcataagcaccgctgcttgcataggttgaatgaaaattgccgcggcatacgtgtgtattgacaattaaatcttccggctttccttcaagcgcgctgttattaatctctaaaagctgttccttaatcttttcaagtccctttggtgttacgccaaacaatttgcacgccgccgggtctaccaccatgccccatgagcagtcatccagctgaagatttctacaacctgccgcataaacctctttgataaattcacggtatccttcggcaatatcctttgccacttcttcctgcgtatcgtaaaatttcttggtattgctccatgcaaaaggcataatcatctgttccagaaactgtgccggtgccggaatggtcagctttgcaaccgtattttcatcttccagtgcctttacaaatttaaaatgctctacaaacgaatgatttttcttataagaaatctttcccgtcacatatgtatcatcaatcattgcagcttcaccgtggaacggaagtcccgtttcagttttgctgtgtccgactccgtcaaatgcccacataaaatccagatgccatgttgcacggcggaattctccgtctgtaataacgtgataacctgcctccttctgctttgcaaccaactctgtaattgccttatcttctgtctttttcaattcctctgcgctcattgctcctgcttcgtaatccgctcttgctttctttaaatactccggtcttaaaaagcttcctacaaaatcatatctgaaaggtgtatataactggctcactttatgtttcctcctgcttcctttgttttgtcgtattataacggacattttcctatctgtataatatgaattcattaaggttgtccatagtttaaaactatatctgtaagctaaaaaaatgtaagccgtatcaacagcttacactttttatctccgctcccgacaaagagcctacaccttttttaactccgcacggaacataatctttctcgttccggttaatttttcaaaatcaatttcatacgactgggtggacagattgatatccacaattgttccgacaccgaaaattttatgttctactttatcacccacatcaaaggtctttttcggcagcatctgcggtgtggtctgaccgttttggacgacatttcccacacattccagcaggctgtagtcaatatcctgtataaatgccgacgggcgcaccggaaagccttccgactttgccgcgtaactgcttagatacagccgtgtctttgcgcgggtcaccgccacgtaaaacagccgccgttcctcttccagttcatcttcattgcgcagacgcctgcttggaaactgcccgtctaccagtccgcagataaatacaatgtcaaattccaggccctttgccgtatgaatcgtcatgactttcacaacatttttttcatcgtcatcatcctgagccgtaaacaatgcaaaatgtgccagcagttcttccagcgaaagcttatcctgattttccgcttccattgcggcaatggctgttatcagttccgtcacattatccagccttcgctgttccacgtcctgctccagttcctcgcggtatccgaaatccaatacccggttaacaagctctttacatgaatacttatcatattctttgtgtaattccgatatatttttataataagtagcaagcacttctttttttacagtaccctgttcaatctgttcgccaagtgcctgaaacagtccaatttcgtgttctgcggcatattttttcaaatcttctatggatttcttgccgaaacccttgcgcggtctttttatcgtccataagaaatccaaatcattcggtgcataaaccatgcgcagataggcaagcaccgtgcggatttcctccgaatcataaaaccttgcgccgtttaaaatcttatacggaattttctttgcaagaaaggcttcctccagcgctcttgtctgtgaagccgcacgcacaagcaccgtgtggtctgcatattttttcccggttgaaaccgccgcatctatctgttctgcaatccataccgcttcgtctttttcatacggcagacagttatacaccggctttgcgccatgtggatttttggtatacatctgcttttccagacggttctggttcttttcaattaaagaatttgccgccgctacaatctccggcgtactgcggaagttgcggcttaacgaataatccacgacattttcataccgctcattaaaatgcaccatatattccacatcagacccgcgccagccgtaaatacactggtcatcatcgccaacaactgtcaggttgtgatattttccgcttaataaataaagtaaatattcctgatttttatttacgtcctgatattcatcacaaagcagatactgacagcggctctgccatttttcgagtgcctctttatactgcgtaagaatatagattgcaaactgtatgatatcctcaaaatccagcacataattatcgcgctgttttttcagataagaatagtacacctgataaaacaggtcctccgtgtgaccgattttcttttgcagggtctccctgccggtatctaacatcagcggaatataggctctgtcctgcttttcctcacagattttgtccgcatattcctttgccgtaaaatcttttaacgaaaatcccagttcatcggcgacttcacgaatcaaatccacctgcgctttcttatccagaatcacaaaagtcttcggataagaaagtcggtagatttcttcttttagaattaaattacaatatccatgaaaggttcccgcataacacgttgcaaagtcccctatcatttttttcagacggtacttcatttcattcgccgccttattggtaaatgtcatggcaacgatggacgacggctcgacatacagctccaatatcagatagacgattcgtttcgtcagtgcaaatgtctttcccgaacccggtaccgcacgcacgcgaatattgccttctgttgcttctataatctgctgttgttcctttgttgcctgtctttgtgacattttctacctcctgcgccgcttccactccgcagcgtcagcggttattattttacacatccaatcagttcatgaatgtcttcaatgttatttttcttcatataggcggcaatgccgtctacaatctcaacggtggctgtcggattgtggaaatttgccgtgccgacagctaccgcactcgcgcctgccatgataaattcaagggcatcttctgcggttgcgatacctcccatgccgatgattggcagacggactgcattggctacctgataaaccatgcggactgcgaccggttttactgccggaccggacataccgcctgttttattggcaactgcaaatgttctcctgttaatatcaatcttcatgcccgtaatcgtattaatcagtgaaaccgcatcggcgccacccgcttctactgcctttgccatttccgtaatatcggttacgtttgggcttaacttcataataaccgggtgctttgcgacctttttcactgccgccgtaatccgttctgccgaagccggattctgaccgaaagcaataccgccttctttgacatttgggcaggaaatattgatttcaagcatgtccaccggctgttcgcttaacttttccaccgcatcgacataatcttcctctgtttttccacagacattgacaataatctttgtatcatactgctttaaaaacggaatatctcttgaaataaacgtatccagtcccggattttgcagaccgattgcattaatcatgccgccgtaggtttctgcaatacgcggtgtcggattacccggccacggtacattggcaacgccctttgtcgttacggcaccgagcttattcaaatcaacgtattctgcatattccataccggaaccaaacgtgccggaagcggttgtaacaggattcttccattcaactcctgcaatatttacggataaattcattacagttctacctcctctgcgttaaataccggtccttctttgcagactcttttgttatgtaccttcgaatggtcgtctacctgtgtggacttgcatacacaggcaaggcacgcaccaattccgcatgccattttttcttctaaggacaggtaacattccagtccgttttcttttgcatactgcttaatagcacgaagcatcggtgtcggaccgcatgcaaataaaatgtcaccttcaattccgcatgcctttacggcatccaatacattgccctttgttccggcactgccgtcttctgttgccagatacactttaccgtatgcttcaaattcatcatttaaaaacaattcatcacggtaacccaatacaatgctcttttcacaatctaactgctttgccagctccaacatcggcggaatcccgataccgccgccaaacaggatcgctttgcgttcctttgatacctttgaaatgtcatagccgttgccaagcggtccctgtacttcaagggtctgtccggcgtgcatggttgcaaattcctgtgtgccttttccgattgcccggtatacaatgcgcagggtatcaccctcaatgccgcagatactgattgggcgcggaagaagccgcgaaccgtcgttagaatagacggacacgaactgtcccggctttgcttcctttgcaatattttttgttgaaaaacacatttcataaatgtccgttgcgatttcatctgcacgtacaatcgttactttttctctatatgccatttctgctcctcatttccgcctacttgtgtaatgcaccgttaatgtcggcaatcatatcgagtgccgcctgtctggaagcttctgcgaaatgctcctcaccgaattttgcgtactgttcctttgtataagccgcaataatgcctcttgaactgttgacaatcgcacctaagccgtcttcgttaaagaaatgtaccaaatcctctgccttaccgccctgtgcaccgtaacccggtactaaaatataagcctttggcataatcttacgcagggtcttgcccatttccggatacgttgcaccgacaacagctccgacatagctgtagtcatcacccatacattcactgccccactcggcaaccttttcacctaccagctcatagagcggtctgccgtcaattaaacggtcctgaaattcgccactggacggattggaagtcttaacaagaataaagatacccttcttttcttccttgcagacctttacaaatggattgatgccatctgaacccagatacggattcaccgttgcaaaatcttcgttaaatgcggaaagcttcttgcttccaacctgcacctttcccaagtgtgcaacggcatacgcttctgatgtcgaaccgatgtccccacgctttacgtcaccgataacgaccatgtcttttgacttacaatagtctacggtcttttggaataccttcatgccttcaatgccaaactgctcatacattgcaacctgtggcttgactgccggtacaatatcataaatattatctacaatcgccttgttaaactgccagattgcttctgccgcaccttctaatgtttcaccgtattccgcaaatgcggctttctttaaatgttccggtataaacttcatcatcgggtctaatccgactacaaccggtgcgttctgctttttaattttgtctactaacttgttaatcatttttgtcttcctctttctgccggtacaggcgtatttattatatgagttttggaacgtctttgtctactataatttcacagcccggcctgtatgaatatacaaccttgccgtctgacattgtatatctgactctgcccttaactgtctttccgttaaacggtgtattttttcccatggatgcaaacagggtgctgtcaatcacatattcttcatttgggtcgataatcgtaatatctgctgcacgtcccggaagcagtgttcctttgtcgctgttgataatctgcgcaggcttatagctcatgcgttctgccatctgaagcggtgttaaaacacccttgtccaccagctccgtaatcgtcaggctcacagaagtttcaagtcccgtaatgccaaatggtgcttcagcaaacggacgctctttttctgttctgtggtgcggtgcatggtctgttgaaatcacatccataaccccttcctttaagccttcctttaacgcttcgcggtctgccttagcacgcagtggcggattcattttgtagtttgcatcatcacctgtgatatcatcttccgtcagtgtaaaatggtgtggtgtaacctctgctgttacatctattccttcttcctttgcaagctttgtcatcttcacactgtccacggttgagcagtggcacagatgcagtcttgcgcctgtgttttttgcaagcaggatatctcttgccacaatgacatcttccaccgcattcataatgccataaagtccgagttctttggctctgttgccggcattcatcacacctcttgcaactaaatttttatcttcgcagtgtgcaaatacagggattccaacttccgcagccagacgcattgcctgtcttgccactctcgcattcataacagacttgccgtcttcgctgaccgcaaccgcaccgtttttgtacagattttcaaaatctgtgataaattctccgtcctgtcccgccgtaattgctgcaatcggaagaacatggatatctgttacttcctttgccttgtcaatcacatacttcaccatttccacgctgtctacaaccggcttggtattcggcatgacacaaacggttgtaaatccgcctcttgccgctgctctggctccggtacggattgtttccttatgttcaaatcccggctcccggaaatgtacatgcaggtcaatcagtcccggcatgacataaagaccttctgcctcaattacattttccgcatcggtactgatatgttctgcaacctctttaataataccgtcttccacaagaatatccctgatgccgtctgtgctgcttgctgggtctaacaccctgccacctctgataattgttctcatctctacctcatttctgcggcatgcgccgccctcgcattttaatttcttttattgttcttatatttatggttcttccttactgctccggcttccatgatgctaagtacttttgttcaaaatcttttgcagctgccggttttccaaaatagaatccctgtatataatgcacccccagacctctgagcagctcgtactgttcctgatgttccacgccttcaacgaccagcttcgtgccgatggtttttgacagttccacaatcagccgtacaaatgcctgtgcatattcatcttccagaatatcatcgataaatgtcttatccactttgattaaatccagcggaagctgcttgatataatttaacgaagaatatccggttccaaaatcgtccaatgcaatccgcggacctaattttttaagccccttgataatctcaaggacacggttcatatcgttaatagcaaaggactccgtgatttccagaataatattctttggatttacacccgtctttaaaaggattttttcaatattttttaccacatctttctggagcagctgaactaccgacaaattgacattgacatgaaagtcaagatagccgtgctcgttccagtatctgcactgactgcaggcttcttctaacacatagtccccgatggaggtaatcagtccaagatattctgcaagcggtacaaagtcgctcggtcccataaatccgagagatttgctgtcccatcgcaccagtgcttcacaggatgtgcatttttttgtcactgcatctactaccggctggtagtataccagaaactcttgaatctctgaggccactgcctgccgcatattattttcaatatccagccgcttgctgacattttcactcgatgtattgtcgtaaatgctgtactggttcttaccggctttctttgcctcatacatggcaatgtccgccgtctttataatatcgtccacttccgttccgtcgtccgggaaaaaggcaacacccatactcatcgtacagaagtattctgtttccatcagataccacggtttacggaacatcgcaataatatttttaacaatcttttcccagatgttaaaatactgcggcagaataatgatgacaaattcatcaccgcccattctgtaacagtgtccgcggattcccgcaattccctgcagtcctgcggcgacctactgtaacagtacatcgccgtactgatgtcccagtccgtcattgatatgtttaaaatcgtccaaatccataaacagcacggcacctttttctttgtcccgcaccgctttacggacaatgtggcgcagatcattttcacatttcatacggttatacagaccggtcaggaaatcgttatgtgcctgatattcgattttctgctggttctttttcttctgtgttacatcaactgccgtacagactactgccggattgccgtttaaccacctcaaatccgaaaagcggacctcgtaccacagcccggactgggcatcacagtattcctggatgctttttgtattttcacctgtaaaataaaatgtcacacaggtctgaatgacccgtttaatatcattgcagtttttcacaatatcattttcaaacagcacttctttcgtctgtctgtcatacaccataatacccgaatcaatacttccaagaatttcctttaatacctcataggaataggataaggaatctttgctgatacgttcctgcataatgctttgaattacatttgctacatccgatacaaaccgaagctgttctgcatccagttctacatcgtttgtactgtccgatacacacagatacatccggactttatcttccgcttttaccggagccgtcacgctcgttttgatatttgcatccgcaagtgccatacgcaccggctcctgtgccgtgtctgccctgtaatagcacagtttctcaccataaagcggactatctgccgccgcttttacctgccgttctacagttccctgcggcgcagtctgtgccgctgccgcctgcacttctgcagcttgtatcagatggtgtctgccgccataggaaagtaccggatacagacaggttctttcttcatcatactgcataacagtgacatccggcattttcagatactttgatacattttccaaaatgacataaatgacatctttaaaaggtccttcattttccagcatacgaacaatgttagacatgacctgacttttcaccttcattttacctcataccccaaaacttgtgttttgtactattataccttatttgcacaggtttggaaaccttcagttagaattttatttatttttcattgtattcattttgccggcatggtattatttgatatagacttaaagaacaaagtgtcctgcactttggaacggagaacattatggattatattaaatacgaaaccacactcaaggcaagtggcagagaatattctaagattgtattctggaaccgttttatcagaaatcccattgagctgattttaacatggcttcccgccgcgattacaattgtctgcattgcactcggctgcttttcttcttatcttaccgtcatttatgcagcatgctggtgctatcccatttatatttttggtttccagtttaaaagcagcgtgaattatcacttaaagaacagagatgcttccgaatccgcaccatgcacaattacactgatggaaagcggcatccttgctgaaatcccggaatttgaactgacctataattatagctgggacgattttacaaccatttatgataagtttggttattatatgttttttgaaaaagggaaaatgaccgtcatgctgcgtcaggcagatatgcctgaacaggaacgtcatgccgccgcagattttattaaaaagaatgtcaatcagaatatctgccgcgtgttgttttaatgacatcatagccgggagcttttaaccccaacatcattcaattaaaaataaataaaaccgcaggaacatttttgtatctgcacctgtcttaggacttgtgcttaccggaagttcctgcggtttttatttttcctgctttttgtttactgccttactgtttatcgtgcgagccagccaccgtctaccgctacagtgtagccatttacataatccgatgctttggaagccagccatacaactgcgccctgcatatcttccggtgttccccagcggcctgccggaattcttgaaagaatctcatcacttctgtcatcatcactgcgaagctgtgcggtattgttcgttgccatataacccggtgcaatcgcattgacattaatgttgtattttgcccattcattggcaagcgcctttgtcagccccataatggcactcttgcttgccgtataggaaggcacgcggattccgccctgataggaaagcatggaagccacattaataatcttgccgccgtcctgctgcttaatatactgctttgcaaatgcctggcttaagaaaaagacgaccttttcattaatatcaatgaccgtatcccagtctgcttctgtcacatcgacagcatcacagcgcttaataattcctgcattatttaccagaatatctactctgccgtatgcgtccaatgcaccggaaagtacggtatctactgctgcggttgttgacaaatctgccaatacctctgtaaagcttccgccaaatgcttcaatcttttctttcgtttccgcacaggaacgtcttccgacaccgacaacctttgcacctgcctcggcaagtgcgactgccattccctgtcccagtccggtattggcaccggtcacaactgcaacttttccatccagtttaaacaaatcaagaatcattcacattcctcctagttaaatccaatccacttattcattactttgtaacctgtctttgaaatccatctgccggattttcccggaagattgactgaaaaaccaagcatactataacgaagcattttataaacttccttatcctttgccttgacgtaattccacaattcctgctttttggcaagattttcaggtgtgcctgaaagaatcagaaagatcgatgatacttccatcataatacgcagataattgcgcatatacatacggcatttctgattgctgattttctgctctgtataaaaatctaccattctgcgtgtaacgcgcagctgctggtcaattcttgaaatcatgaccgtctcattgacagactggtcatccctgccgataaaatagcggtaaaaattcgtattgatataatacattttcttaacatacggcagcggttcaaatacaaaaatgttatccacataaaatgtatgttttggcagctgcaatccacattttttcagcaattccgtcttataaataaccgtatgcattaaaatgtactggtccagcttaaaatgtccgatatcattccatgtaaaaagagtttcttccggaaatacattgtcataatggatgactttcttacgctttgcacccactttttcatagacgtaatttgcaatgaccatatccggttcttctgccttgtcaaattttttgagcgttgccagtactctgcggtaactttttaaatccacccagtcatcactgtcaaccactttaaaatatttacccgttgcatgtgccagtcctgtattaactgcctgtccatgtccaccgttctcctgatgaaccgccttaacaatcgtcggatattttgctgcatattcatctgcaatttttgctgtttcatctttggtagaaccatcatctacaatgataacttctacgtcctcaccgcctgccagaacagactgaatacatttttccatatatgccgccgaattgtagcatggaatagcaaatgataataatttcataactttatacggatttccgtttcctccttctataaatcctatccctctaagcttctgacctgtacagcatatcgtccttttcttatctgcggccgcacaaaatcttagctttttcttttgatattcttatatattcctacattctgtccgggcattcaattgccaacagttctatacactgctctaatacggcttttgtcagacaaattaacgcaatatagcccttctgctttgcttcgtctgtttctgcaagaatcttggtatcgtgatagaatccgttaaatgcgttagatacttcataaataaactggcacagcttatgcggcgctttttctgtatagactgccgccataatttccgaaaactttgccagagaaagcatcaatgccttttccgttgcggagtccgccggattcatgctgagattttccagtgtctttccgctatcggtatatttgtttaaaatagatttaattcttacaattgtatataaaatatatggacctgtatttccttcaaatgatgcaaaacgttcaatatcaaatacatagtctttggatgcctgattggataaatccccgtactttaaggctgcaagtccaacaatctttgccgttgctcttgcttcttcttcatccattgtacggttttccatcatctttttatagactgcttcattgatatcggcaatcagatgttccagacgcatcacaccgcctgaacgtgtcttaaacggctttccatcttttccgttcattgttccgaaacctaaaaatgtcatttctgcctgtggatttacaatgcctgctttctttgccacacggaatacctgtgtaaaatgcagttcctgtcttttatcagccagataaatataagcatccggctgatacagcttttctctttccaccagcgttgccaaatcggaagttgcatacagtgcggcaccgtctgattttctgacaatacatggcggcagttctttggtatcgccttcttcctgaatatccacaaccatagcaccctgactttcgtaagccagtcccttgtcaatcatctcctgtaccatagacggaatatacggctgtgcatcgctttcccctttccacaaatcaaaggacacattcagattatcatagtttttctttaaatccgctttggaaactgccataatatgtttccagattgccgtacatgccttatccccgctctgcagctttaaggttgcattatgcgctctttccataaatgctgcatcttctttggattttgcactggctgccggatagatttcctccagctcggaaatggtaaacggtgcttctgccggatattcacctgtaaactgctcgtcaaaatacggaagttccggctttctgtcacgcagttcttcaataattaatcccatctgaagaccccaatcaccaagatgtacatcaccgattactttattgcccgcaaaacgctggattctctttacactctcaccaattaccgcagagcgcagatgtcctacgtgaagcggttttgccgcattggctccgccgtaatccacgatgaccgtctttggcttttcaggattttcataaccaaactgctttgcctgtgccatttcattgacatagtctgcaactgcctgtccgcttaaaataatattgataaatcccggtttaacgctttcgatacggtcaaacagcggatttttgtccaattttgcaacaacttcatctgcaatcataaaaggtgcttttttgtattcctttgccgctgccatcgcaccgttgcactgatattcgcacaaatccgggcggtttgataaagaaacttttgcatactttctatcataaccacattcggcaaatgcattctgtaactgttccgtaatcttttcaacaattgtattcatgactctctccaattctttttactatataaaagggctgcttcattaagaatctatgttcattaacgaaacagcacctcatcatacactaatatcggacttcttccaaaaacagtccataactttctgccggcagtgacatctgaacatcttttccatccagaatgtcccgtacattttccggcttttttagaccggttccaacatccagcagaattcctatcatcagccttgccatattatgcaaaaaatcatttgccgtaatacgcagctgcgcaataccgctttcatcacagctgatagtaatattcttaatttcccgttcggtagacttgctctttcttgctgtggtgaaagccttaaagtcatgctttccaagaaaataagcggctgctttattcattgcttcataatcgagcggatgaaatgtgtggtaactatactttctttcaaacacactggcaatagacttcgtatcaatccgatacagatacgttgtttcctttgcaagcagctgactgtgaaaacgttcatcaactgcttccactttcaacacggcaatgtcacgcggcagatatctgttcagataattccttaattccatgcagttctgtctggaattcagcttgaaattagccacctgtccataagcgtgaacgcccttttctgttctgcacccgcagaacagttctgcttcctcacctgtcatcttttttaaaatctctttaattttaaattccacagtattttccgaagcatctttgccaagacgctgccatccgtcaaaacgtccgccgtcatactgtatcaaaattctgtaattatacatactgcctcattctgccgcttatacggctttattattctcccataaccttttcgagtacagatacgattgcactgctctcaaacggcttctggataaaatcagccgcacctctctttaatgcttctacaatattggtcttctgtccggctgcggtaaccattacaatcttagctgccggattaatctttaaaatctcactgactgcatcaatcccatccagctttggcatggtaatatccattgtaacaatatccggtttaaattcctcatattttttcatgccatcttcgccgtcaactgcttctgctacaacttcgtatcccgcctctgtaagcatatttcttaaaaaacgtcttgatgttcttgagtcatctactattaatactgtaaccatactatttctccattcctccgcttttgcggttttttcatttctttacaaataggtttcctggctggcaagctccacattctcattgattgccataatcaagtcaaattgactgccttcgtaaccgatggttacgacataaaatcctttttcacttgtaatatgcacgttatcataaaataccggtggatataataccacatctatatcatcatcgcaaagtcttgttgcaaatgcaccattcgtacaattaatcagttcgcagactgcatcgtatgcatccatatcaaattcctgaaaatcttccattgcaaaatccgatgcaacctttaacaatacctcatcgcttccgataattccaaagaaaatatccatatcgccatccatcatctgactgccgataaaatccccttcatactcctcttttatcgtaatcttttccagtgtcatttcgtcaccaagataatgtttcaggctttttaatacacactttaactgtaaaatatactcctcctgacgcatctttacaaatgtagacaccattgcatcaatatccccatcttttaatacccgcagttccctgtctgtcagattgttgccaacgtggttgcgggcgatatacccgccaaacatcatatccttcattgctatacctctcttaacccatccatcattatactgctcgtacaatcccctatgaatatcagcacaattatttattacattatacaacacataaactatattaatcaagcagtttcccaataaaatgatatcataccatattcgggcagcactggcattctccgctctttttctgttactgtgcctgtaataatattttccttgaacataacaacagccgcccggtcaacacgttaccggacggctgtcttgttatgattatttgttttttacttatcctctacactgtagtttggagcttcctttgtgatatgaatatcatgtggatgactctctcttaatgccgcagatgacatcttgataaactgtgctgtttcctgtaatgtcggaatatcctgcgcgccacagtatcccataccggaacgaagaccacccattaactggaagatggtatcttctacaagtcccttatatgctacacggccttcaacaccttccggtaccagcttcttagcgccggtctggaagtatctgtccttactgccgttttccatggcagcgatagaacccatgcctctgtatactttatattttcttccctggaataattcaaatgttcctgggctttcgtcacagcctgcaagcagacttccgagcatacatacgttgccgcctgctgcgattgcttttacgatatctccggagtacttgataccaccatcggcgataaccggaataccgtacttcttcgcttcttcgtaagcactcataactgctgttacctgtggtacaccgatacctgcaacaactcgtgttgtacagatagaacccggtccgataccaaccttaaccgcatctacgcctgcttcgcaaagagcctttgcagctgcacctgttgcaatgtttccggcaattacctgaaggtccggatatgcagccttaatattttgtaatgtagtgataatgttctttgaatgaccgtgtgcggaatcgattacgatacagtcaacctttgcctttacaagggcttccacacgctccataacgtttgccgtaataccgacagcagcgccgcagagcagtcttccctgtgcatcatgggcagataacggatatttaatctgcttttcgatatccttaattgtaatcagaccctttaacttaaattcgctgtctacaatcggaagtttttcttttcttgccttgcctaaaatcttctttgcttcgtctaatgtaatgccaaccggtgctgtaatcagattctcgcttgtcatacattccttaatcggtcttttataatcttcttcaaacttcagatctctgttggtgatgatacccaccagcttgccatcatcatctgtaatcggcacacctgaaattctaaatttacccattagattatttgcatcttcgagtgtattgtccggatgcagataaaatgggtccgtgataacgccattttccgaacgctttaccttatccacttcttctgcctgctgttctacagacatattcttatgaataataccaataccgccctgtcttgccatggcaattgccattctgtgctctgtaacagtatccattcccgcgctcatcaatggaatgtttaacttaatgttctttgtcaactgtgttgacagattaatcatattcggcgttacttctgaatactgtggaactaataacacgtcatcaaatgtaatgccttcgccaatgattgtacccatttctactgtatcctctctttctttcattttaatgtgttttgtgtattatttgacaatataacaaaatacgctgataatgtcaaacacttttttctgtacattcacttttttattcatccatgcggtctgcggctttcggtacacccgcccgaagtgcctcaagcatcttttcatccggttctaagatgatgcgcaccatttcattgcttgcatccattgtatataaaacaaccgtcttttcgggtgctgtattggaagtgtattctgaggtccgcagttttttgtgttccattccaagcgctgcctggcaggtcggttttgcaagcatggatgcttttgcaatattgtataccccacagcgttttctcatggactgtgacataattttatcaattgtgagctcaccgtccactaatgaatattcatactctgcattgtaatatttaaacaatatcaccgtaaataccacaagtaccgctgtgagcagaattcccagtgcataagttgacggaatcgttgtgactgcaagaatacatgcaagaatcataacggtcttaaatactgccgcctgctttggggctttcgtttttaaaatctgttctgttgtaatattatacataaattctccattctgccggagtttaaaccagcctgtctgttactatcataatcctttttgtactaaaaagcaataaaaaccggcagatttgacaaaatctgtctcctctgccggtttcaatctgctgcccgttttaccgtccagccaaaaaatatttatttttatgcattttaacagcaggaattacatcattcccatgccgcccgcaccgcctgccggcattgccggaacatcttctttgattgttgcaacaacggattctgttgtaagcagtgtagatgcaacacttgtagcattctgtaatgcacttcttgtaacctttgcagggtctaagataccggcatcaatcatgttgacatattcgccgtttaatgcatcgaaacctgttcctacttcagattctcttaccttattaataataacagaaccttccagacctgcatttgctgaaatgtggtataacggagcttcgagtgcctttaagataatctctgcgcctgtcttttcatcacctatcagtgtttctgtcagtttcttcacttccttagaagcatgaatataagcagaaccaccgccagaaataacgccttcttctacggctgctcttgttgcatttaaagcatcttccatacgaagctttgcttccttcatttctgtttctgttgccgcacctactctgataacagctacgccgcctgccagctttgcaagtctttcctgtaacttttctctgtcgaaatcagatgttgtttcgtcaatctgtgcacggatctgtgcaactcttgcttcgattgcagacttttcgccttcaccgtcaacaataacagtattttccttctgaaccttaacagactttgcacggccgagcatatccattgtagcatcctttaattcaagtcctaattcttctgaaataacctgaccgcctgtaaggattgcaatatcctttaacatttcttttcttctgtcgccgtagcccggagccttgacagcaacaacattgaatgtacctcttaacttgttgacgattaatgttgtaagtgcttcaccttcaacatcttcagcgataattaacagctttgcaccgctttgtacaatctgctctaagagcggaaggatttcctgaatgttagaaatcttcttgtctgtgattaaaatgtacggattatcaagaactgcttccatcttatccatatctgttgccatataagctgaaatatatcctctgtcaaactgcataccttctacaaggtcaagttctgtcttcatggtcttagattcttcgattgtgataacaccgtcgttagaaaccttttccattgcatctgctaccatctgtccgacttctgcatcacctgctgaaatagaagcaacctttgcaatctgatccttgcctgttaccttttcgctcatctttgcaatcgcttctacagcacactccgttgccttcttcatgcctcgtcttaacacgattggattagcgcctgctgcaagattcttcatacctgcatttaccattgcctgtgcaagaacggttgctgttgttgtaccatcacctgctacatcatttgtctttgtagcaacttcctttacaagctgtgcgcccatgttttcaaatttgtcttccagttcgatgtcctttgcaattgtaacaccgtcgtttgtgattaacggagcaccgtaagacttatccagaacaacatttcttcctttcggtcctaatgttacacgtactgtatttgctaacttatttacaccttcttcaagagcttttcttgcatcaatgccatatttaatttcctttgccatgatatttgacctccgatttctattttatactgtatcaaaactgcttttaccagatttttctattccataattgcaaggatatcagactgttttacgatgatatattcctcgccatctaattccacttctgttcctgaatatttagaataaataactttatcgcctgtcttaacctgcattgttacttccttgccgtctacaactccaccaggaccaactgcaataacttctgcctgctgtggtttttcctttgactgacccggtaatacaatgcctgattttgtcgtttcttctgcctttaacgctttaattacaactctgtctcccaatggtactaacttcatattatcctccattccgccgccggtaaggctgcctttgcgccgccccgaacttgtatacgacagctgctattattttccttgttagcactcatttaatttgagtgctaatttcaatatcattaaaatatcactctgccttttgtttgtcaacagataattggaaatatcttttgtttttaataattagattatacttttttaattttttgattttgcgtgccgatacgcactgtttttccgtaaaaaaacagatactgctgggcatagccgccgtagcttccaaaacgtgtctttgcaaatgccgcaattttttctttgtccgtttcctttcccgaaaaataaagctgctccataatccgcttaatccacacatccaccggaaatgcatcgcgcttatccagcccgaacagcatacagcagtttgcaaccttactgccgaccccttttatctttgtcagcattttctcacattctgcggtatccgccgcttttaatgcagcctccgatatctgtccgtctgccgttttctgcaccgcatctacaatatacggcgctcggaagcccgttttgcagtcccgcaggtcttcttccgtgacattgcacatctggctgaccgttgggaaggcaaagaatctcattccgtttatttcacccagatcatccccgaaacgctccgaaagcgtttccacaatcttcttaatatgcggaatctgcttattctgcgatataataaaggaaattaaagtttcaaaaaattcctgctgtaaaatatgtacgccctgcatggtttccactgcttcctttaacgtatcgtccgtctgtaaaagcgccgcctttatcctgccgtagtccctgccaaagtcaaaataatcccgccatatcatttcgtaatcctgcatcgtcgtatcaaacaaaattacgctgtctttttcctgacgtatacgtaacagtctatgaaatgcacagactgcatattcctgttcggcgagttttttaaaatgaaaacactgcccacattctagtgtctgcgcaagatcaaaatccctcacttctgtaagtacaacatttccctcatcataagaaatctgcattgcttgtcctttctgctataaaattgaattatcctttgtcatggcgcgcgtcagtgaatccttcgcatttttccacggctcgtctgcatatttatggtcaaatttattgataaaccatgccacatcatcacgcacacgcttcatattttccagatacagtcggtctgtatccacacggaagttttctgccgtactgcccgaaaacttctgtgcaccgcgctcgattaacatgccgtaatgcgctgtacaaaaacccttgctgtgcaggtatttctctttaaatgctgcatcggactgatataaatgcagcaccgtatccacataccgctcaaatgtattttgtatacggttacacacaaagcaggactgttccagttctttaatataatcacatgctgacggtgtttctgcctttttaaacagcgtctttgcctttaccggctgttcatttcttttttcaatctcgttaatcaccttgtccatatgtgtcttcatcaccagtgcaaatcccagacggttttctacagcataaatctttttcaaatgcttccggcagaatcccattttgtctgtttcggcacggatatcgtcttc

SEQ ID NO: 975 - DNA, 51133 bp, unidentified
  source 1..51133: mol_type = unassigned DNA
ctactcttgttccttatgtcttttaattgctttttgaatttcctgaataatatatttagctccaaccgatgcactactgccaagattatacacatattctttaacaaatcggtctatgctgtccttatatgtatcagaagctgccagcatctttgctgctgtatcagctgtcttatcaatttcatcaagcttaagtacacgcccgatttcatatctcatccatatattaagtggctcaattccaatctttttgtattcaggattcattatcttcattggtgtatcaatgaaaagaaccggtttacatgtagtataagcatattcatatgctatacctgaccagtctgtaatcataagatctgcctcaaaaacagtactgtttgatgaaaaatcagtctgaatctctatatctgtatcatccttatatctttctttaagtccttccatcttctcaggcatatgtcttacatgctgtgggtgtggtcggactgtaatcttataaccatgtcccttaagattatcaagtatgtcctcaagacagctgtctacaatattatctttctgccatgatggagcaataagtattgacttaatatcattttccttctttggcatcttttcataatcctcacgcatctcatcaagcaatgaatatccccactcaacaagctccttcttaggaagattatacacttcttcagttttttctatttcttctttctgaatctttcctgtacataatacagaatcatagtgatccattgaaccggttcgcattgtcatattaaggctgtccatgccatgaggaacataaacataattaatatcttttctgatataacttctcttaatgtgataattctcaatatcaggcatagtcataacaacaacgtctgcatccatcttcatcataagtgttataagtttcttttcccctatataataaggtttaatcttactttctttttctgcaattctgaatatctgatcatcaggatcacttgttacataatggattgtaatattcgtattattaagtatgtattcaattatccctttaaaatacttatagaaacctgagccctctgaatagaagacaagatgtttattaacaacagagaaaaactttttataatcagctttttctctcttaatatcttctttgtttctttttccctttttcgtaccaagagcttcaatctctgcaagttctttcttagtttcctcaagagcctcataatcaacgtaattcttaggattaatcgcccagttaagaagatataactgaagaattgcaaatatgttgctggcagtccagtaaagagctactcctgcatatacaaagcatcctaaatataacgacagacctactgaaaatatcatcataccatacttattaagcttactctgttctgcctgtaatacgttacttgcattctgtgcaacacataaaagccatgctgagacacctgctataattggtgttattattgataatccccactgttttgtagtaatccatgtaaggtcatagccacagaacttcatgttcgcaacaccttcattaattccgtctttgataactgcaacaactccaagcagaagtattatctgtataataagaggtataagtgatgccagtggattatatttttcttttttataaagcttagactgttcctctgctatctcatccttatccccataatgcttaataagaatcctgttaatatcaggctgcatcttaaccattttaattgaattcttctgtacccagattgatacaggtaagagaacaatcttacttatcagagtgaataatataattgccaatccataatcatgcagtaatttgtaacaaaaattcattacataacctaaggctgtcgataatatttccataaataactcctcttttgaagattttattgattgtgtcagagtcatccaatataataattaatcatatcacttattatcaattattgaaaggtgtttttacatatccgatatactttttttacatacccaatataaattttacatgttttgcacacaaaaaaaggacattgttcttacataatacagtgtccttttaatattatttatttcaaaaggtactcagcatatttaactgccatgtctcgccagttctccaatgcctctcccatgtctgcaccacatgattccctgtacatagcccatacaaaccagtagtacgcaataatagcaacatatgccatataatgaaatcttgttgtctcattataatcttcctgaaggtattcctttatgaattcctcagccttatcaaaatcatacatggcatcaaccacataatatccaacatcaattcccgggtcagaatatccagaatactcccagtcaataagtataacacttccatctggtcttatcatccagtttggcttatatgtatcgccatgacagaaacatttttcaactccatctgctagagtcatcttatacaactgtcctatgttgttcttaagtccttcatattgaacgaagcacacaggatctttcttctcaagaagcttctccatatcaagtgcatcttcccaaggtttcattccataatcggctgttatatctgccttatgcagctttcttaaaacagccaatatcttctttgagtcctcaaaagaattataatcaggttctctgaattctggaatgaatatggatatcttccagccctcattaacatctgcatatatgtatgtaggatctacaccagcttctttggctttaataagtgattttttttcatttcttctattgattatactttctgttccatcgcctggatgtctgtatatataatcaattccgtcaatcttgaatataaaggatgtgttggtcattccttcgcttacatttctgaaatcaattatatcctcctcatcacatctgaatacaagcttgatatttcttattatctcactgtgcgtatgtccaagatactgtgaatcaaactttctaagctcatcaaaataatcaaattcaaatatattacccggaagatattccttaaaataaatatcaggcatttcatccagcttatcctttacaagaatctcccaatagcagttattatatattccagattcccggacagcctcaacctgattaataaatgcttctgagaattcttttctccagaatgaatgtcccataagaacatagccatcaatcttattatccttagcaattcttgttatctttccaaatccatcagttcttgcatatacttcatccgttgtttcctttccataataacctgaataaaatgtatgatattcaaactgattaaacggattctctatataataactgtcacttacgcatatgtacgtattcttaagttcttttcttgcaagataaagactttcaatattattctttatattaaatgaatcattaataatgaactttacaccatacttgtcttcaagatagtaaaacatctccttcttatagccaagtacaactgtaatattcttaataccagcatcctgaagctgctttatctgtctctcaataagacgttcaccctttacttcaaaaagcccctttggctgttcgagtgataaaggaataaatcgtgtagatgcgccagctgcaagaataacggcattattaaccctgtatggttcaagcgcctctaatccagtctttgtaatactaccagactctttttcaatataccctgtttttacaagtttattataaatatctgtgtcattaagagcttttgtcgcctcaacatcataagtacagccggctcttccaatgcttccattatacaaactgttcaatacataaaactcttcttttctcattatacatatctccttatgccatgtttcctgagaacattcctcgaatcactgctttgattacattttctctacatgattcatactttttccccgaaagtataagtccctctaccttaatgttctttatatccttcttgtcaactgaatacaaatcatctgaaagaaccaccatatcggcaatctttcctgcctcaaggcttcctctttctttctcgtcaaatgttacataatatccattatacgtacacatccttagtgcttcctgaaccgatactgcctgagactgattcatattattaacagctttgtcaatccatacgataggatccggtgatgtacatggagcatcagaaccgcacgaaacaactattccattctcattaaatgttctgagcggattaagtctttctgctctttctttacccataatacttttaagatactcatcaggttcctgtttccagttaatgaaagcactctgtacaggcatctgtatattatagtccctgcatatcttaattccctcttcagttggaagacagtcatgtataattccatgtctgtgatcttttcttggataatcgtcaagtgccgccttaagtgccctgcatgcctggtcaaatgctttatccccaatcgcatgcatctctatctgcagtccggctctgttagccttcttgcagaaatcaataaccttttcatcatcataataaagtactccgtcaccgcctaaagaatcaatatatggttcattcatagctgcatcgtgtgaaccgaagcatccgtcaagcgcacattcaaaacacccgcctattcttggcagttttctctttaatgcgacatcaacattcattgactgtgggaatacccttacctgaaatccattagttaaggattttgcaaatattttttcaaatgtaatatcaagattgcctgtaaaacccacaccacttacagtatgaatacagccaattccatgagacgcctgaaaatcaatggcactctgcatattcttaaacagttcaataatagaaagtgaattggtaatgtaattagaacattcaaagaatgcctcctgattcatctcacctgtatcttcgtgataacctctcaactcacttactttccccttcagcttatcaagaagcttgctgttaattatgcacgcatgtccatcatatttgacaaccatgatttccttatcaggacataccttatctaattcttccctgcttataagtcttccttctttaactgaatatggtgacgcaccaaatgctataagtgtttttttattaccgcttgactgcacgaattctttaaccatctgtgcaatctcttcattggactctgcatccataacattaagtcctgcgtgaaatgtagaaaatgatgccatatgctgatgtgtatctacgaatgccggaaccagcaccttctttccaagttcaactgtctgcacattcttatactgttctggcagttcattaccaacatacacaattcttcctttatcctcaacgagataaccggctactgtatcattactgtcaactgtaagaacctttcccttataacatatcatagacattcaccttccctttatatctgcatttactgttcctgtcccggataatccttataagaagaatctaactgtaccagctcataaaaattatctatctccataatatctgatttctcacaaggtcttacctctaccgcatatctttccttgcgaagcacaagtggaataaactcccagaaataatcattgccctccggctcttcattatatacctgtgcaaagtcttctcttaatcttgcactgtcttcctttgtccagtaagatattccataataattaaagcaatatgtattacccttctgataatctgttatatgtccattatcaagcttaaaactccagtcatcagtctccaacgaataagagccaaggatattgctgcagtactgatactttgtgataatagccggattagatatatacaggtccgcttcacataaatagcactggtcaatatgttctaatgctgccattgctgatgatatattattggttttatcatatatatcgttatcaataagattgataaatggatacttctccagaatctcatcaaatttttctttcttataaccccttacaagagttatatccttaattcctacagaaacaagtgcatcaagtaatgtatctataattcttactccattaacagcaaccattggctttggtctgtctaatgtaacaggaaccattcttgaaccaaatcctgctgccataataaccgctctctttacccggtaaggctcaagtgcctccagacctctttcagtaatctccatctgatcttcacatcttttaataagagcttcattttctaactcatccagagctttagatatagctgttcctgaaatctttaatgtatctgaaagagttctcatcggatactctttcttaccattcttttcaatatatgtaagtacttcaaactgataacgattcatatttcctccttacagcaccattggaattatgtagattccaagtgcaatgcatgtaacaattattgtgcataccttccatatagtgtactgtctgtccattctggctttagtctgctcatccggctcttctataacaccaatctcttcctcgattgtcggcataacacattcttttctgtgagaatatgcaaaataaaatattacacataatactgttatgattcctgatgtaataagtgctgccttatccgcaaatattaacatgaagcaatacacaacaattgtaaatatacatccaacaactccaagaggagccttataaggtctcttcatatcaggatatttcttcttaagccccatatatgaaagacagcctatcatataacatatagcaagtgatataagcgataccgatgctatgtaattaattgaacctgttgcaataagtataaaattgataacaccaaccacaattacagcaacatatggtgtcttgaacttcggatgaatctttccaagaaattttggtaatgcgccatcttctgccattgtataaatgtatcttgcaggtgcagcaattcccggattaatagtagataaatctccaccaaatgcaataccgatacataaaagtataataggaaatccaacaagtccgactgccttaagtccttctgcatatggagcatctgccgctgcaagaattccataaaactccttaggtacaagacctacaagaaaccactggaataatgcgttaagtgcaaataccataaataccgaaatctttaatgctcttggaagtgtatactgtggatacttagtctcagctcccatagatacacatgtctcaaatcctgtatagcaccaccatacaagaccaaatatatacatcatctcattaaatggaggcaatgagttcattgctattccaccaaaatattcaacatgaaccttaggtatcatataaaggaaccagcacactgaacagccccagaagaaaaacataaatgctgtctgtgccttacctgactgctcaatacctctgaaattaagaataaggaaaactgcaacaaggataatagctataattcttgaatcaagcttaacgatgcttattccaagctgttccataagaatcttaaaataattggcaaatgcaagcgtctcacctgcaccaatagctacaacagatactatataatgccatcctgccatattagcccatactctgttaagtcctctcttggcataattatatgttccacccgcacaaggaagtgctgcagacatctctccatatataagacatggccatatagatataagaagtgcaacaaatgtaaaccctattatccatgagcctacacttcctatctgtgctgaaccacaggtaaaaagtcctacacctacaacggttccaattgtcatactaattgattctttaagccctaaagcacgaaccagctgattcttctcattcataaatatcccctctcacagtttattcgttcggtcatatttttgtccattgcgtgaacagaatggattatagcagataataaactaaattaccagtataaaagtaagcagctataaaccttccatggctatagctgctgcttcatcattaattattaatattcttcatctgctgctcatctttaattacagatatctgtggatttacagcgtccccttctattctgaacaccgaataatctctgtttttaagatattcatctgccgggtacataccttttgacacatcccatggtgctacatgatatcttgactgagaaacaccagccatatcaaaaagcgtatttccataattactgttctgtccaagtgctgccttgccaaaagtagcatacagattcttaaatgttacagaatctgaattaacctgcattacatcattatgagtatcagccaatttcacaaatacagcaggacgttcatacaatccatatccgccgtggtcggctgtaattataaccgtgctgttatcatacacacctttatccttcatctgctgcatatatccattaatatatctgaacacaccctgtatctgcttatcaagagaagtctctgtttcccccacatctacacactgttcattcatctcataaggtgcatgtgcccctaccatatgatacagtgtaaatgttttatttccagcatcaactgttataccgccattattcttaaaatcagcatacaactgtgaatcatccagttcatattgaataatattgttattctctggagcctgacatgctgcaaaatcatcaccataaaaccagaaatactgttttataatctgtggaaatgcataaaatgccgacattttatatatattcttaaagaattgaactttgtctgatattctgtatttctgtccacctgcagtattggctactgcctcctgattaactccattaagatactcacttgaagtatacaacttaacatcatatccgttatctgacatatcctgaataagagtaccttcttcatatgctttctttctgtaatcagccagagaatgtgttgtatcatactgataacctgtaagcataagtggaactcctagagctgttggtgcacctccgcctatcatattatcaaaataagtaaaatcttttaattcttcacagtatctgtcgataacataattctgtgcgtcctcattatccagtgtatccacaatgaataccactacattgccctgcgaagataacgcaaactcatcattcttagtaactacatatgaataatcaacacttctttttgaagatacaataagaaccacaagtgtcacaacctgtatgcttgaaagaaacaggctgccccactttattatatttgtcattatatctttcttaaagcatacaataactggcggaacaacaataagtactatccatacaactgtacttataattccattaaccttaaactggctccactgaatctgccttccattaaggactccgaaatcagggttaaggaaatttccctgcacataagcagcaagtgcaccgccaaatatgaccgctgcgtatatgttacatatcttctttggcacaatcagacctatcagtataacaactgctgccgtaattaacgacgctgccataagaagcggtataagtgccgcgaatcccactgcaaattgatcaatattgccaagaaataaagatgatggcataaatatacagaatgttacaataagaaatatcaattgaggataaatcgttattaatttatcttttatcttcttcatagtaatctccctgttagttagctgctgctttcaatgaattaagctgatatattctccatccgaattcatcatataatattgaataattgtaatatttctcaaggaccttatcaaaatcatcattataagttcttgatgcaatatatttaacaccaatcttctcggcatctttatagttcagattcaactgtaaaagatcctgctgaacaagttcctcattagtatcctcttctgtaagtgtaagtaacatatgtgcaaatctgttataacagtattcattctctttctgtggatcaagaatattccataaatcccagttaggaacattattacatgtattaattgtcggagcaccacaggcagcaagatacattgattctacccatgaatcaagcattacccatttaccatctttatcttcacttgtaatctcgcatactttcttggcaagtggtttagaatatatagcgtctgttcctacattaactgtaagtgaccatattcctgataagaacacaatacccgcaagcgataacagtgccatattcttaagcctgtcatgctcttttacacagaatacaacaatagttattactgtaaacacaattgccagcgctattattgcatactgtaacattccaccagactcagttatatcatatacagttcttgcttctttccagctgtaataacagcttataagcattggaaccacaacaataacaggattgactttatatctgttttccctgcatacatatatacatcttataagtaatataacctgtaaaagtcctaacaggtctgctgctctttcttccggtacataactgaataatgtgagcctggcaacaatcaatgggaagccaactgtacaatatattgtatatacacatgacaatccaagcatgatatcaagaagaatatccttacccttctgtttaataatgcagtacactgccattaccattggcaatgggaacaatgttaccatcattgagaactcactattattaagagttgccttgaatggatagaatattgtagcaacatattcaaacatcttatataaagaatatccaccagttgaaactcttgaacccggatagattgtattcattatctctgttacatatgtgcttctgtccttgaggtacacaataacaattgatgccataaacaacattgatgctgcgaatacaagccattccttaagcttgattttcttgaaattatcccatgaacttacaaccatccatactacaattccaaaataaacatatcctgaaggtacctggaacgccggatatagtattgttatatattcagcgccaagtatggcaatacacgggctgagcaccatcctctgccatgtcttctctgcatttataaagtaatatatacatacaagtgctgtcagtccgcaggacagatactcaacattcatccaccacatttcgtatccggagaaggctaccacaacgcctccggttactgccagtactttattctttcctgctataatgtaaaagaactgtattgacataacaataagtaatataaatgggaaacaccattctaccgacatacctatgctgtctccaaaaaggtaatagccccatgtttgcggtttagccagtgctgaatatgacttatacaatccagtctgtgctatattttctgtctgcttccccataattatataattatatttaccataatcagtatacttggctgtaagatatcttggtgttgaaacagcccactcatcacttcttatagaatgtgtctctccataaacaggcgttacaaactcacttccctgaccaggctgtacataattatcaaacattcctatagatgaaaaattcactctcataataacaagaatcagaaatattccgacagcaatatagaatcttttatcaaatatgaattcacacattttctttggtccgacaataattaatccgcatacaagcataagaatcagcgtcataaataccattcttactgcaaacacaccataattatcagtatggtggtaattccttaaaactgcataacaaagtacaccattctgtttctctccgttaatgctgtactgcactgatgtatctgttatattctgattatctgtccacaatgtaaacttctttccattcgctgatgtatctgtcgatactttaagtgtataagtttttccacctgatataacattttcctcagcaaaattagagaactggttatcattgatattgactccgctcaccttctggtggaatacaacttcacctgttgtcttatctacaagttctacagttatcttagagaaattccttatggcattagtgctgaaataaagcgctattccattgaattccccatcaatatatatatcctgggttatctccattcctttctctaaaccggcagtctcctgtcttgctgcaaatcctgaatcatacatatctgccactttatcattagtaacattatatatgtgtactcctcttaatacgaacaatactgccacaacaacaagaagcaatatcttaatgtattttgatttattcttcatgtgttttaatctcctaacaattttaatcgttttattatatcacgcaattataaatacatacaagtcctttaccttgtcttaacttttcaattcatgtataattcagtaaatacatatattaatggaggattgtcttgaatttcaatactaagaattataattacaattttattagatttattgcagctttaatggttattatatcccactcatttgcattatcactcggtgcttcatcacagcattatatagatagccatcaccttaatcttattaatatcaacacatggggattccttgctgttgcagttttcttctttggttcaggtttctatattgcgaaatcatgtgagcgcaatgaaagctttctggttttcttattaaagagactgtttaaactgcttccgatgcttatacttgttgtacttatatctatattcattataggacctgtattcacaacactgcctcttaaagattatttttccaatatacttacatggaaatatcttttgaacggaatactgattttacagcataacctgcctggtgtatttaccaataacgtatatatgcctactgtgaatggcgctttatggacacttcctgttgaattcttatgttatctgttctgctacattttttataaaatctttaagaacaaagataatattgtaaaccgtataatgcttgttttatcagttattgttatattaggtgctttcctgttacagagccacatatcatctctttatgatgctttatgtccggctatttcattctggcttggtatccagtactggattaacagagaacaccttcttaatattaagaaacctcaggttttattcatagcttcgattattttatttgttcttgtatttccggttaagagtctttctgcacttgccgtatggatatgtgttccttactttatgttctatgtaatgttcatcagtaagcatcagcatttccaaaaagcggaaatattaggtgactgttcttactgcatgtaccttataggattccctatacaacagagtattgtatatgtgatgggaggcggtccaatcaatccatttatcaacattattattgcgataattatagatatagcaattgcccttcccatgcatatctttatagaacgcagagtcgagaaattaactaaaaaaacattaaaaaagaagtaagaaaaatggttcagacatcaatcaatgtctgaaccatttttcttattattataataactattcaaagcaatctcctgtgccatctttctgactctttctgaatttcttgaaagtgacattgtaagtgagaatataacaagtataataaagacaaaccctaaaaagaacaacatattaatctcattatatattcccagtgccttagatataacattaagaagattaggtattaacgtaattataaatatcccaagctccagaaaaagccatgaaagtgcatattttaattccagtttgttcttcttgataagacctaatatctttaacagtcctaatataagaacaacaattataacgcatttaattcttatactcatctatgcttatctcctctgaaattctcaaacaatattgccagtgtaaccttaaccatataatatactgatttcttaagtgttattgatgagcttccgccctgtctttctctcatgacaactggaatctcagccaccttgaaacctttctttaatattgccacaactgtttccggctctggataatccttaggatacttcttggcaaactgtactattgtacgtcttcctataagtcttaatcctgatgtagggtctgttatcttctgacctgtacataactttatcaagccagtgaaatagttaattccaattcgtcttgccttagatgactggaatccctgtttttctatgaatcttgaacctataaccatatcaaggtcattcttttcaagataatcagccatctctccaaggaatttcgcatcatgctgtccatcaccatctacctgtacagcaatatcatatccatatctttctgcatacagatatcctgtctgaacagctccgcctattcccagattaactggcagattaacaatattaaatccattatcttcacatatctgtcgtgtattatcagttgagcagtcgttgataactacataatcaaatgatggtgcattctctataatatctctgactgtcttctctatactttcgctctcgttatatgctggaattattataagttttttcatattttctccataattgtccatgctttaaatatcaatatctttcagctcctcatcaaatggtccgaactccagaacctcaggtacatgattctttctgctctctactggtggcatcttcatataatcgccaaacattctcttaagaaatacatcattattcttagggactttaaccattatatcttcaaatggcttttcaaccaatgggaacaggtcatctaactttatagcctgctttaaaggatccatctcaccaaagaaacatgcaacccatcttgtcttctcattgttatacttaagtgcgctcttcatataacgtctgttgatgaattttcttgagaaatgtgtccatgtaagtaatctgttcattactatacacattgcacttacaacttttctcttccatccatgcatgaaaagcacaggtttcttgaattctcttaatattcttaacttgctccagaagaatactgatgatctctgtcttcttctcttcttggcatcatcaggaacattatcataaggataaagcgcaatatcaattcccataggaaccttagcatccttgaatacatatggtatattcttagttccaattcttgctatctctgcattatagaaaggaaatgtttcctgtgaatctatatcaagtactacatacttatctgtgtatttctctctatatatcttcagaaccttctcataatcatctctgagcattccgatatctatatcatcatcccaaggaataaatcctttatgtctctcaactccgattgcacatcctgcaaacaggaaatatgaaagtccgttctcatcacatattttaataaaatctttaaacacctctaattctgcaagctgtaactttctcaggacctttggatcatactgttcattctggctcattgtctttttctatcctttctaatctggtataagatatatcccatcaataatacgcctaataacacaacaagtatcagatagccgagtgcagctccgttaagaccaagtctgcctgtaatcggatccataataatcagcgcaactccgcatacaataagatacagaatagtcatgtatttctgcttacgcattatggcaagtacataatagaatattatattgaccgcattaacgcctccacataacagaagcagaagcagtgtcatcttgtaatccttaagattaacaccataaagccatgacagaaccggtattcccagtatatatgccacgacctcacatataagtgtaaatcctgctattatagcaaacatcctgaatattatgtgccagaaattcttatacttcttctcataataattaacagccattgatgtctgcatcggcttaaatattataccactaaacagattaattaccatattaggcatgaataccgccgtataatacagctgtgctgcatcacctaacattctgtcaacagataatttcgatgaattgataatatagttacttaaaaatgtgcttatagcaagaggcagacacactttaaaaagtacgaaaactcttctgtaatccctgacaatacatatcttaaccctgcctgctgcaacagatgcatcaagacacagaattataagcaatgcaactacattcatacatatcagagagaatatcagatttcttgttataattactgttacaacaagaaccagtatactgaagaatatcctgtaaaactctgatttaccggacatatctattctttcctctttctggaattcaccttcaaatgtatcagctaccgaatcaagtatcttatagatacatacaagcaatataacagtaactttctccggactgtagccgttaaatacaacgtatactatgcttgccagaaatgttataagacacatcataagtcttaaagtgaaataatatccaaaaggatactcattcttaacatcagtaacctgatatgttcttatttcgaaataggctattgtaacaagccactgtgcaattgaaagaccaatcgagaacattcccgctttagcctcccctaagaaacggcttataacaattgtcataacaagcgtggcaagtgcgaaacatgctgttcccattgtaaaccagatatatttgtacttatcttctggtgtcttatccacacccattattcttgaaataatattcatatatacctcttagtctttaaattccaatttatatgggtaatgattctttctcttttcaactggaggaagctgcatataatctccatacatatttcttaacttctcatcttcattggctggaagaggcatcttaatatcttcaaaatcatacatctgtaatggatatatctcatcctttaacattatatgataatatggatctgtatcaaataagaatgccattctcttagtatccacatcattatatcttgatgcaatctttaagcatttgccagcaatccagttatgtgaaattctgaacacaacaagtccggcatgaataattgctgttgcaatatgtgttatcttagccttaactcccttataaggaagtaccgggaacgcaacatgtctgagaataagaagcttgctccaaaaccaggcagctttagcctgctttttaagttcttcctcatcatctgatatattatcaagcggatacacatcaaggaatattccaagatcacatttgatattcttaagaggttcctctataaatgttgttcctttcatcataattcttgttgtcatcaatggataattcttcattgtttcaacattggcaattgaatacttatcgctgtaatctcttttaataacttcaatcatcttgtcgaaatcttttctaggaagcattacatcaatatcatcatcccatggaatgaatcccttatgtcttattgccccgattcctgatccggcatcaccaaaccatgtaagattattctcgtcacacactttgatgaaatctctaagaatttccatctctgtctgctgtacctttttaagggttgcctcatcgtattctttcatcgttaactcctatccctgcttcatattattagattcttcactcttgctgtatgccttagtaagcattttagcaatacatttgggccagaacttctgatacataatgtaatcttcttcagatctcttattatcattaagaatcttagttgtctctgagtcctcatgtattctgtgatatgtgagtatcttattacagaatataaagtctcccttaagctttgataatctctcccatgcttcccagtcttcatcagctctgaatccattaaggaatacctgcttcataagattaggtctgtaatatgttgctgatggacaacatattggtgagccaagcgataacactcttcttcttataaatctgcttccccacattgcctttggacgcattatgaaaagcattattctctttactttaagaatcttattggttgttacaatctcgccatttcttatctctgcataatcggtaaagaaaagcagcggctttttagctttagctgtatacgctaacagattctctacatattcaggcgcatatttatcatcctgatgagctatagtgacataatctgtctgtactttagaataagcaaaattccaatcctgtgtaattccgctttctccctcattgacatacacctttaaattatattttgctgctatgtcgtcaatatacttattaggtgtagatgtagcaataaatatctctgactttacagtctgttccataagtgatgtaatacactcttcgagatatggactctccttataagcgcatatcgcaaatgtatgattagtattgacatgttcctttgtcattatagttcctccaaacgccttgttttaagcatatgtatcttcatactatcttctacagatactcattctttccttcttcacgaagctttgcaagtacctgcttgatttcgcctgcattctctttagttgtaataagagttgcatctttagtatcaacaactacgatatctcttaaaccaactgtggcaataagtttttcgccaccttctattacacagcccctagtattaactgcaactacattgccgttaattacattgctgttatcatcattcttcttgattcttcctactgcaagccatgaacctacatcatcccaaccgaagttgcctggaagtgtgtagatagaatctgccttctccataataccgtagtcaactgactgtgactcaagattagggaattctgcctcaagcactgcattttcatctgctgttccaactgctgccttaatctttaataagccttcatatgtatccggcatgaacttcttaaagcagtctaatattgtagataccttccatacgaacattccactgttccacagatatgttccgtcagcaaggtatgatttagctgtctcaaggtctggcttctcaacgaacttttcaactgaataagcattattcttcttgtcatcctgattatacttaatataaccatagcctgtctctggataattcggagtaatacctaccgttacaaggttagccccctcttctgcaatctgaacagcttctttaaatgtatctgcaaacacttcattattcttaataaggtggtctgatggaagtacaatcataactgcatcatcatatttgcttgcaacatgaactgctccaagacctacacatggtgctgtatttcttccaacaggctcacataagatattctcctctggaatacctggaagctgctgctttacaagttctctgtagttcttgttagtagcaatataaacatccttaatatcaaccaatgggctgattcgctctaccgtgagctgtatcatagtctttccgtcatctgtaagagaaaggaactgttttggcatattaacacggctctttggccagaatcgctctcccttaccccctgccataataagtgctgtagtcttcataaattcctccttgttttgcgaagcaaaatcctaacccctctggtgaggagaggaatttgcatccttgttctgccatattgttttaaccatcaattacgacatctgtctgtgcatcataatatttaccatcagctctgatagcacatctatatgtgccgctttccatatccgttgtatctattccacaaaaaaacggtgcatagttaatgttcttatccacaccttttcttaaatgaaatactctgtcacatactgactgtgccttaatcctataacaattctgttcattccacagaaaaattacgggattataatacactttatttccgttatatgcaaatcccctaagctgcatatcatcatgataccctgtttctgtcaccttaactgtaggtgatacttccatatatcctgcagccggccttaatctgtcagctttctgaggttttctgtatattacagaatatatctcatctccgaatctgtagttattctccgtctgcgtaagaagcggactatagaaagggtcatatttctcaagctttggatgtttttcatatgtcatatcccttgcatgcatattacgtctgttcttttcttcatcaacctcatcatcacctcttgagaatgattcatggtgaaaaagaaccacgtcatttcttaagacattgtaatatccctgttcatagagagtcaggcatatatcaacatcattatgtgttacttcaaatgcttcatcaaatccaccagctttatcgaatttagccttctcaatcataaagcatgctcctgtaacacacaggcagtcataatcagcgtaattcctatgagccttgatattctcatcatcaactgccttcgcatacagatgtgcaaaacagcttgattcataattaattacacccacatgctggatatatgatgagtccggatacagaagctttgcaccaaccgcgccggtactttcctgctttgcctgtccgacaagtactgaaagccagtctgtgtcttcataatcctgtccgattatttcaatatcatcattaaggaacagcaacagattaccttttgctttagctgctccaacattacacatatgtgagaaattaaaatctgccttttcatacacatatgatgcctgtccttcaaatgtacctacaagcttctcatactcttttctgttgctgtcattacttccgttatcaacaacaacaatttcgtaattaatatattttgtgaacttgcggatactctgtaaacagcattttaatatgtctggattatcctttgatggaataattatactcaccagatcatattcattcgtaatgtaatgcacatgctcaactgctgaatcatgcttatctgctacgatgttcacattaatttctgaactttccagaatcattttcttaaaagctgccattccgtcatcagcagtcctgtatgatttactgtcagttcttatgtccttaacaatcacttgatggatatgcccaacatctgacgtcttacactttgaaagaattattaaagacaattcataataattaatattatcaaccgcgccatgattcttacattcattaatagcatctataagagcattcttctttgcaacaaatgcatcgccaatataattgtaagataacagtgtatcccatgaataatcaggcttgcagtcaggaagtccgcatccagcttcctgattatacttttccgaatcagtatatatatatataagactgcgtcctgcccttttctgaatccttatataatgtgaaacaattgctgtataatctttatcgaattcacagctttcatcacacacggctatatattcagcatccattccagacactgctgccagcatgctttcatagcttccactatgtctgcatattgctgtgcagtcagccttattatcagtaatacgctgttttggtgcgatttttttctgataaatgccatagactttagcatctgtcatattctgatgcatcttctgttgtaatgcatacccgaatgtcttaaagccttcttttccaataatctgcgctgctctcgttaaaaacatttttacctctgatatttactctgaagccaatacatacgcctctgttgtcattgggaaattcctgttgtaatatggatctccctcatccaattctttctgccatttgctttggaaagtttctatctctcccttgaatcttaactgcttttctggcgtatcttcatatcctcttgacttggattcataatgataccactgtgaaaatgcatcatataccacaaggtatcccttgcttctgactttcatgcacaagtcaacatcattaaatgcaacggcatattcttcacataatccaccaacttcatcaaacactgctttaggcaccataagacacgctgctgtaactgcagtataatcacatgacaaatatgctcttgacatataaccatattctttagcatcgagacctataaacgcatgtcctgcaattccacctaatcccagaataacaccagcatgctgtattgttccatctccatatattaatttagagccaacaattccaacctcaggtctcatacagtatccaagcatatctccaagagaatctttgtccaatatcttagtgtcgttattaaggagcagaatataatcaccttttgcctcttttactccgaaattattaattgcagaataattaaattctctctcccatgtaagaactcttacattatcatattctttctgtattttattataataatcaaatgtttctttttctgtgctgttattctctactataataatttcaaaatttctgtaagtactcttctttaatactgaggtaacacataaatcaagatctttataatgatctttgtttggaataacaattgaaatctttggatttcctggtgttgcatatctgattctgtatcctccaaaaagtttactaagctgaacctgtgcttctattcccatcctgttaagatgatcttcgaccgctcttcttccagcttcatggcaatacttcttgctttctggattagctgctgttgaattactatgcattctccaatgatataatatctttgaaacatgtgctattttatgagctttttccgttgttctaagaataatatcgtaatcctgtgccccgtcatacttatcgctaaaaccaccaacttccttaataagttcagttttaacgcaataaaaatgagtaatgtaattgtatgaacgaagtaagtctatattaaaatcaggcttaaaattaggattaacatttttccagtctggtcctaatattttatcttcatcagtatacacaacatcaacatctttatcctgtaatgccttcaccacttcatataatgcatttggttcaagtgtatcatcatgatctaataatccgactatttcaccttcagccatatcaagtgcagcattagtatttcctgctatacctagatttctatcaagaactttgtaaattatccttgaatctgctttactgtacgcatctaatgttgcctcaagttccttatttccctgacttccatctgcgatacataactgccattttccataactctgcgctataacagaatcaatcatttcctttaagaatataatcggtgtattataagttggaactataatgctaataagtggctggtattcaaagttttcattcttctctctttccagctcttcctgagttaccttatgatctgtaaaccatctcttatatataagctcctgattattgcctccatataatccactatatacatattcccttaaatcagaaaatccatatttgccaatatatttacagagacttgctacattatgaggtgttattgctcttatgagtctctttgtcttatctatgttatgaactcttctttgccatttaagttctttgtctatatcgatatccttctgagcagaatctgacatgaattttaatatataaccatctttttcttctacagatattgtaaatccatatgctttttctttatcttctgtatatccgttatcaataagatcatgtctgtcacatttgacataggtataatcaacttttttattatcgcgatttacaacctctatgcttatatctccttttgacaatacccaaccagttattctatacacagtatctccatctggcgtattctcagcccatatgcaatctatattgtactgtaaaagctgatcttcaatagtatatcctatatctttattgtcaagtgatgcaagttcttttgtttctcccgaatcaacaacaacaaattttatttcattaatatcagttttatctgtatcagccttaactataaatcctatttcacaatctctgttaagacctctctctagcaattcatccagcttgtcttctcttgttatatgctcgatactacactctgtcttcttgccattaataagtaattcaaatgaataatcattaaaatccttaggaatataccagcctgcaattctgatatgaagttttccctgattatctgaaagctgtacattaattacattattactctttttcatagccactacctttcaattaacagttcttccatgtatgttcaattcttgcaacacccatatcttcaattcctgatacaacattaaatcttactgcttctttatagtaatcaattggtgttccatctgctttttcaagcacaatatctacccagtactggcttcttgtaagtgtcatactgtcaaactcaataacaatctttccatctttgtcaaggtcaaatgcatcaagtctgtctatcttagtactgcttccgctgcataactgaccatcaattctataaatcatatatcttgcatgaacatcttttaccggagtctcaacagaataatctatctctatcacggcttttcttcctgtttcaagagtttctgtcctcttgccgtcatcacaagacaagataacgtcattaattcttgcctcgaaacttccgtaacgtttatcgttaccaccttctttattctcttcctcagccttcttaagtcttctctgctcggcttcaattcttaagattctggccctttcctgctcatccttgcttaatctttcctgattcatataatcaagataagcaatgtcaacttctcttggatcaccttcctgctcaatctgtccatctttaatccagattgacttgtcacatatctcttcaatctgtccaagggcatgtgatacgataataatagttgttccgttagccttaatctctcttaacttgttgaaacattttgcctgaaaattcgcatcacctacagcaagaatctcatcaataagaaggatatctgcattaacattaattgctactgagaatgcaagtctcatgtacatacctgatgaatatgttcttacaggattatcaataaactgctgtaattctgaaaactcgataatatcctcaagtctttcatctatctctttcttagtaagaccaaatatcgcagcattagtgtatatgttttctcttccactcatgtcagggtggaatcctgctccaagttcaagaagacttgaaactcttccacacatttcaatagaaccgctgtctggatatataatcttagtcaacagcttaagtgttgtactcttaccacagccgtttcttccaataagacctactgcctcgcccttctttactgtaaagcttatattattaagaacaactctgttttcatatctgtttctcttccagaacagcattttctctttaagttcattacctttatcaaaatacactttaaagcttttggatacattccttacttcgattgaattctcgttgttaagcatacttatctctctttcttaaacattaaaactcttctgcgaatccgcgctgaagtcttctgaatataattgctcccagaataacaaaaacaacgcctgttataatagcaaccaataatgtagacaaatctggaatttccttatagtaaagaatctgtctgtatatattgattattggtgtcattggatttaagttaaatattgtctttaatatctgtggaacattagcattctctaccatatcagcgccatacataactggtgtcatatactgtaatgccataactacaattccaagaatgtactgtaaatctcttaaataaacagtaagtgcagaaactataagtccaattccaagacataatatatattcaacaatcattacaacaggaagatataataatgcaaccagattaattcctcttcctgagataagaagaacgataaacacaacaacaaatgtaagaatcatattaatgaatgcacttgttactgtagatattggaataacctctcttggaaaatatattttcttaaccatgttagattcacgcattatacatgttgagccatcctggacacttgagccgaaaaacatccatggtacaagtgctacaaaaaggaacagataatactgttcataattggctctcataattattgagaaaaccaacgtaaacactaaaagctgtaacaatgggttaataaatgtccacataaatccgagcacagagcccttgtatcttccacgtaaatctttctttaccagagaaaatatcatttctctgtattcatacatttcctttaaatgtttcataaatcctccatttaattatggctgtcagaaattcgcatataagaatccgcttccagcattacttgcatatcccataacaaatattgctaatataatgccgtaatatattagccaccttactactattggctttgctgcaactgcaactctaatctgtacgcctctttctttgaggacgcttattattaatacaacaacacatcctgctaataaaaatatataatccactgatgttaatccaatgttcttaaacattgctgcattaagctggtcaaaccgtaaatctgttatcattcgctttatcattctgattgcagaacccatacctgctgcactgcaatcaaatacccatccgatattgacaagtataaatgttcttaatatctgcacacactgccaccacttcttatgtgggttaatatgacatgcatgtaagcattttttataaagtggctctacaaggttactgaatgctattattacaccattatacataccatacatgatgtaacgccattctgctccgtgccatatacctactataaagaatatcagaagattagaaagacatattgggagagtctttccaagatgatctccaagatgcttcttgccccactttccgaacttgttcatagcctttgataaacagaatggatagaagacataatccttcatccatgtacccagtgtaatatgccaccttctccagaactctccaattgatttactaaaatatggctgtctgaagttctcatccatagttacaccaaaaagctgtgcaacacctattactatatcaataccgcctgagaaatccgcatataactgaattgaatacataagcaccgctattattgccattgcaccaccatattcatcaggcttattaaatattatattaacgaatactccagctctgtctgcaagaaccatcttcttgaacaaaccccagaatattctctgaattccaaactgtacattctgaagattaaatgcacttcctgcaaaaagcgttttctgcagcttatcaaatcttccaattggtccctgcataatctgtgggaaaaatgatacaaaaagacatattctgaaaggattcttttctgctctgtatttcccctgatatatatcaataacataagatattgactgaaatgtaaagaatgataaaccaagtggcattacataattgcttaatgcatacacggttttgtcaatacctatcttattaagaactgctgtgatattgcctgtgataaacccaccatattttaaaactgcaagaactccaaaattaataagcattgctatcacaagaattattctctttttatgcttaacagaattcttaagtttcttcttttgttccctgtcaatctctgctttgtgttccttcagatatacatctgacttatcctgtatgtattccattgctaacgccgcaagatatataacaagcgatgctgcaaccatgaaaagactattcttcacattgaatgaaaaataatacagataacttaacacaagtaaccacatccatcttactttagatggaagtacataatatataactactccgattaatataaaaaaccaaaataacgctgttgtaaatgacattttatttctccactactccatacaattccgcttcagtattgtacatttcctgaaatgaactgtagaaatatctattaatatctttagttccctgtttatgttctttaataactttgccaagaaattctgaatattcttttgcaaattctccattcatatgtccttctttatcaacaaagtccgaatcctctcttggcaatatgtcctgtctcgccatattgaaatcataatagaacactccattgtcagcaagcagtttgttaattgtatcatggacattctccatatgaagaatacccacactacttggagttattggagatgttaccgcaataagatcaatatcattatctctgcaatactttattattttcttaatatacttcaaaggataacctgtaatttgctctttacttcttacactccagctttttaaaagttcttcaccagcgagttctccattaacaggactaatgtagaaatatcctcttccggcatatgttccaccatctacatcaagtgaataaatatccgcttctttgtaaccttttgacaatttctgttcaatattatctttcatattagacggagtaaacgtacatgcctgtcttcttgtgaaaacattccttatctccatacgttccatgttatcgtatatatattgccactttacatatgaacgccaatccatctgacattgaataaactgttcagtataaaacccttctttaggcggattgaaataatactgataatcaatatctagaattactgtcttaatatcattagttctgcacgtatcttcaagcacataatatgaatcttttaccgtttctcctggaatcgccatatttattgaatatgttccggaatatttatcaataatatccggatctgatgatgcccttgcatgtgaagctccaattatgacagtatcataatcagttttattatttttcacacatacatttcttaaaatataattaacataacctgtctgtacacaggcaaaatcaatgactcccattatagcaataagtcctgccaggaatatcacacatcttaatattggtttaaactttttcataactaccttctatattgtttcttataaagaatatcaactgatgataatattactaattaatcaccttgtcaatcaactttttccatgtatctttcttaacctctcactgacaatatccgcagaacgcttatacgccagatgttcccttgcatatttctgaccattcccagcaattctttcgtagaaatccttatcctcataaagccttctcatatagtctgctgcctcatcaacatgtgcatcagcccatacatttcccttcttgaacggctcatagtccttatcaagctctatcatgtcgtatccgaccatgcatgctgtatcactgttcataaactctgtattgcctgaccagtcagttgcaataacaggtgtaccaacatacattgactcagccataacaagtccgaagccttctgaacggtggagcgaaacatacacatcaacatcagcaagaagtgtattaacctcacatcttcccatatgaccgcacatataataaatgttattgcagtcctctattacagaaccaataatcttttcatcttctgcagataattctgcctcacttatcttaataacaagtccgacatccttgtatttttctttcatctgttcatctttgcagaatgcttctttaaatgctttaatagcggcaagcggattctttctttccataacgcttccactgttatacattacaaggaataagaacttatcttccggcagattaaaatgctttctatcaaacttcacaatatctgtctcaggtgcaacacagtgtgggactgttatcacaggcttgtctgtatatttcttcaaagtattcgtaacaaaatcagacggtgtccagacttcatcaacaagcttgaatgccggaagccactcttctggaaatgtctccagctcccatgcccagtatcctatgttatatctgtaatcccatacttcttttccaaggcttaaatatgctaccatgaattcacttgcattaacatgaataatattcacatcaaaaggaagctcctctgtgagtctgtcatcatacgtatcattgcttcttgaacctcctggtggaacaaagaaatcccttataacatgaggttctttattctcatcaagcagcctgcacataattcttgcgctttgtccaagtccattatctcccttaatattacctattatattggcaccacatttgtatcttcctgcctcatatttttcaatagaatcagccgacagcttgtctgtggcattattaattatccctgctttcatcttacttaaaagcttcataggaataatctttgtcagcaccggtctcaatgcttctcccgtattaagaaaaaattttgataaacccatataaacctcaacattctatctgttattcatctggctgttaataaagtctctcaccataccaccaagtctttccggtgtatacttgtccaacgcatgtctgtatgcattctcatcaacaagtccagaattaatcttcttatctatattcttcattccattcacaagacttataaccttatcatcatcatcaccggcaagactgaatctttccacacagtcacctactacctcgtcaaatattttaagattacttgcaagtattggcttattatgcttcattacctctaatataggcattccgaagccttctgccatagaaggaaacacaaagcatgaacaattgttatacaggtcatatcttgtagtgtgtgatacataaccaagataagtaagaccttcaacctctgtaagtgcagtctcaagaagctgctcaatatcatcctcctgcatcttaccggcaagaataagaggtcttgttccgccttcttccctgtatcttctgtacgctttaataaggatatcaacgcccttacgcttctccatattacctacatacaagaaataattctcatccttaggcggtacatatcttgtaagcggattagatataatgtaggcattgcagcttggaatcttcttagcctttggaaaatacatctctgtgtcgtccttagtctgctccgaattatacagaatcatatctgtatgtcttaaagtcacgccaagattaaacttaaaataatagctgtatatttttccaaagtatcttacatactgaataggaaacatatcgtgtattgtgataagtgtcttaaagcttccaccgagattaataggaataatcgaattaacctcccagaatatatccggcctcacctgctttaattctttcttaataaatgcaaaatatgcatacacacccgcacttctatatacaggctttccccattcaataaccttgattcctctagcctcaaatctcttaatatattcactctctttaacatctgtaaaaagaatccattcaaattcatcatatgttatgagctgttctaagaagtcattaagatacatgcccacaccgcttggtctgctgcctaaagttcttgcatcaacagcaatctttaatttcttcataactgtattctctgcccccaataaataatcttttattctatcagagtatttccataatatgcatgttcaaactacccctgtaacaaaacatgtttcttttgattttaccatattatagatataattgctatacattattttctacacacaaatacaccagcctctttggttattgtcataggtttcacaagctttttctctacatattttttaaaatctgtatacttatccacaaggtactctttctgattgccatgacatgatagtatataatctaccagcggttctgcttcatcaacaacaagcgcatctttataatctcttctctcaacatctgaaaaatgtttttttaatatcttatctccattatcaagtccgaatttttcaaaaagcttatctgcttcaagtgcaattctcttatcgtatcccgacacaaggcggcttatctcctgcatatgcctgctgccatatgtactgcacacaagcactcctccaggctttaacaccctcacaatttcatcaagtgccttattgacatttttacaataaaacagcacatgattagcaatcaccagatcatacgattcatcttttgcccctgtcttttcgcatgaagccactctgaacctgaatgacacatcaatatctctttccttccagctctctgttgctttttttatatttcttctcgcatcacttatcatgccttctgatatatctgtaagctctatatatatgttttttttcttccctgaaaattcatttctctttcctgtcatggcaagctgacctatattgtcaacccacaatgttccatcaccacacccaatctcaagaattctcatccccttaacaataccacactgctcatatacccacggaaaccatccctgtttattaactgaaaacctgttatgaagattaattcttgcagatatatttccagcattaatgtactgattcttcatgctgtcttccatattagtaagatggataatctccagcatattactccagtcaactccttttccctctttaatagagtcttctgtttcttcaatagctttacatacaagctgcatctgtgcaatcttgtcctgtatcattcgcttttgaagttcaagtgaattctttagcacatgataatctgaatcaccaattgtcatatttcttatatcgtccagtgtaaatccaagatatttaagcaataatatctgctgtaaccttgtaaaatctgaatccgtataaaatctcactccctcatcagtaagaagtgacggctttaatatgttctgctggtcataatatcttatagtccttactgaaacatttgatttcttcgcaaattcgcctgaagaataatacccgtctttatgcatatattactccttgtaaaaatttttcaaaaaacacttgaaggtgacgttacgtcatcttttattatatacctgacttaaaaaatgtctacttgaaaattaacataacattttaacaaacaaggaggaacttcaattatgaagggtattattttagctggtggttctggcacacgcctttacccactcacaatggtaactagtaaacagcttcttccaatctatgataagccaatgatttattatccactctcagttcttatgagtgctggtatcagagatattcttatcatctctacaccacaggatactcctagattcaaagagcttttaaaggacggaagccagttcggtgtcaaccttacttacgctgtacagccaagcccggacggacttgcacaggcatttattatcggtgaggaattcatcggtgatgacactgttgccatggttcttggtgataatatatttgcaggtcacggtcttaagaaaagacttaaggcagctgttgagaatgctgaatcaggaaagggtgcaacagtatttggctactatgttgatgatcctgaaagatttggtattgttgaatttaataatgaaggaaaggctgtctctatcgaagaaaagccagcgcagcctaagagcaactactgtgtaacaggtctttacttctacgacaacaaggttgttgaatacgctaagaacttaaagccatctgcaagaggcgagcttgagattactgatcttaaccgtatctacttagagaagggtactttaaatgtagagcttctcggtcagggatttacatggcttgatacaggaacacatgaaagtcttgtagaagctactaactttgttaagactgttgagactcatcagcacagaaagattgcatgtcttgaagaaatcgcttacttaaacggctggattaacaaagatgacgtcctcaaggtatatgaagtattaaagaagaaccagtatggtcagtacttaaaggatgtcttagacggcaaatatgtcgacaagcttcatgaataattaagtacatttagttaaaacatttttcatataagaacacattttaaatattaaggagattaattatgacaattattgttaccggtggagccggatttatcggaagtaactttatatttcacatgttaaacaaatacccagactacagaatcatctgtcttgactgcctcacatatgcaggtaatctttcaactcttgagcctgttatgtctaaccctaacttcagattcgttaaggaaagcatcacagaccgtgaagctgtttacaagcttttcgaagaagagcatccggatatggttgtaaacttcgctgctgagtcacacgttgaccgttctatcgagaacccggaagttttccttacaactaatattcttggtacacaggttcttatggatgcctgcagaaagtacggtattcagagataccatcaggtatctactgatgaagtatacggcgatcttccacttgacagacctgaccttttcttcacagaagagacaccaatccatacatcaagcccatacagctcatcaaaggctggcgcagacttacttgttcttgcttaccacagaacttatggacttcctgttactatttcaagatgctctaataactatggaccataccacttcccagagaagcttatccctcttatgattgctaatgctcttaacgataagccacttccagtttatggcgaaggtcttaacgttcgtgactggctctatgttgaggatcactgcaaggctatcgaccttatcatccacaagggacgtgttggtgaagtatacaacgttggtggacacaacgagaagagaaatattgatatcgttaagcttatctgcaaggagcttggcaagcctgaatcacttatcgttcatgtaggtgacagaaagggacatgatatgcgttacgctatcgacccaactaagattcacaatgaattaggatggcttccagaaactaagtttgaagatggtatcaagaagacaattcagtggtatcttgataataaggaatggtgggagacaatcatttctggcgaatatcagaactactatgagaaaatgtatagcaaccgctaattaacacatttattctgtaaggagatttgacatgaagatattagttaccggcgttggcggtcagcttggccacgacgttatgaatgaactgataggcagaggtcatacaggcgttggcagcgacatcgcacctgaatattcaggagttgctgatggaagcgctgtcacaacagccgaatatgtacctatggatataactgatgctgcccaggtttctgaagttatcactaaggtttcacctgatgttgtaattcactgcgcagcatggacagccgttgacgctgctgaagatgatgataagaaagccaaggttaaggctatcaatgcagatggtactcagaatattgccaatgtctgcaaacagcttgactgcaagatggtatacatcagtactgattatgtatttgatggtcagggtgaaacaccttgggaaccagactgcaaggactacaagcctcttaatgtatatggagagactaagcttgccggagaacttgctgtttctaacactcttgacaaatactttatcgtgcgtattgcatgggtatttggtgttaatggaaagaactttattaagactatgcttaatgttggaaagactcatgacgaggttcgtgttgtcaacgaccagattggtacaccaacttacacattagatcttgcaagacttcttgttgatatggttgaaactgacaaatacggttattaccatgcaactaatgaaggtggatacatttcatggtatgactttactaaggaaatctatgcacaggcaggtctttctactaaggttacacctgtaactactgctgaatacggcatttctaaagctgcaagaccttttaacagccgtttagataagagcaaacttactgctaacggattcgctccgcttccaacatggcaggatgctcttcacagattcttaaaggaaatcggtgagatttaatatttcaaaggagattttatcatgggacagattacaattgaaaagaatgtcgcaggtatcgaaggactttgtgtcatcactcctgctgttcacggcgataaccgtggatattttatggaaacatacagccagcgtgatatggaagaagctggtatcaatattaactttgttcaggacaaccagtctatgagtactaagggtgttcttcgtggtcttcacttccagaagcatttcccacagacaaagcttgtaagagctatcaagggagccgtttttgatgtagctgttgaccttcgtacagactctgaaacttatggaaagtggtacggaatccttctcacagaagagaataagaagcagttccttatccctaaaggatttgcacatggattcctcgttcttactgatacagcagaattctgctacaagtgcgatgacttctatcatcctaacgacgagggtggtctcgcatggaatgacccggcaatcggtattgaatggccagagcttacaggtacttacaacggctcagcttcaggtgaaggctatgctttaagcgatggaacaaagcttaacttaagtgataaggaccagctttgggatacacttgagaacacatttaagtttgactaatttcgagatattatatttctagattttatcttgcttttagtgtatttgtcttactttcaaggtatttatctgattctggatatttttacccggttatgaatacttttatccggttttcaggggagattagccggtttttcgcactactatgccgaaagacctactaatctcctcttttttatttaattagtgcgctttttcatctctttttctgactcttcacatagcattcacctactaatctacatattttttacttttttgtaggtcttttcttctttattttcctgtcctggttaagaatctgctgtcgaaaaacctactgataacacagcttggcataatttcgtaggctttctctcttccaacaactttcttcctgttttatttcacccactattcgtcagactttaccttgtttcgtaggcatcccctatcctagcaaaattttttcttatcatttcaccatttatatatatttttgatattgtgtttatcatagttatattgtatagtattaatataattacataaggaggttgatatatgaaccatatagcaaataacagaatattaaatgcaatgcttttatcacctgatttaactatcagtgctgtttccaatcgtcaatccgaacttattttgcttctcaacactatcaattcaagactaagtaatgcccctgacggaacactccgcattgctaagcgtggcaacgcccatcaatattatcacagaacagattctactgacagaacaggaacatacataaaaaagaaatctaatcttaatcttgcgaagagtctggctcagaaggaatatgatctgaaagtcaagcatgaaatccaacatgaacttcatgctattgaaacttttcttaagaactattctcctgaacagattgagcatttatacaattctcttaatgagataagacaggaacttattacaccagtctatacacctgccgaagatacattgaatctctggaataatgttcaatataattctcttgacattcctgatgatactcctgacttctactctgataacggagaacaggtgcgttctaaatccgaattaataatcgccaacaaactaaaacagcacaatattccatataagtatgaatatccgcttgtgctttctaccggggtaaccgtccatcctgattttacctgcctcaatattaatacccgtcaggaattcatatgggaacacttcggcattatgggagattctgaatatatgaacaaaacattaaagaagattaacgattacgctaaatccggttatgtattaggcaggaactttattgtcaccttcgaatcttcttctatttctctcaattccaataccgttgatattaatattaatgaatatcttttatagtcaatgaagctttaatggtgcaattctttcacacaacacctactcaattaaccaaagttgttaattgagtagatgtttttcgctcccccaaaaatcaactagcaacttgaaaagcacactaatcttagtaatatatgctatatagtaagtctttttcccaccatctcatctcccagctaataaattccaacaattttctataaaaaagacctaccaacatccttataaaaagcatgttagtaggtcttctccaatatctaattcaaatctcaccagaaatatgcctactcaactcttgaaaacaacataattagtaggtcttctctattaatgttcattcggatgataagtatcaaccaccttcttcagtgattctcttatattaccagtttctgaataagcttcttccttaagcttctcaaggttatcaaagaaattctctttatcaaactcaattggttttccaatgtggataagcttgttatctgtctcctgaagaccttcttctttcataagaagctcttcgtagagcttttcgccaggacggagtcctgtgtatttaatttccatgttgacgccaagtgtgtaacctgacagtctgataaggttctttgcgaggtcatcaatcttaacaggctcacccatatcaagaatgaatatctctccacctttggcatatgcacctgcctgaagaacaagtgaaaccgcctcgggtatagtcatgaaatatcttataatattaggatctgtaaccgtaaccggtccaccagcctcaatctgtctcttaaaaagaggaatgactgaaccgttacttccaagtacattaccgaatcttacagcaacgaaatctgtcttggatatctcgttatacgtctgaacaatcatctcacagatacgctttgttgctcccattacattagttggattaacagccttatctgtacttatcataacaaacttcttaaccccatacttatcagccatccttgcaacattccatgtaccgacaacattattcttaacagcctcatcaggactgacttccataagcggtacatgcttatgtgctgctgcatgatatacaatatctggcttatactgtgcaaatacgctttcaagtcttgaaacatttcttatcgaaccaataagagtaacaacattggcatcaggataattaatctttaattcctgctgaatatcataggcattattctcatatatatcaaatataatgagctgcttaggcttgtgacttacaagctggcggcacagctctgaaccaatagaaccgccaccacctgttaccataatgaccttatccttaacataacccatgatagattcaatatctacttcaatcgggtctcttccaagaaggtcaagcacatcaacattacggatagagttaacattaatctctccatctaccatctgatatacacctggcagaatcttaagagtacaatcagtctctttacaaatgtttaatatatcccttttaacttcattagatgctgacggaattgcaaatataatctcatcaatatcataaagctttgctgcttccttaatcttgtcccttgttcctataaccttgacgcctcgtatgtatttaccaaccttgcggcggtcatcatcaataatacatgcaatattagagttggcaagatagctcgaattctgtatttctctcataatgacattagttgcctctccggcaccaataatcattacattgttggaagtcttaatatttcggtatttgttaagaacagttcttatcattctgtacataaaacgacttgcacatattgcaataataaggtatattgccgcattaaaataacagcttctaggaagcatattacccgcaatcttattacttaagaaatgcactacttctacaataatacacgcttcagcaattctgtacacctcagctatactcgcatactgccacagactgtgataaagtctgaacagccagaatataagcagagacattatcgtgtacggaagcatgttctctacataattactaatatactgaggttctatagatacaatacctacatcaaatctcataataagcgacagatatacgcatgcattcagtaaaaatgtatctgttaaaaacaagaaaaatcttcttaccagaagctgtattctatcctttttagtctcacccatcatctgttcctcgtttctttagcaggctttttagcagctaacccacatactgtaccaattccataagaaatatgcaacaggaaaaataaaaatggcagtgcaaaacatgttttattgcgttccttcttagctcctattactgcaactaccgacataaccaccgccaacagccagtatgatccccacataagtcctgtaagtccgtatacaatacgagaaaaaaacgacttcacagcaagcagcttacatgacacacttgcaactgttgtaacaataatagccatgacaaaagcccacggaacaaaatgatatatagaaaggcatcctggacataccttgcttgtctttccaatccagtatccattgccatatttctgcttaagcatcttaggaagtgaacttcttgtatgctggtatgatattatatccggacagaatcttaatttaaaccctgcttttctcatacggtaatgaatttcattatcctcagttcttgcaagagactcattataatgtccgatttcttcaaaaacttcccttctatatgcagcatggaacagcgatttcatatatatcttttcttccgttccattcccgccattacggtaaggtgctatgcttgaaccaaacatagaactctcggcaagaagaagtgtatccttccatggtgtctcttcatcaactatattaggtcggacaccaccgacaaccatctcgccttcttctaaaactttaacattcttgctgacaaaatccaccgggatatgtgcatgcgcatcaactcttataacagcttcccctgtataattatcgagcagcacattccatccacacggaagtgtcttcttaggattatcaagcacaactatctgtcttgctcccatcttattctcatcagcaaacttctgcataaccgccttcgttccatcagttgatgcagaatcaacaagcacaacttccataagattatgatcataatcctgcctgcttatgtcatcaagaatattctttatcgtattctcctcattatatgcaataacggcaattgtaataaacatactctacctacttcttaacagtcattctttcacttccaactactgatgtaaatgtatcccacaatacagccgcatcagtcttcacgccaaaatgtttcatactttcaaggttataacgcatttttgccggtaatacttcattcagatatatattatctgtacttttttcatcaacagcctcaccaagaagcttgtcctcatccttataagcaatacttgtccttgatgtaagtcctgccggcaaaagaagtgtcgcatacatctccttagtatacttcttaacatacttaggaacttccggtcttgttccgacaagagtcatatcccctgcaagtatattaaaaagctgaggaaactcgtccattctgtactttcgtaaaaatgcaccaaccttagtaattcttgaatcattatctacagtcactgctgcccctagcttacttgcattgtcaaccatagtcctgaacttgtatatacgaaaaattcttccatactgtgttactctcgcctgcctgaaaaaaacaggtcccggtgaatcaagtctgattgcaagtgcaattattcccattggaataattaaaactgccagcataataccagcaacaataacatcaagcactcttttcatctctaaccacattctgtgtttcataagtatattatagtattttcttacttccttagttctcatttcatcaggaagaagctgccatggtcttaactccatcgtaatcaatcccctttttgttgttgtataactaatgtccgattatttcattctgttaaactgctctattacatattctacctgttcatcagtaagacatgtatgaagcggcagtgtaatctcattacgatacatattatatgaatgtggaaaatccttaatatcaaatcccatgttcttatatgccgtatgcattggaagcggcttaaaatgtacattagttgcaacacctgcctcagcaagtcttgtaatcagttcattacgctccttaacatcctttccaagaagccttacaagatacagatgaccacttgaagtatattcatctgtaaaatgcttcataatatccacatcatcggctgcaatcccttgtgtatatctctcaattatatctcttcttctcttaagaagtcccggatatctcttaagctgtacaagcccaatagaagccataatatcagtcatgttacatttgtaataagttcctttgatatcatattcccatgcaccaagcttagtctttgcaagcgcatccttagactgtccgtgaagtgagtaaagcattatctgcttatatatatcctcatcatcaactcccggaatacttctccatgtaagagctccgccttctgctgttgtaaggttcttgactgcatgaaatgaaaagcttgtaaagtcagccttcattccactcataacaccaccctcacttgctccgaaaccatgtgcagaatcagcaacaattgcaactctgccaagtgcctcctgaaggggtgttgaagccttaaatatattctttttactctcgacaatctttcttatcctgtcatagtcaaccataacaccacctatatctacaggtattacagccttggtactctcattaattgcagcttcaagcgcgtcataatcaaggtgatatgtgtccttttcaacatcaataagaacaagctttgcattaacatgcgcaacgacacttgcagatgctgtataagtgtatgcaggaacaataacctcatcgccctcaccgattcctaacagacggagtgctgtctctaaacatgctgtagctgaattgagacatgccgccctgttacagcctgtaaactgagcaatatttctttcaaactctttagttcttggacctgttgtaatccatcctgaccttaaagcctcagaaactgcctgaatctcttcctcggttatatctggtggtgaaaataaaatattcataactcttatctccttttcgtactctgctttgtagatgactttgttgttgcaggagtgactgttggaacctgtacctgtgttgtagtctcctgggtacctccacttatcatttctggaaatgcatatgtcaggtctcctgctgtattagcaattgatattgtataactaactgtattatatccattctgcgaaagtgtaatcgtcttctttccagatgatttatcaaatgaacacggaacagttcctatgtattcactattaacataaagtaccgctcccttaggtgctgttattgataccttatatccacttgtattatcagccgctgtacttgttgatgtaccggatgaagtcatatcgataatcttcgtaacataggctgaattaacatttataatctcagaatactcctgatagtgattggctaccaacttaactctgtgagttccataagaaagtgacactggagtagaataatcaacctcaacaccatcaatgctcataaccgcgcccttcggagtaactgaaaaattaacagcccccatcttaaccggatcactttgtacttcagaaaaatcaactgatgtagtctcatctttagctatagtcactgtcttacttgctgacaggttgccattacgtacattaaccgtatgtgttccaacaggtgcagtcaccagcatatcctttgtaacacccagtaattgtttattacctatgcttacataaccaccaacaagtgcatctacacctgtaagtttaagatatccgtgtcctgcagttacattcaccgaatatactttctctccaacgcccctgataaccagcttatcctggtcaacgagctgtgcaatacttatacgttcttctcctgaaagcacaactgtgtaactttcatatatcatattggaagccccaatgcttaacttccttgaattctcatctacggttattcctgaaacatcatatcttacccaggcatcactgtttccgtgtatcttcaccgccttgcccttcttatccacatatacatcatatattccacccatatccatggtagaagctgcttttatctttccgtaagcatcctgaatatctgtactgcctgtataagggacttcatattctgttcctgtctttatatctacaaaccgcattctgcccgtgtcagcatctctcaatgtaagaactcctgtaagtgtaggattctctccatcacccttaatctcctttgcggcacctggtgcgggggtaatactgcttcctggtatcaccgccctgtcattatttctggaaaatgtgcatgctgtctgacttacaattaacaccataagcatacacactgcaattattcttttcataagcattcctcgcaaatactttttccctcgtatcatcagattttatcacataccacacattttatcaattaattctcttctgcgcatattctgttcaataacaatctttaatttatctatattcttagcaggaacccacgcctttcctgcgttatagtactgatttatgatcttccagaatttttctggaaagctcaataatgtcacaagcatgtcaatatcatcatcttcaagcggctttaatctgtcgtattcatcaaccagtctgtatgccacattaatattccagtcatgcttttccataacctttcttaaaaactggtaaagatctgcaacctgacagtcattatgacatttttcaaaattagtcactgcattgccgccattaccaacatcaagaaacacattatgataattatagcttccatgcacaagctcattagtctgttccatcctgtcaaagcgctcatcaaaacgttttgaattaatattcctgctcgcttcatccgcttccctgaaaaatgtatcaaccgcaccaagcgcaatctgttcaaattcatttttctttttcttgccacgcatataattagctgcctttttaatttcttttgtatgtctttccatattggtgcgtaaccctgctcccctgtcaaaatgtacagcattatgtacgatgctttcactggcctttaattctgactcgggctgctcatctgcggtctctgcaagcgccatacattcccattgctttgtaatatttgtatttacattattccttaaatatcttacaccattagacgaaacaacatttagacaaatatgaagtcttgccagagtccttaccgcctccatcacgtcattcacagacttgacatcacattccctgcctccaaaccagttcttcattacatatctgtgcccatcatctccaacagtaaaaagttctccatcctgatttctcacatatgtatccacattttcaaagcctgcatcactaactgcttttgtcactgcctcatctctcagataaaacccatcatttcttgaacactcgagaaaaagtctgcatcctctgtctgtaaaaagaattactcctccacgaccttttaccattttattaacctgaatatcataaaatctaatacattccaatgatttatcgttcatataatcccccatttccgcacttaatacagacgccctttgctcatacgtctgcgtctgccttatcttatgacatttatggctgctatattccttggatttaatgatacgacgaattaagaaaatcataatcttgatgaaaatgtaattttttcttataatagatagatgtgagcttttttcacatttataataaatattattatagggggaaatcatgcctgaaaactttcatattgacatgccggaagctgtcaggaacattatacatacaattgaagaacacggcttcaaagcatatgccgttggcggatgcataagagacagtatccttggacgaaacccagatgactgggatataaccacttctgctgttccatcacagataaaaactttctttaaaagaactgttgatactggaatcgcccacggaaccgtcactataatgatagataaaaccggatacgaagttacaacctacagaattgatggcgaatacgaggatggcaggcatccgaagtctgtagaattttcagacaggcttgttgatgacctgtgccgccgtgattttacgataaatgccatggcatacaacgacactgatggatttgttgatgaatttaagggtcttgatgatttggatacaaaaataatacgctgcgttggtgaaccagaattaagatttacagaggacgctctgcgaatgatgcgtgccataagattttctgcacagcttggctttaccattgatgaagcaacatggaatgcaattaaaaagctttccccttcaatcagcaaaataagcatggagcgtgtgcatgtagagcttggcaaaacgcttatgtctgcacatcccgattatgttgcgcaatattcagaagcaggactttttgccccaatactcccggtaattgacaatgctctaaagagccgctacaagcgcaaaatacttgcaacattacaacacacacctgataatatatacttacgctacgctgcacttttcataacttctacacctgatgaagcagctaagactctccgtgcacttaagctggataacaagacagttaacacagtatcaaagcttgttgaattatcaaagatggatatagaagaaactgaaccggctgttcgtactgcccttaataagtatggcagagatttcctgcctctgtggcatgagcttatgatggctgtaatccaggcatctgaagacatcacaggaataagtaatccggcgaaggtaaagcatcttctcacattaaagcgtcttggaacagatattcttgcacgcggtgactgctttacaataaaagacctcgacatatcaggcaatgaccttattgaatatggccttcagggacacgaaatcggtgaaacactgaaatccctgcttgatatcgttatagagaaccctaagctcaatgataaagctactcttattgcaatgattgaacatatcaaataatataatcataaaataaccctcaccggctgccttctattctggatacatatcaattacatcggctttggtgagggattcttttaattaattgcgagtttatttttaattatatcaatgttgtaatcaggtgcagccgcaatcactacatcatatatcggcttgatatctgccacttcttcctcaagttctgaggctattgtctccagagtttttgatttctttaccttttttataatctgattaatcatcatagattgttcgccctccgcaaatgctttttcagaagcctccttagcagctttctctactatttcctgcgccattccctgtgcaacttcctgcgcatactcctcagccaacactcttctgacttcttcctcatcataatcatatatactcacttcgacgacctcctccctgtgctgttcgaagaaatcgacaagtatatcctcatctatgcattcgttcattgcctctgttactgcaattctgacattgtcaccttcaacacccatcttgaacctcaccttattaacaaatgtcatgtaatcacgcagcgttttgcacttattaaggatatgtacatcttcgttaatgttgataacacgcactttaagctccagctccggattgtctgtcggaatctcgtacatatctgacagcctgatttcatcctcatcttcaacccatttttccagaccattgtagaatgtcacaaaacgcggaacaggaatcttaatcatacttctcctgtgaagcatggaattactgaacagctccctgaatacatcagacacatagtgcaaaaatcttaacggcatattaggattcttactcgactgctgctcaaacatatacaggctcatacatagtaaaaatgaagcatcattcttatacttcatatatgaaccgccgtttaatgtagtcacctgcaaatcatccacattcgtgtaagctgaattgttaagtgcattatacagttctaaaagattcttcttatccctgtacagcatacagaatacattgtccttaaatttagatgttacattgtctttcttctctgccatagacatcctccccgtctcttttgcaggcagatatccacgcacatatactaatattgtctatataaatatattagcatctacagatatctaaaacaagcctgcattattcaattatgtgttaatgggttattgctgaatgactatccagctttgataagcaactgcctgattagataaaatcatgtcaattgcgtcagatataagaaatatttcttttaatatattgttatcatatttttaattatatatcaatatatattttatcaagaatatgtataaatgtaaaatcccctccagattataaaaaagccccctccggcaatactgccgaaagggactccattctcaaaaatcctataaataattatgattaatatgccttaccccagtaaaccatagccttagccggcttaccacagcatacgcacacatcacttaacttctcctgtgcaaatggcatacatcttgatgtacatgtagtatcttccttaatcttgtcctcacaagcctggtctccacaccacatagccttgatgaatccagccttattagctgctgtatccttgaattcatcataattaagagctgtatatgtatgagcttctctgtgagctcttgctctctcaagcatatccttctggatagtatcaagaatttctggaattctgtctgcaagctcatcgatagatacagtaatcttctctcttgtatcacgacgaacaataacagcctgattagcctcgatatctcttggtcccatctcaactcttacagggataccacgcatctcctgctcagagaacttccagccaggattcttatctgaatcatcaaccttaacacgaagccctgctgccttaagagcctgtccaacttcataagccttgtcaagaacgcctgccttcttctgcataataggaataacatcaacctgaacaggtgctaccttaggtggaagcacaagtcctgaatcatcaccgtgagtcataataacagcaccaataagtcttgttgttgttccccatgaagtctggtgaacatattttaacttattatccttgtctgtgtactggataccaaatgctttggcaaatccatcaccaaagttgtggcttgtacctgactggagagccttaccatcatgcataagggcctctatagtataagtagcctctgctcctgcgaacttctccttatcagtcttacgtcccttaattacaggaattgcaagaacttcctcacagaagtcagcgtaaaggttaagcatctgctgtgtacgtgcctcagcctcttctgctgtagcatgtgctgtatgaccttcctgccataagaactctcttgaacgaaggaaaggtcttgtctccttctcccatcttacaactgaacaccactggttatatacctttggtaaatctctgtatgactgtatctcatctttatagaaatcacagaaaagtgtctctgatgtaggtcttacgcacattctttcctgaagtggattaagtccgccataagttacccatgcaacttctggtgcaaatccttctacatgatccttctcaacctcaagaaggctctctggaatgaacattggaagataaacattctcaacacctgtttccttgaatcttctgtccatctcattcttaatattctcccagattgcatatccagccggcttaaaaatcatgcatcccttgacgcttgagtaagacataagctctgccttcttacacacatctgtgtaccactgagcgaaatcctctttcatggatgtaatcgcttctactaatttcttatcttctgccataataaacctctttctatgacattacagacccgtttcatacggagcctgatgcgaatgctgcttcgcattgtccgcctgccattgacggcaccactagagtttatcatgttctaaaatgcttttcaagtaaagaacaagtgcttttattatacaatatgatattggtccaagaataaatccgacaaccccatacacaagtatcccgatatatataaccgcaagcattgtaaatggcgcaattcccattctgtcacccatacattttgactccataatctccctcacaaaatatgtgacaatatacaacaccacaagaatcaccgcatttttcacatgtccgaaaagcaggcttcccacagcccatggtatcagtaccgttcccgtaccaaatatcggaagtgcgtcaataatcccagtcagcacaccaagaagaatcgcatatggattgcctatcattaaaaatgctgttgaacacaccacaatatttatcgacattataataagctgcaccctgaaatatacatttatcaaattgcgaagccccacatgcaccgccccgacttcgtccttaaatatagtgttctcccgccagcttctgtacttctcaattccagccgccgcatatatcgttccaataaagcacaccacaagtccggcaaccgccataacgcaccatgttataaccggaacagaatgttttctcataattgtaaagaacatctgctgtccgtctccatctataattatccctttacatttttcaaaaaatgcgtaactgcagccttctttcaacttaatccagccatcaatacggcagcatacaagcttaaactgcccatcaaggctgttaatattctcatcaaaattggctatgaaatctttaagttcgcgaaacgccatataaccgacatacaacagcactgaaagaataataagcgttaccattgttacaactatactcgcagcaagcgtctttttctcccttaaaagtttcgccagccccactatcggcttctgaagcagcaccgcaaaacaaaatgcaagcaagaaaggccacacataatagaaaagtactttaaatataaaaaaaaccaccgcaataataacggcactcgccaaaagaagcgtcagccgcttcctgaaatcccacacattttcacccatatg

SEQ ID NO: 976 - DNA, 28177 bp, unidentified
  source 1..28177: mol_type = unassigned DNA
gcatgctccgggagttcgtggattttgccaatgtatttcactaactctcaatttatttctcttccaccggaatctgcttcagattctccacgggttccaggatctcattactgcggatgtcgatgatgggaccgccggttccttcaatgtactctctggtaatggtaacccttccgatgttatcatccttcgggatctcatacatgatatccagcatgaagtcctcgatgatggagcgcagagctctggcaccggtatcgcgcttcattgccttctcggcaatggcatccagggcatcgtctgtgaactccagttttacctcatccagctccaacagcttctggtactgcttaagaatcgcattcttcggctctttcaggatcttcaccagcatatcctttgacaatccctgtaaagtacaaatgatcggcagacgaccgataaattccggaatcataccaaacttgcggatatcctccacagtcaccttggataaaatatcggtatctttatcgtatttatccttcagttctgagttgaaaccgatggatgcggtcttggtcaggcgctccttgatgatctcgtccagatccgggaacgcaccaccgcagataaacaggatattgcgggtgttcaccgttgccagaggtaccatggcatttttgctgttggcacctaccggcacctccacttccgcaccttccagaagcttcaacataccctgctgtacactctctccgctgacatcccgggagttggtgtttttcttcttggcgatcttgtcgatctcatcgatgaagatgatacctttttccgccttttctacgtcattgcccgccgctgccagcaatttggataccacgctctcgatatcatcaccgatataaccggcctcagtcagagaggtggcatcagcaatagccagaggcacatccagaagttttgccagtgtctttaccagataggtcttaccggaaccggtggggccgatcatgaggatgttggacttttcgatctcaatctcatccatagtgtcagtggccactctcttgtaatggttgtatactgctacggagatgaccttcttggctttttcctgtcctaccacgtattcatccagactggccttgatcttatgaggtgccggaatgtccttgatattgaatacaggtttgggaccttccgccttctttttcttcttgagtttctgcttgttgggaataccgccgtctccctgaagatccgccagattcacaaaactgatattggggaatccgttctgtccgttaaactggttgaaatcattgggattgttcaacattccctgataatcgaactggctcacagtctccatggtcttgtgcatgcaatcatcgcagatgcagatatggttgggcagcttgaacattctgccggctttgctctccggtctgcggcagataaagcagacatcttcgtattcgctgctgtcctttttgtcctctgactttttttcggtggaattttcttttgcagtatccgccacctgtgtgtttccgttatttttttcgttatcctgagtttcactcacatcggtctctgttttttcctccttagggatcacttctctataatcatcattataattatctgtcatgttattctcctctttgtttcctaccactattccgcagtgtatctcggtaacacttcgtgttccctcgatatccgggcttcgccctatcatccccggctccaaagcatcttcgcagtgtatctcggcaacacttcgtgttccctcgatatacgggcttcgccctatcatccccggccattacgcaataatgcctgcaagcagtcatattgcataatacccgtgtctgacacttctcattgcctacgcttattatactcaatgaagtagcggggcacaagttaagtttttctaaaccatttataactattcatattttggtaaatattacaagacccgggcaaaaccatatgtctcgcccgggtctctttccatttccttttatttacctgttatttctttatttctggcttgcaggtctgctgcccagtgtcagattcagctcgatggatacatattcaccgttctgaggtctctgtaccgttacggttacggaatcaccgaccgcataatactgtaacgttttctgcagatcagagtaagaagagatactgctgccgtcaaatttggtaatgatatcacctttcatgataccggcattggctgctgcgctgccttcctctacagatactacatagataccttccggcatgttgtacatctgggagatctgggaagttacttccttcagggagatgccgatgtaaccgacttcatcctcagctaccttggttctggtctgacgctccatcagatctgcaatgataggacttgccgaagtaatcgggatagcatatcccataccttctacggcagtaccaccgatcttgttggagttgataccgataacctcaccattcatgttcagcagtgcaccgccggagttaccggggttgatggctgcgttggtctggatgaaagtaccggtagagccgttctccagaccggtagagccgttctccagagtgatctcacgattcagggcacttacaataccgttggtaacagactgaccatagccaagggcattaccaatagcgatgaccggctcaccaagcttcagatcatcactgctgccaagtgttgctactgtaatggcattcttggtatcatcactcagatcatttaaagatactgcgatcactgccagatccatatcggaatccagtcctttgacctgtgcctgtgcttcactgccatcgataaaagtaacggtcagagtatctgcactctctactacatgattattggatacgatcagcagttcatcatcggtcttacctacaatgatacctgaaccgctggctgcttcttcctgtgtatactgctgtccgaagacattggctgtctcggtaaagttatttacgatggataccatggcaggcattactttttctaccacattggatacatcggactctacataagtaacattggtagccagctgtgcactctgggtactttctgtcgttgcctcagaagtgatctcatctaccactgcggtatctgtgctggtcgtaaacatcccggttccctgctgtactgcatagaaaccgattcctgcgaacagtccaaagaacaatcccaggctgacacttaccattgccttccggaagtaaccgccatgttttggggttttcttaggctccgtattgttgctgcctgtggttccgcccatctgataagtggtgtaaccattcgtgcttcctgctgcactctgggtagtactatgattttcatagccataactgctttctgttcttgtctcattcagatctgctccactgaatgtaccggttgtattttcattgccggttccgtaaccggaaaaattatcattctcgtacatattgcttcctcctatcctgttgcaagtgagaaactctttttaccattacctgtttcatttcttcctctcaccttatgaacacagtatatccgtcaattgtgtccgaattgtgataactttctgaagcaattatgaatcctgaaaaaacagagagtctgttctgcctgcaagcagtctctctatgggtaagttattacactctactcaacagtaacggattttgccaggtttctgggtttatccacgtcacagccgcgtcccactgccacatagtaggagaacaactgcaaaggaatgattgccagagaattggtaaagtacggattggtctcggggatgtatattacataatccgacgctttctcaatggccttgttgccttcaatggtgactgccataacaaaggctcctcttgcttttacttctaccatattactgatggtcttctggaacagatccggctgggttgccaaagccactaccagcgtaccatcttcgatcagagaaatcgtaccatgcttcagttctccagctgcataagcctcggaatgaatataggagatctccttcagtttcaaggatccttccagtgaaatcgcgtaatcaataccgcgtccgatgaagaagatatctcttgctcccacgtaacggttggcaaaatgctggatcttctccttctgtcccagaagcagttcaatctgatccggcaggcatcttaaatctgtcagcataccggcgaacttctcctgatcaatagtaccacgtaccctggcgaatttcatagccaacatgtaaagtgcagttagctgtgcactgtaagccttggtggtagccactgcgatctcgggacctgcccaggtatacataacactgtctgcctctctggcaatggagcttcccaccacattgacaatgcccagtaccttgaagcccctttccctggactctctcagtgctgccagagtatctgccgtctcaccggactggctgatgacaatgaccatattacccttctgaagaatcggatcacgataacggaattcactggccacatccacttctaccgggattcttgccagaccctcgatcacatattttgcggtaactccggtatgatatgcggagccgcaggccacaatatggatcttcgtgatctctttgatctcttcatcactcatgttcagctcttcgatcacaatatcattatccttgattctcggagagatggtatcgttgatggtcttcggctgctcatagatctctttcagcatgaagtgctcatatccagccttttctgccgcattggcatcccagtcaatggtcaccggctgcttctcgatctcttcctcatccacggagaagaaacgcagactaccctgctgtaattccacaacttcctgattgtctacataatatacggttctggtatatttcaatatcgcaggaacatcggaagcgataaagctgccgttgtcgctctttcctacgatcagcgggctgtccttgcgggctgcaaaaatcttatccggctgatctgcaaacatgatccccagcgcataagagccttccacacgatgaagcaccttcgtgatggcttccagaggatttcccttgtaataatagtctaacagatgtgccaatacctcggtatcagtctcggatacgaactgataccccttatcctgcatctttttcttcaggggaatatagttctcgataatgccgttgtgtaccacggcaatggttcccgcattgttcatatgcggatgagaattgatatcgctgggagctccgtgagttgcccaacgggtatgtccgataccggaggttcctttcatattctctccgccgtgggtcaggttctccagaaccttaagtcttcccactgcttttctggtgttgatcttctcaccgtcaaaaatcgccatacctgcggaatcatatccacggtattccaacttggacagaccgtccagaatgatcggtgctgcctgttctgttccaatataacctacaataccacacatagtcatacatcctttctgttctgtttccagtattccttgttggaagtaaaagcaagtacccattttttcgggagcctgcgatagttctttcccagtaaataacctgcatatttacaggcgcattgcatataaaaatggggcaatccggcagacatatggttgctgcgcaaatataccgtcacatctttcaccattcgttttccctcggactccgaaggatatgctgcaaaaatctcgggatgctctgcctgcgatactcccaggtcaaagtttctgtgaaactgctgcccgttggtataattatgagaatgcaccacctgcgcatccgccgcataagccacagagtatcctgcttccaccgcctttgccgcatagatcatatcttcattaaatatcgtatgtctgacgaacccgcccagttcctcatagatctcccggcgataggccgcacagacattggagcagaaaaaggtcttgatccccaggctgtccaggtctgctgccgatttgatccgggactttgccggatagttaaattctctggtatagctctccaccggtgtcgaatcctctctgggcagctgtctcgcataggccaccgccacttccccctgcaggggttccaccagtttttcgatcagcctgtcatctttcggcatggcatcctgtgtcatcatcacgaagacatccgcagaagacttttttactcccatccgtctcgtaccgccatgatcgaactctcttttggatacatggtataccttgacattctgataggtttccagaaatctgattccgtagatcagctgttcaaaatatttttcttccgtattcagaagaatcacctgatgtaccggtacgctctgactgcccagtttatccaataatgtaaataattcttttcccggcttatacaggggaatgatcacatctatctccatgtcagagcgctcctcacttttccaatctctggttcattatactttaactcttattgcggcacaagccttttcctactgtccaaaaggcttataaccttcttggtaatgcacaagggagccccggcagattccggaagactcccttgtattcctgttgctttactctatacactgtttcttacttattcatataaggtgatgtgtcagattcaatcttattgctgtattccttcacgttgctggttacggaatagttggcatcatcaaacaggaactgatgcagccatactacattgctttcgagatttaccggaataacacagcttccctttgcaccgatattgccggtgtcacgcatggtctcttcggggaaacctccttcgtccactatgcgataatttgaaatattgcccagcagatccaggatgtccttggaatccagactggtgtaaatgtcgtcgatggcactgttgaataccttggacaatgttgcataatctgctttctttgcctgatcttcgattgcctgaatgacttcacgctgacgggcagcacgcttaaagtcgttaccagcggtataacggatacggcagtaagcagtagcctgcagaccattcaacagctgcataccggtctcagttaccggtgtataatcgcatttcaaaacttctgcaataccgatctgatagttgttgatatgcttgatctcctcagagtccacatcaatatagataccgcccagaccgtcgatcacttcgctcagtcctttatagcctacggtcacaaagttcgtaatatccatatccagattcatgttcagcatcttaaccgcctgctctgctccgccataggaataagcggcattgcatttctggtaggaatccgtaccggtattcaggtacgtatcacgatatacgctgaccagtttgatatcaccggtatccatgttgatgctggcgatcatgatactatcgcttcggctgcccttgtacaacaggctttccttggtggcgtccacaccgaacagggcaatgttcatatagcccttcatagtttcatcctgctgcacctcttcgggaatctgaagttcttctgtctccagaacggttaccttggggccctcattgttggtatgagtcattaccagatacaataatgctaccatgaacaggatcactacgatctctatgccaaagatgataaccttttttctcttcttggctgcacgctgtttggcagacattctcttctgtccgttcgcagctccggttctctgtccactgccggcaggtctctgaccgcttccggcgggtctctgtcctgtaggtctctgtgcgcttccggaaggttttcttccgcttccggcaggtctctgaccattgccgccattgttgttagaatttgttgccatcttgtcttctccttgtactaataagcatttttattgataaatcctgtaaagaacgtcataagaatgatcttgatatcaaatccaatggtccagttctcaatatagtaaatatcatattcgattctcttcttgatggaggaatcaccgcgcaagccattcacctgtgcccatccggtcagtcccggccgtacctgatgttttaccatgtaacggggaatctcttccttgaacttttccacaaactgcggtctttccggtctgggaccgaccagactcatatctccttttaagatattgaacagctggggaagttcatcgatactggtacgtctgagaaccttaccgataccggtgactctggggtcattgcgtaccgtccatccctttttctcttccgccgccgtctgcattgccatgctgcggaatttgtacatataaaacggcttattatgaagtcctacccgttcctgcttaaagatcaccggtcccgggctggacagctttaccagaattgctgatatgagcatgatcggtgaggtaataatgataccgaaaatggaaccaacgatatccattgcccgcttgatcaccatattgcctgtgttcgtcagcggtacataccggatattgatcaccggtaatcccatcagatcctccgtatagggtctgctggggatcagactgctgtaatccggaatgaatttggtgtgcaccccggatttctcacagatatccaccacaccttccagataatcataatccttcagggaaagtgtgatcgcgatttcatccagcttgttctccggaaggatgtattccagattaccaagcgttcccagtactttcactcccttataggtcgtgccgcccgggatgtgctcatccagaataccacacactacatatccccattggggattgctgaggattctgtcgatatattcctccgccgctcgggaataacctaccagcaaaatgtgcttcaggttgtacccctttttccgtatggaacgcaatgccttgcgcatgatgatacggaatacggaagtcagaaaaacattcaggacataaaaaattgccatgacggatcgtgaaaaattgatctcacggatgatcatatataaaataatgatcaaagccgccaggccaatggtattcgcctgcaggatactgtatatctcatgtctgcggcgaaccgtacgcttcggggaatacacactgcaccggtaatacaggaacatataaccgggtacaataaagggaagcagcatataataatcctgcaccggcaggacaccgatccccggaccgtcatttaagatataaaatttgatataataggcaaggacaaaagatactgccgtgatcagcgcatctattatcacaagaagcctgttaaagactttctggttgtcttttatcatacgggtcacccaatctttaagtccgaaaagcttcttttcaacgatttcattctacaataacggtggttttttctcaacttaagaatttatgaagcgatttcttaagatttcataagaattcgaaaaacattcaggtataattgccattgaatcttcacataattccatagatgactccattgaaagcgcacttttgcctgctttcccacaggacccacagtacgtttccacccttctgccagtccctttaaatatagttttcccattctcttcttgcaaaaaaacagaaattttatgccaaatccaagcaaaaagaacggcagattcagtatccactgtagtagaggcatatttttgccgatgacatagatattattggaagaagaaagttccgttttccgggaattgtagcgggatcccgtagaagcactgccgtaatgcagaacggatgccgtcggctcgtaccggttctcatagccgtagatccgggcacggtaaccgatatccagatcttccagataagcaaaatgcgcttcgtcaaaataaccgatctcctcaaatacctgacgtctgtaaattgccgctccgccacaggctgagaatatgctgacattcttgtcataatccacagcaggccggccttttccccgggaatatgcccatcccagaacgcagtagcggtctcccgcatcatccagcagctctggcttatcccacataagcattttggcgctgacggaaaagatcttttcatccttccgaatggcatcatacaatcctttcacaaatccagcttctactctggtatcgttgttcaacaggatcacataggggcttcgtgcctcccggattcccagattcaccgcatgacagaagccagtgttctccggcagggcgatcagacgcacctgcggttttcccccctcttctgccggtgcctcttttttgtgacaccattcgctgtccagatattccacgctcccgtcagcagaaccattgtctatgatcagcacttcatattccggtgcattttcctgtccctgacacagggaagccatgcattccggtaaatatttcattccgttgtaattgggtataacgacggttacttccttcatagtctctcccatttctccggatactccggcagatacagcagtcttccccgttttcgtaatgcttccgataattgcagacttaaaagccggatatctgccccggcaggcagtgtggagctgtcaaataccggctgttgttccggacctcttactacttccgtataaggcactcccacgattttttcaaacaattccctgtcagctgaccggatcctgatgcagcgaaggtctaacgcttctgcatcctgggacagctccgcccggtgaagataaccgccaaagtccttcggcagtccctcgtagaacacctttccgtccgcagtcattctgccgccggcgatcctgccgcggtttttcccagacagcactctgccacctacggcagccacatccggtctctcctgtaatacctctgcatattgtaaccgataaaatcctacatgtctggtctcctctgcctttgccgggatcccacgttctgccgcatgatcctgcagtgcacgcagccccgcttcgtaagcatatttcttgctgtggggattggctgctgtagatgcttcatggcatctccagtgatacagcactctgggaatatgaagaattctctcctccccggagcggccatctgcagccagcacctctgacactgcccgcagcaccagatcatagtcctgggcaccgtcgcattctggccggaaggcaagtttcttcatcagatctgcatccatcaccagaaaatggcagatatagttattactcaggattaaatcgtaattaaagtcttctttatggttgggatcgtaatattttgtctcatccccgttgcatttgtcttcatccgaataagcgaatgcaactctgacacctctgtcatttgctttggtaatagcatctgccatctcatacagagcatccggtgtcaatacatcatcatgatccagcaggccgatatattctccccttgcatagggtaatgcctgattggtattcgccgcaattcctgcattttccgtaaggtgtatatagtggatccttgcatccgctgcaatagtttccgcattttccgggagccgttctgtcaggaatccctggtttgtcaacgtctcctccacactgtgatcctctgtggcatccgccagaatcagttcccagtgaggatagctctgttgcataacgcttgttatcattctgttcagatagatttccggggtacggtacaacggcaccacaatgctgagtgtaaccggattatcccattttctgcaactttgcctttccagttcctcttccggacagggcacataaaaatagcggtctgtctctgtcaggcgttcccttacagagatccaggtttccctcaggccgttgcgttgcaaataatatagagttttcttaaggtttgctatgttcagctttgccacggatacctccacttttataaaagagcaaatcgcccttcccgggcgattcgctcttaaaaataacattaactattcagaaccccattcgcaaaatcgatcttccagagctttcctgaataacatacttgcatgctatgatgccagggtcaaaaggtctaagcccacatgagcttgctcataggtgggtgaaagaccttaggacccgccccgatatgagcataaaagtgggatgataatcccacgatatgcgaatattgggtaggattgtgggagtgcgtagcacggaacaatccgtaggcatcaaagtcgggggcttttgaccccgacatcatgctatttgctcatggtggttacagtacagcctttacatcctcggtcagcttctctaccttggcctgtgcatcctctatgctgttacctttaacacccatgtagaacttgatcttgggctcggttccggaaggacgggcgcagcaccatgcattgtcgggaagttcaaaatacaggacattagacttgggaagtccggtagtagtcttctcgccgctctccatgtcgatgactacatcgttcagatagtcacggaatttctccactttcaggtcaccgaatgccttgggcggattcttacgaagcttatccatgatctcggcgatctgtcttgcaccgtcgatacccttcatggtaatggtgtactgggtctccttgaagtaaccgtatttctcatacatggataccatcatatcccacagagtcatgttgtgcttcttgcagtaagccgccacttcacacagacacataactgctacaactgcatccttatctcttgcatgagtacctgccagacagccgtagctctcttccagaccgaatacataattgttgctgccggtctgctcgaagaacttgatctgctcaccgatgaacttgaagccggtcagtacttcgatcagctttacaccataagcttcggtgatgggcttggtcatattggtggtaacgatggtggttaccagtgcgggattctcgggcatagcgccggtagcagtcttctctctcaggatatattctgctatcagcataccggacatgttaccggtaaatgccacatactcgccggtcttggtatccttggcatacacacccagacggtctgcatcgggatcggttgccagaacgatgtccgcatccttctccttggccagacgcagtgcgtatgtaaatgccttgggatcctcagggttcgggtaatccagtgtggtgaagtttggatccggattctcctgttcgggaactacatagacgtgcttaaatcccagctcggacaggatacgtcttaccggcttgttaccggtaccgcataacggagtatatacgatcttgatgtcatcagccatttcctgaataacatcgggatgaatgatctgcttcttcagctcagccatgtacttgtcatcgatctctttaccgatcacctgatagaggcctgctttttccgcatcttctctgctcatggtcttcacggtatgataatccttgatggcctgtacttcggtgatgatgtccttatcgataggagcggttacctgtgcgccgtcctcccagtatactttgtagccgttgtactcaggagggttgtggcttgcggtcactacgatacctgcggtacatcccagcgtacgaagggcaaaggacagttccggggtaggtcttaaagattcaaaaatgtatgccttgatgccattggctgccagacatcttgctgcctcatcggaaaactcgggagacatgcggcgggagtcaaatgcgatagccacacccttgctctgggtgccgcgcttaatgatataattagcaagaccctgagttgccttacgaacggtatatacgttcatgcggttggttcctgcaccgatcacgccacgtaaaccgccggtaccgaattccagttccttgtaaaaacgatcttccacttctgcctcgttgttgcggattgccagaagttcatccttggtcttctggtcaaaataatcatcattcaaccagaaattcagttcgtccatataactcattttcctatcctcctgttttatcgctatctttatctttcttcagtaaacgctctccgccattattctaccatagattacctttactgaaaagagcaatttaacgtccgctaaccggatctctcagcgcgtagtcactgcgatccagagagaaattcgggttgtaataggggtctcctgcttccagctctgccttccatttttcacggaaatgctcggattctttgttgtaacgctccgccttctctccctgatcatccagacctctggaaatagattcataatgatacagttccgcaaaaggggtccatacattcagcagtcccagtttgcgcagtttcaggcagaaatccacgtcattcagagagatcacaaagctctcgtccagtcctcccacctgctcatacagactctttttcaccaacagacatgctccggtcactgccgtggcattctgggtataacacaggcgtcccatgtagccgaggttctgtaccggaatacgataatgggtatgtcctgcggtgcgatgtgcccccagtccgatgactacaccggcatgctggatcgtcttgtccgcataatacagctttgcacctacggcacccacatcttcccgctgtgcatacatcagcatctcttccatccagttggcagtgatcacttccgtatcattgttcagcaaaaggatataatctccggtggcataggatactcccagattatttacagcagaataattaaagtcaccatgataggtcaccacagagatccggccgtcctcgctgtgcagaatcccgccgtcatgaccgcagacggtatgcagcttgcatctctctgcgtaggaatcattgccggacaatcccagcagctgggaatagtaatcccggatttccggtgtggtgctgttgttctccaccacgatgatctcgtagttgctccaggtgctgttcttctgaatagaagtaatacatctcttcagatcttccacgtgatccttgttggcgatcacgatggagatcttcggatctcccagaatctgatagcggatccggaaaattgtggcacaggctctggtactggtgatctgaaaatgtttgaatccatgctttttcagatgatccgccacggcaccctttgccgcctcgatggcatagggctttgcgtcaatactggcggcggtactgcccgcatggcttctccagtaatacatcagtctgggcacatgtacgatcttttgtgctctgtccgtcagacgcaggatcatatcgtggtcctgcgcaccgtcaaaagccgtacggaacagttcctcgccttccagaagttttctggaaaagacgctgaaatgacagatataattgttggcccgcagattatccggtgcataatccggcttaaaatgcatggtcagcattttattaatattgtcctcctggaaggtggtctcatcacagtacagataatccgcaccctgttcattgatttccttgacataggcatacaatacggaaggatgcagaatgtcatcctgatcgaacagtccgatatagtctccggtggccagcttgtaacactcattggtgttgtaggaaatacctccgttatggtccaggtgcttatatacaatacggccatctgatttcgccgcgtaatccttgcagagttcttcgatgtaagcatgttccgcatcggaaccgtccgccagacacagttcccagttctgataggtctggttcatgacgcagtccagcatctgtatctggaactctctcttgttattccacaacggcacgagaatactgatcttcggcatataggggaataccgtttcttcctctttcttcctctgctccgcgtcgggaaagcttccggtaccgaaggattccatcaggctcttctggtgactcttgttacggatcttccgcagaatatctttgggaccaccgcaatgagacagccgttccttctgtctctgggcaaaatggatcacacttctggcaggtcctgtagccttccagaatttatttttcttgattcggtccagtttgaactgcagatcttccttctccgattccagtactacgatcttgtccgccagatccgcacatttttcatgctctctctcgtaggcttccttataattgatctcggtgttgctctctgacatatgtctcctccgtgatgctttcaccgcattttagcggatcatgcatctgttttattcttttgctgccggaagctctacggtcagatattttcccgtagtattccaaagtttcagcttgctgacacgattcaccacaagaacagcgatcgtatagtttcccgccggcagttgttctccttctctgaggacacaaaagccgcccaatgccacatttttctgatccggaagattttcctccagttcctgtcggtaggcaggcatcaactgcatggaccacacaccctgtccttctgtttccccacagggaatcagcaacagatgtttttcatagcaggcattatcgtctcccagaattacactgtatccctggatccgctccggtcccgctgtctctactctggccatcaggcagttatccctgcggatcttctgtaattcctctccgccaggaagtccccttttccagaaaggctcctgtaaaacattccgatctgtcagatatgccggaaccacacggctgtccagtccctcccggttcagccccttcgggtaaaaaggatcctctccccggaactgtggatgcatctggtagagcagttctctctcctgtaccagacgctgcattttctcaggactttcatcgcttccccggctgagagattcatggtgatatgcaaagcggtcgttccacaccacattgtagtatcccatttccagaagccgaaagcccagttccacatcattataggctacccgcaacacttcccggaatcctccggcctcccggaacacctctgtccggatcaggagacaggctcccgtcacggccacacaatcctgtgtaaaacggttccgtccaaaatagtagcttctgtcatcctccataaactgtagcttatgcaccggtcccaccggcagattgacaatgccgtcatgctggatcttcacggaatccggataataaagtttcagtcccacactgcccacataaggctgcaaggctctggacaccattttatccagccagtcattctcacataattcaatatcatcatttaagaacagcagcagcttgccatctgccagttctgcgccacgattacacatggtggaaaaattgaactccgcaggctcatatacataccggatcggtgttccggctgtccggatttcttccaccagctgttctgtttttttcctgttttcctcgttacttccgttatctatcagcaggatttccaccggaacactgccctccggacgttgcgtcagcgaccgcagacattttcccagtacggaaggattatctttggaaggaatgatcacagagaccctaagctctctggcgaacagttctctggcttcctctgccgctttggccgccagttccacggacagttttgcggattccgctgccgtccggtactcttcccaggggttctgctcatcttccgctttctcccggctggtttctgccggtccctgcaatccgattccagcagtaccaaaagtgccgtgaaacagcacttcttccagatgtccaatggtatgacagcctctctcaaatccaccggccgccagaaacagccggtccatcaggggacggatctcttccgctttcgaaaatactatttccctgccggtgctctctccttctgtcacagccccgggctcccccagtttctgcaacagtctgctccgcactgccacgacgcttcccacatagaagaaagcccggtaggtatccggagcccagcaaggcttgaaccaggggatcacacgctctccgttctctgacagcagatcttcatctccatagacgatctctgcctccggatgcttcacaaaatacgcattgatccgctccacagcattttccgccagctgtcctttctgctgcctgtagatcacgaattccgcaagaccggctctttccccgatctctgtgaccactgtttccgcaatctttttttcctgctccgcagcccattgcgcgtaggtcacccgcagctttgccagttctgcttcatactttttatcctgttgtctgacaagcatctgctttactgacgtccgaatgctcaagtttcctgtctccttagaaaaattttttcaccgctcccgccatgtcacttgccacagcaaggggaatctgcacgatctccattttcacagtcaggatgttctctgcctttctgtccaatgcatccacccggatcgtcagattcggatcctccgtgggaaataccacgctgggatgctccgcaccgtctgcggactttaagatttttccattggtggtaacgatctttttgtcctgcacaggaaccggctgtccgttcatggtaagctcccggattttacacacgcaggcgcacatggccggatccagccgtaaataatggacatttccatcgaaattcaccgtaaattccgcctgtttttcctctgcatagacgttctccgggaaataagaattttcttcggaaaatccctgtcccttgtcctcatagatctgtaccctgagttctccctccgtctgacggaaccgtccgatccattccgtgggcttataaatttcgccgcctaagagattgcggatctcacccatggacaatttctgtccggtcacatatttctgaaattccatctcctgctctctgtactgtctggcttcgttttccgtgatgcccagacgatccagaatacgatccagttccaatgcattacgtctttcatcttccagtacataacagtatacagcccggaaggccagagctctggtctctatggggcggtcaaaagtccattcataatcaatcagtgtccagtggtcaccatccaccagaatattggcaaagatcagatcaaagtccgccaccggcacatcctccctgtagcccactctctccagatattctgcgaacaggttgtgaaatccctccacatcctgtctgtccaggcattcgtccatcagttccgacagcggtctgcccggcacgaactcaaattccgcataaggtatgccgttctcttctcccagatggcagacattgacatccagactgcttcccgcataccgttccttcaatttttcataagcctccggcatatgacgcacatgggcttccgcttcttttgtcagcggatattttcggaccgtcttacagccttccttgtcccgcaggatctcggtgcggatccggaagctttccgcacggtcattggaatatctggcatatttcagatccagaggtgctccgatcaccgccatataggaattggaaaaaacggaaaacaatccttcctccacaattccgtcaaaagcactcttctcatcgaacaacagcattctgtcccggtcaaaattccgcagattgttggacagctctccacgtcctggaagataagcatcggaatagactgtggtcataaatttataatcgggatacggataataaaaactgcgttctcccacaccgcaggcatcgaaaatgcgctccagctttttcctggaaaacgtgcgtaccacaccgccctccggataattttcaatgccggaaaaccagctgcccagatgatcttccttgcatccggcaaaatatttcaatccgtatttgttctcaatggcaatcacgatcctgccgtccggtgccagatgcttctgcaggatcttaaggaaatcctcgtaaggcgtcttgccgcctatgtaagcctgtccgtactcaaaaacaccgatcagacagatatagtcatagtctgcgggaagttccggttccacatccgtgaaattgcccacatggatcgtcacattttcacattcgctgtggcggtaggcgttgatcaggctgcgcttcttcgagagatccacacaggtcacttccccggcttttcttgccagtgcacccgtgatggctccgcatccactgcccacttccagcactttctctgttttctgtatgggaaggaaatccacgatattttcccggagagcagacaaatgatacaggatcggccagctctttcgctccgcaatgatcctgtcatattccaccgtactgtatttttttacaatgtctaagatctcgtcctccacactgccgtcgcaataataatcctcgccgggatatttatccagattcagtgtgatcttcccgatggtctctgtcattccttacttctcctccgcatcccatacttttgtttcggaatccatatcataatatcctacggtgttcttgtccgataccaccgtaatattcaaggcatcatacagtctgtgatatacctcgaaggtatcctgattgtagccggtcactcccagagacagcagatactcaccaccctgtaagttcatcttctgggtaaaagtcacatttttcacctctcccggctccacgctgtccagaaaagccttttcaatcatggtatttgtaccggtgatctccacaccgatgacgttttttacagaaaatgcaaaaatgggggccggaatatgatccataaaacgaacccgcatatggatggtaaacatactgcccttcaggatcgcattggtgggaacccctctgtcatccgtaatgtaaaattcctcaatctgtgcctgcttcgtaccgtattccagggcattgggattctgccccttggcctccatggaagcctgggaagcatcggtccccttctcatctgctttttgggcagctgctctctgcaggtcttcatcatccagcagactggcagtctcttctcccacactctctgggccgtcatactgtcccaccaataccctcttgtaggtgtcgatcatagccttgggactgccttcgcccaggatatttccctgattcagcagatatacacggtcacaatatttgctgatactgctcagatcatgactgacgaacacaatggtcttgcccatcttcttgaattcttcgaatttatgataacattttgcctggaaaaatacgtcaccgacactcagagcctcatccacgatcaggatctccggctcgatattgatggccaccgcaaaggccagccggacgaacataccgctggaataagtcttcaccggctgatagacgtaatctccgatatccgcaaaacttaagatctccggaagctttgcctcgatctccttctcggaaaatcccatcatcgtcccgttcagatacacattttcaatgccgttatattccatattgaatccggcacccagctccagcagagcggaaatacggccatttaccagcactcttcccgaagtgggattcaatacaccggtgatgatcttcaggatcgtggatttaccggaaccgttggtaccgataatacccaccgtttctccctgatagatcttcatgtccacacccttcagggcatagtgaagcttatgcttcgtcttttttccgaagccgaaagcctccttcatccgatctgagggcttatcatatagtttatagatcttctggacattatcgacttcaatagccagctttttcttttcctgcatcaattttaatcctcgcttatcagcgttacactgtctttgtcataccatatggccagagaacggttggcctcgttattttcatcctccgagaggtctcccatgcacaaaaaccagggcttgtagtgataaggttgcagctgtacatcatcctcatctcccaatagcttatccacccgttccagatattcctgatggaaattatacgcttctccggtatgcacatagtaataggccccataagccgaataatgtcctgcctgattgggtgacacctgaaagatcatgataaattccagacccataatcgcataaaaccaccacactgcggctccgttccagttcgccagccatcttgccgcgctgcctgatgccttcttctgcagtctttgctgcagccagccacaccagtatatttcgttcaggaacaacagcaataaatatgtgatcttcaccgcattcagagttctggacaatccggcatgtccgagggaatacaggcttggggtgtaaccggtggcatacaggcagaaggaccacagaagtacgactcccggataccggaaacgatactccgtctccttaagtgcctgccagatcaggggtaacagcatcaccattaccataagaacaatagatcccgtaaactctggaagatgttttactccttccagaaaagatctgccaatggactccaggggactgtatccccagccgacatagctgcgggcccgcacggaattgcccggtgccgctacattcagcccaaatcctataatgtataccagcgtagcaggcaacagccacagtccctttttccggtgttccactaccacacttataaacagaatcgtcaacagcgataagagtccctgcaatgccgtgacaaaattgcttccggccgtgatcatggaaagcagtaccgaggccgtaaatagcagcccggtagcagttcttccttctgctctctccaggcagattgccacagacaacatcaacaatccaaagccgtgcattcccacgtaatgaactccgccgttataccagtagaagccactctgtgcggaataaataaacataaagactgccactgtaatcactgcctgtgctgccaggccggtccacttttccatgcccagtactttccgcaggatcacatgggtaaatgtcatggtacccgccagcaatagcagcaggatgaacactggaccgaggaaataatactgttctccccagattgccggcatcaatgccataaagaaaatagaagaataggttccctgccacgcataccactgcgttctggagcaatccagtgcaccggagatggcagcccattttgactgttcctgctccatggcagctctggcaaatcttccgaaattgtaatcatcataatacggaaccgcatagactgtcagacgaaacaatggaatcagcgtcaacagcagcagtccgcagcatcccacggccagcaggatctgtcccggcttccataaccaaaattttctaaatttttcacgagcacccttcaattactttcaccctttctgttttccccacaacagttttgtaatgcagctcctccccacaaggttcttcatctataaaagttttgctatgctctgttttttataatacgatttctccgttcttcgaactctcgaaatcgtaacaatcattcgtattatagcacgtctgcgaaatgtaccttcaatcgtttgaaaataacggctcccaacccgaacagtactaccgttacgatccagaaatacatggtggaaaagaaatcctggaaaaaccattccttctcataaatagcacttcgataaccgtttacaatatacaccagcggattcagcttcagaatcgtgatccaattgccggacagggaatccagattccacaaaataggagtggcccacatgccgatctgcaatccgatactgatgatctgagacagatcccggaaaaatactactactgcacaagtcgtatagctgagtgccagtacaaaaatgaacaggcagaagctatagtatacgatctgtatcgtatatatggtaggataatacccgtaaattgctgccacaatcaacagcagacacacaaaaaatacatgaataaaggtggctgcaataatcttgatgataggcaggatactgatcttaaatactacttttttcaccagatagttatattccagcagcgcattggttccattgtttaatgcctcactaaaatagaaccagggtacaagcccagccgtcaggaacaatacaaagggtacttccacaccctcccgcaggggagtactcgtattacccatgatcttatcaaaaacaatgtaatacatagccaccgtgaccaccggctgtgccatagcccataccgcacccagataagatcccgcatatctttttttgaaatcatttttggccagtttccagatcagatgacggttctggaacagttccaccggcagtccggtgaatttatcataccagtgaataaaagcaacgcatgccgccgcgatcactacgcaggaaatgatcttcttggccagttcctgtcccggatccgccgcaggtcccggattcttatggaatacaataagtactgccatgatcactgccgttgtcacaaacagggcaatgcccgcttttttacttaccttcattctctttttccttcacgtactcttccaatgtgccccacttggtatccttctcggaaagcgtcagttccatgccttctggaatcggccatttcacaccgatatccggtgtgttgtaagcgataccgccctcatcatcggaatgatagaaatccgtacatttatagcagaattccgcataatccgacagtaccagaaaaccatgtgcaaaattcttcgggataaagaactgcttcttgttctcttcagacaaaagcactccgtaccactggccgaaagtcctggaaccttcccgcagatccactgccacgtcatagacttctccgcggatcacgcgcaccagcttgtcctgaggaaaatgtttctggaaatgcagtccacgcaatacacccttcttggaagcggactgattgtcctgtacgaacacctcaggaattcccgcagccttgaaatcgttataattgtaagtctccataaaatatcctctggtatctccgaataccgtaggagtaatgatctttaatccttcaatttcacaggtttctactgttattttacccatttatttcgtcctcactctctatttttattgactattcgtaggtgatattcatgtccacacgaccttcgatgccgtccacttttcccttggaggtatactgccaggtcttataatatccctgatataacggaacactgcgatactctgccagccagatatgatagttttccagtcttgctgtctgcagattattgttgtaccagttacggctggcatagacacccgccgtgtatccggcattttctatggtcctgcagaacgcttcacataccagtgttctggtctccgcatccagactgtccgcacggccgttaccgcccgcaccttcggtatcgataaataccggatagttcagccggtaatcccggatcagttcgatcaccgcggaagcctcttccacagcttccttctcatccacagcctgggtgaaaaagtatacgcccaccggaattcctgcggcctgtgcacccttcatgttcgtcacgaacatgggatcttccaccaggcttccggttaccgaaccgcggtatccggcacggataatggcaaactgcactcctgcgttttccaccttatcccagtcgatctccttgttccatttggagacatcgataccgacctttgcgttaccggacgtggtctgcagcttctggatctctgtcttgtccgcatctgccagagcacctgccacggcgctgtcctcggcttctgcatccacttcatcctccgtcttgatcaacagggaaatatcgtcaatggccagaaactccactttatccttgacgtgaactcttgtctcactgaccggaaccttatatccctcaatgggaaggagctcaatataatagtctccggaatccagatctccaatgtaaatgataccgtcctgatccagatccttgtaatctcccaaaccgtccagtcgtacgtagaagctctccccggtcaccggacttccttcgttgtccacgatctggatccgcagatccttttctatggaggtggctaccagagatagacggttgctgttatcctttgcagcttccagaattggatttacttcctgatcaaaaaacgtattatcttttaaaaatgccttcagatcattgccgatctgaccatccggtgagaccgtctcttctgcctgatcgccattttccgccggagatgcactgtcacccgctccggcattctgagtgccggatgccggcggtccggaagctgccgtaaactgctccctgttgacatacatgaccagcagtgccaccagcaggatcaccgccatggaggccagaatcgccattttccgcagcttagagtccatttgctacctctaccagatattttccgtagttcgtcttaagcagcggctctgccagagcaagcagctgctctttgtcaatgaatcctcgcttgaaagcgatctcttcaatacaggaaatgtacagaccctgtctcttctggaaagccgccacaaaatctgccgcatccagaagggcatcatgattgccggtatccagccatgcaaagcctcttcccagtgtctctacctgtaaactgcctctgttcaggtactcgttgttgatgctggtgatctcaatctctcctcttgcagagggctttacattctttgcgatctccactacagcattgtcatagaaatacagtccgggaaccgcataattgctcttgggatgctccggcttctcctcgatggaaagtgccttgccgttctcatcaaattccactacaccgtattctctgggatcacgcacataatagccgaaaatagttgcgcccttttctctggcagctactctgcgcaatactgcggaaaagctctgtccgtagaaaatattatctcccagtaccagtgccactctgtcattaccgatgaaatccgcaccgatgataaaggcatctgccagcccgcggggctgatcctgcaccgcatattccaggtgcatgcccagctggctgccgtctcccagcaattcctgaaataccggaaggtctcttggggtggagatgatcaatacctctctgatatctgccagcatcagtgttgacaggggataatagatcatgggtttatcgtacaccggcatgatctgcttggaaatcgcttttgtcaggggatacagtctggttccggaacctcccgccagtataattcctttcatttcgtcctccgatccgcccttttcgggcttctttttacttgttttttaacacaccgaatgggaacgacgttcatcgttcccatttaacaggtattctttacttttcttcgtacatctcattgtagtacttctggtaatcaccgctggtcacattattcatccagtcttcatgctcgaagtaccaggcgatggtcttgcggatgccttccttgaacatggtctcgggataccagccgatctctgccttgatcttgtccggtgcaatggcatatcttctgtcatgtcccttacgatcctccacgtaagtgatcaggtcgttgttaatatgtgccttgcggggatcggaatccggaagcatctcctgcagagtctcaatgataatgtggatgatctcgatattctgcttctcattatgtccgcccacattgtaggtttcgaacagtcttccctgttcctgtaccatatcgatagccttagcatggtcttccacatacagccagtcacggacgttcttaccgtcaccgtagaccggaagctttttgccatgcaatgcattattgataatcagagggatcagcttctcagggaactggaaaggaccgtaattgttggagcagttggtaatgttggcagggaaatgataggtatccatatatgccttcaccagcatgtccgagcttgccttacttgcggagtaagggctgtggggatcatacggagtggtctcatagaagaatgcattgtcatcatcgggaagagatccgtagacctcatctgtagatacatgcaggaacttcttgccttctttgaagctgccatcgggaagctcccaggctgccttggcgcagttcagcatcactgcagtacccaggacattggtctgtacgaagatctccgggttgcggatacttctgtctacatggctttctgccgcaaaatgtaccacacggtcgatatcattctctgcgaaaattttgctgatggcatccttgtcacagatattagccttgacaaaggtgtagttctcacgcttctccacgtccttgagattctcaagattgcctgcataggtcagtgcatccacgttgatgatacggatttcattatcgtattttttaaacatgtaatgaatatagttggaaccgataaaaccggcccctcctgttaccagataagttctcat

SEQ ID NO: 977 - DNA, 25678 bp, unidentified
  source 1..25678: mol_type = unassigned DNA
ctgcaatcaaatccatactgccaaactccgcagggaaagtgcgctgcccgtacagggccatgcataacagggagataccggcggaggcgatcatagcaatgacggcggggcgtagcccgatcaagatgccctgcataacgctaaggccgcggaaacggtaatacatgtaggccagcgccatgacgatgacgcaggacgggaaaatacagccaatcgtggcaatcagtgccccgggcagccccgccacctgaatgccaacaaacgtcgcagcgttcaccgcgatggggccgggcgtcatttcggaaatggccatgatgtccgcaaagcctgtcatcgtcagccaggggtgaatatccaccacttgattctgaatcaagggcatagccgcatagccgccgccgatgctgaacaggccaacttggaaaaagctccaaaacagttcaaggtagatcatttgtcgccctcccgcttttgcagatacagggtatccagcgcaccgatgacaccacagaccagaataatcaggatgatgttcaccgagaagaagcgggtcgccacaaaagccgccagcatgaccgtaatgggaagccagcgtttctttttcagaataggccacatcatattgatgacgacgtcaaagatgactgccgccaccccggccagcatgccggccatcgccatgctcacgtacttattggagcggaacgcctgatagaacacggagatgatggaaatgatgataagcggcggcagtgctgcacccaccacagtaatcagtgcgccggggatacctgccacatggtaacctaccaaaatagaggcattgatggcgatggagccggggctggattgggcaatcgccgttagatccagcatttcttcctcgtcaatccaatgtagttctttcacgaagcgctcccgcatcaaagggataatgacgaagccgccgccgaaggtgcaggcgctcagcttaaaggtagagagaaacagctgccagtatttatttttcttgtccaatagaatcggtctccttttcagtgatacatttgaacagcgcggatcatttcgtacaggcgcggttccgtgtaggcgaaaaacttttgtagggcgttgcaatagcaactgcgctgcgctgcagctgccgtatttcggtcgcgcttgcagccaccacggcacagccgtacccatttgcattgctgacattctgcaggtatctgccagccatccgtgataaacgttcgcattttttcgccggtaagcagcgattgcagggtatcgttttgaatcgtaccaagtttataggcatccaagcagaagaagtcgcacggatacactgcgccactctcctccacgaccatgtagacaccgcaggttccggtcgtggaacaagttcccgccgggccacccaaaagtagctgaatataatcttcaaacaggcggatgctgacataggtgatggttctccagtcgcggtaccatgcgtcgaacagtgcgcacaggaactgcgcatacagttccggtgtgagggagtagggcatcatgcacatccggggtgccgtccaagctgatacctacgagaaagtgttctttgctgaaaaatcagcccatccatcggtaatggcaagaccatttgtctggatagcgtattgcacggcaacgtgcttttggttgtactttcgcaccgtcttcgtaaagaaacaaaagaaatccagtccggtcagcgttggctcgccgccctgaaaggcgaacgaaacaaagccgcccggctcaagttccgcaaagcagcgttaaatcagcgtttccgtcgttgcctgtgacatcatacagtcgtcggggttcacgcaattctgctgctcatctcggtaaaagcaatattggcagcgcatgttgcagtagcccgctgcgggtttaatcaggaattgaagctgcttcatagcacctcggtatgctgtaatacggtcacgggtgttttgcccacaagcagggtgtacccatcggtgtaaccctcttcacggttttttagagcatcaatcagcagagtgcgcagcgccgtcacgcgctctgggttttcctccagcacgttcttcgtctcattcgggtcgtcgcgcaggttgaagtacagctctcgcccggtctgagagtaccagatatatttatcctttttcgtcaggataaagtgcatggaatcctcgcccagtgtatgctcaccgtgcagatattcgcgttcgacggggtgcaacaggctcgtgccgtccacggtttcgggaatcggtgcgcccgccagctccagcagcgtgggcatgacgtcgcgcagttctgccaaatcagtgcaaaccgtaccatgcttgcccacatagcgctccggtccggagataaacagcggcacccggatgctgccctggaacggctttgctttctggaacatcaggtggtcgcccagcatctcgccgtggtcggacacgaacagaattatggtattatccatgatttgctcctccaccagtgcggagactaaacgcccgatttgatgatccatgtgcgtgatggccgcatagtaacccgcccgcaactggtggatgtagctttcatccgaaggtgccgtctgggcatggtagctgtggctgtcacgttcccagcggacgcagtcgttccaatcaccgcgccaaggctcggccagtgactcatctttgtacaaattcaagtaatactccggggcatccagcggaggatgtggccgcacaaagctggccatcaggaagaatggcttcgagcggtcacggcagcgcagaaagtctcggcactcgctggcgacccagttggttgggtgatacttttcctcgtagatccaggggcgcacgacccagctattgcagtcaagaccagtgtccaccgggtctgcatccacgccaagctgctgtttgagccaccaataatagtcatcggccacacgctgatcctcatagctgggcgtggtggggcggcggtaggcatggagatagccatcatgcagccgtacatcatggaaacccaggttgttgcgcagcggatgaacatgcattttgccgacacactgggtatagtacccggccttgctcagctccccggccagtgtgtggggataatcccacggcacaagatcctcgtacccgacgcgacccgtgtgctcctgggacatgcctgtatacagcgtagcccgcgcgggaacacaggtcggacaggcagaataggcattttcataccgcacgccctcggcggccagtgcatcgaggaacggcgtttttacatccgggtgaccggcaataccaaggcagtcgccgcgcatctggtctgccataagcaggataatattaggatgtttatccataacaaacctcgtatcaatgtttttgcagccaaagggtgccgcacagtgcggcacacccttgtcctgctttatagattataccatttgatctcgttggcgtccatgtgcagggtaaagctgctgccgtcgccagtgtaaacagtggtatcctgcggctcgtaggtgttattcacgacacagtacttgccgttcttgacataggcatgtacttcgacattgtagtttgtgctaaaccacttgtgcaggtcggcctcgtcgtgggcggcccacaggatggctcggtacagcacgcggttgttcacgaagctgtagggcagaccgctgatgtagacgccgcgaccctgaccgtactcgtgggcggccagctggacctccttatcacgctgaatcaaaatctcggtgccctcaagcgcgaagatgttctttttgccctcgccgaagtccacatcatggtcggggcagtcggccagaatgaagtgatcgcggtgctcgtcccagttgtacttgtcgtagttcagggtgaagcccgtttctttttctacaccaagcggcgcggccagctgcaaataccggccctgatactggtggccgccgggttcgccgacgccgatcagaccgccgccacggtggacaaagcccttgacagcggaggaaatctccggatcctcccagaccttgccgccggtatgggcggtatcgccgtcgcctacgttgataaggacatcaatgctgtccagtaccttcgggtcgaccttgatgtcgtcaaagctgatgaacttcacatcaaacggcgcaccggacagagcctcgataacacccgcatagctgtagttctgcttctggtacagtgcatggtgaaccatgtggcagccccaggcgcgctgttggccccagctgttaagcacagccacggtcttgacgcagtagggcgtggtgcctttgatgttctcgtacagctcgcggaactcgttgcagacgctctcgacataatcgagaaattccgggaactcgcaggccagcttcaggtagccgccgtagccgatacgatcaatgggcttgcgcaggatggcacggcgagccgtgacccagttcaccttggcctcgcgcacggggtcgccgccctcgtggaaggtatcggggaagaagtagggcaggaagcgtccctcggtgtacttgacgccgggaatatcggaaatcaggcgcagcgtgctgccgttgccaacactgccgacgatagcatccacgccggacttttgaaactcgggcatgaacggctcgcagccgatccagtggtcgccaagaaacatcatggcttccttggcgtaggcgtggacaatgtcggtcatttctttcatcagaccggcgacctcgcggcgctggaaagcctggaagtccttgtactccttgctgggcacacggtactggttgttgtagtagccctggtcgatgataaactccgggcggaacttatagccgacctctttttcaaactgctccaaaatgtaggggctgacagaggccgagtagccataccaatccacgtacttctcgcggcgcagctcgtcaaacaccagcgtgaacaggtggaagaaggtcgtaaagcgcacgacattgacatagggatggctttccagatactcacgtaggcggcgtagggtgtaggcgtgggtcttgggctggcgcacatcgaacgggatctggtgctcgacatccttccagtcgttgatgaccgaattgtacatgtggacgggatcccagatcaggtacgccaaaaagctgaccgtgtactcgtggtaggcggcgggggcgtcgatgacaacgctttcgctggcggcatcatagtgccagtcggcggtggggacaggctcgcccgtcgtgcggtcgatgacctcccacaaacgggtgatgtcatcgtggtcgttgaccatcatcagttcgcggctgatgcccgtcatcagggggatggtcagcgcatcgtccgcagcggtgtagaacggcgtcataatgtagcactgctgcgtttcatcgggattggcttttgcccatgcgttgtccttgcgggtggtgtagtaggtggcataaatcttggcgccagtgtccttcaactcctgcgggaactcggtgccgtcgcagtcgcggatggcatccgcgcccaagcgcttgagcaggtcgagggtttcagggacggcgtccatatcggtggggatcgttacacgacccatttttcttacatcattcatataatgattctccttaaaacgtaatattttgaatggaggaaagtcaaatcaacccttaacgccgccactggtagccccgacaataatcttttcagacaggaaaagatacagcaggaaagtaggcaggaacacaatgataactgcggcaaacatagcaccgtactggccggaatacttcattgcattgacaatctgcaacaaaccgacaccaacaggggtcatagaatcgctggtggtgaaaatcagcgccatgaagaactcgttccacacagacatgaagttgaaaatcgtaacggtaataatggcgggctgaaccagtggcagcataatctgccagaacgtccgagaatggctgcatccgtctatgtaggccgcctcctcataagaccgggacagtgatgagaagaaatccagcaggtaaatcgtggtatacggtacgcgcagcataatatacagcacaaccaacagcacgcgacccttgatgccccactgcacagccaaagagtacagtggcatgatgatcataatagtgggaacactcatggcaatgaccaagccgatacggatggtcttgccgccgacgaacttccagcgggaaagcacataagcaccaggcgcggaaatcagcagcacgcccacacaggaaacaatggcataaaccaagctattgaagaaatacagcgatacattttgggtgttccaagccgtaacgtagttatcccacttcaggccattggaaaagtccataactctgcccgtcagaatttcctttgttgaggaaaggctggcgcagacgatccataacaggatggcagccgtgagtgcgatccatgcgcaaacaatgatataaccgggcagaagccgaagctctttcttccagttgattctatcgtgatattttcccataaccgctctcctaccttaatactccagatccgaatctttcaagatcagattggtgataacatacacagcaatgataatcaaagtcagcacaacgccaaccgctgcgcccgcaccagcatcgcgctcgacaacgcccttgccgccgaacactgtatcgtacaggtacacaacgggcacaatggtagccgtttctgtattgatgggggagaacatcttcgtccacaggaagaatgtagtcgcattgatgctccagaaagtaacgcaggtgcgaatcacacctttcagcaggggcagcgtaatctggaagaagcggtcaaagatattcgcgccgtcgatggtggcagcttcgtataaatcctgcgggatactttcgatgccgctgatgaaaatcagcatatagtaaccaacgctgccaaaaatgaaggcaatcatcatggcccagaaaatcagatctgtacccagccagcggacattctcaccgccgaatactttgacgatctggttcagtagaccataatcatagttgaacacatactgaatccacatggtagccagcgccacggcactaatgatgttgggcatataaatggcggccttaaagaattttgcgccgcggatgccgctggtcaaaatcacggccatcagcatagacaggcacatggtaatgatgccgcccaccagccaaatcatcaccatatttttcatggaactgataaagccggcattacgcaggattttgaaatagttttgcagcccatagaagctccatgtacttgtagatgccgtaaggctctctaccttaaagaaactcatgataatcgtccgaacgaccggatagacatacatgaacaactggcaaagaacgatgggcagaatgaataggaaaatcattgtcttgttctttttcatactggtaatacctcaaaaatgaaatgtcataggcaaagacagcacccattcaggtgccgcctccattcagatcgagggaatcctgaataaatccattataaccgcatcgcttgacggcgtaccatgatttattataggattagtcgcacagggtatccaagtaagcgcagtagtcagcgccggttgcgtacttgccttcgaacagctcgatcatggaactcttgatgagggaccagtcgtccagcgtgttcagagaaccacaccagctcatcggggtggtggtattcttcagtgtctcaacagagccagccaggacagactctttcaggcgggtgtcagcggggatctgaccgcccttgtcaaccagctcctgcccgcaggtgccggtaacaatggtcataatgaagtcaaatgcagcctgcgggttctcacaggaagaggagatggccagagagtttgcaccggcgtaagcagaagcatcaacattgccatcgacttcaggatagttgaagaatccccagtttacaggctcaccaacagcagcatcaacctcggaagtgacatagtttgcgcaagcaaccatagcagccgtgtcaaggccaaccttggtctggctggcaggataagcatcgggcgcgccctcggccagataaccagcgttcacgaaatcaatgatttcctgtgcagccgttacagcagcttcattgtcagcccagccaccgttcttacccaactcggcaatggtgtcctcgcccagatggcggaccagatggttgtagaagttgaagtttgcgtaagcaccgtccagtgccagcggctcatagccgttgtctttcagggtctggcagactgtcaggaactcattccaagtcttgggggtgtcggtgataccgcaggcatcgaaaatgtccttgttgtagaagatgccgccaatctggggctgctctacgatggagttgagataaccagcccactctttggcctgatcattgaagcaagcgtagctgaagtcatcataaccgacagcgtctgccatctcggtcaggtcgtaggtgtacggggcataagcgtgaccgatacggttgtaatcatcctcgaaaatgtcaagcttttcgccagattccagtgcggcagaaatcagggtgttgacatcacggcctttccactcgatgttgacctgtgcgccggtttcagcctcgaaagcgtcggcggcggcctgaattgcggctgcctgaacctcaccggcagaccacatggaccacatggtcaactcaacgccctcgtacttcttgccatcggtagccgtagactcggcagccgtggattcagcaggagtagcagaggtagcctccgagttttgagtattgccaccacaagcagccagagatgctgccatagcagaagccatcaaaagtgcaacaatcttcttcattcgtgttttcctcctaagtgtaaattctgtgtcgggattacctccctttcgcagtgatttaagtgtagtgcttttccagttttttagcaatcattatcttgctcacttgttttacaatcttgctatttcgtctctttttggcacatcgccggattttcgcgggcatttattatgcacttttaccatttactatttttttgtaaaagttggttgttggcaaaaatgctgaataccgtcttgcgcttttcagtcttgtgcaatatcacctgacttccgtcgtttctctcaaaacctagtactcagctgtcaatcagcatggtgaactcaaagatattttcaatctctttttctgtcagatacagtgcatcgagattggttaaaccgattatttttttgattttttcatgaacgctttggttctgggaaatattgatattaagttccatcgcctttgtctgcgaccctgaagtcacgcataaaatttacaagatcataggaactgatctcgtttcagactgtagacaaagttccttcctgtgagggagctttgtctacagtctgaaagtaaccggaactctccggtcactctgcattgccatctctgaaaaatatatccagttttcccagacatttgatcaatgtcttcatttcttcctcgtccagatcccgtatgatggtgtggatcattttcctgtggaaatctctgtggtggaaaaaagcttttctccccttctccgtcagggttaccagcaccacccgtttgtcctgtgtgctgcggttacgctccaggtagccttttttctccagactgttcatattcgtggtcagggtacccacggtgacatgcagttccccggcaatcctggacatgctcttgggttcctcgatgccgatagcctccagaatgtgcatgtcattatttgtaatatccttgaattcgtctgttatgaccgcctttgcctctgcatccatcacgttatggaacaggttcaccagcagttcattcagtacccggttgttgctcttttccatagttttcccaataaatgtctctctggtataccggcaatgctcccggaccgcaggcttcctgtctaccggaccgcgtccatgccgttgtcgtgtctttagtcgttatcagtataccgtctaccaggtcatcacgcaagccccaatcgtaagcccggcaccgaatcccgccagaacgatgcggtcgccgcggtgcagctttctctgcctgttcagttcgtccagaagcaccgggatggaggcagaggacatatttccgaccctttccagattggtggggaatttgtctctgtctgcatgcagtcttttcgccactgcatcaatgatacgtgcgttggcctgatgcagtacgaacatatcaatatccggcacagcaagtccggcatctgacagtgcttcctcgatgcactgtggcacccgtctggtggcgaaccggtatacttcctgtccgtccatctgaatataatgttccctgccatccgtcggctggttttggtccgtttttgccgctgaagtccttgcatatggggttgtcagttctcttgctccgcattgcaggactccgccaccggtgccgtcggagtgcagtgcccggcccagaatgcctgctgccggtatccgtttctcctccgccgtctcctgcatccctttctctgtctccggcaaagcgttactgtattccaccacccgagactccgtcctgcatcgctccacaactaccgccccggcgccgtctccgaacagaatacagctgccccggtccttccagtccaccagcttggacagtacctcactgccgatgatcagggcatttttcgccaatcctgtcctcagataagcatctgcggtattcagtgcaaacaaaaatccggaacaggccgcattcacatcaaaagccaaagcattcaccgcgccgacagctgcctgtacctggcaggcacagcagggcagatactgctccggagaacaggttgccaccaggatcaggtcgatctcttccgctctttttcctgcctgttccagcgctttgcgggcagcttctgacgcaagtgtcacaaccgtttcgccaactgacacatgtcgttccgcaataccggttctctcccggatccattcatccgaggtttccaccagctgttccaattctttatttgtaacgatccttcccggaagtgcacttccggttccggtgattcttatggttctcacgccatttcctccatgatatccactgttctttctattttctgcgcccgccaggcattgctgccgcagaacagcagtccgttatccacatctcccattgccgcattgatcaacgctctggtgatgcaataaggtgccgtcttcgggtcgcaggtcttaatgcaatgtctgcatccggtcataaaccgttccccggccgccaccttttccagaaaagcattctgtatagctctgcccggcattcccaccgggcttttcacaatgacaatgtcttctttccgtgcgctgagatatgcctgcttgtatgcatctgccgcatcacattcctctgtggtcacgaaacgggttcccatctgtacccccgcagccccgaggtacaggcaatgctccagatccctccggtcataaataccgcctgcagcgatcagtggaatttccagttctgctgcctgccggatcattgccgtaagttccttctcatatgtctgcggtgtatacgcatccagttcttcccgcttaaatcccagatgtccgccagccagcggcccctccgctacaatgaaatccggctttctgtcgtattttttcatccagtattttgtgacaaccgacagggcacgggtactcgacacgatcggcgctaacatcgtccggtggctgcgcccgggcattccgttttccgtctctgccacgactccgggcagatccagcggcagtccggcaccggagataatgcagtcggtacctgccagcactgctgccctgacataatcctcatagcgctgtgttgccaccatgatgttgacaccgatgataccgccttttgcgatctgccttgctttttctatttcttttccgatagtgcgcagattacaggctatgggatctctgtcaaaatccggctcccggaaaccgatctgggcagtagaaatgatgccgatcccaccggcagctgccactgctccggccagcccggacagactgattcccacacccatgcctccctggatcacgggactatctgcatgtaattcccccaggatcatttttccgtgcttcatcccacatcacctctcgttactgctttaatacttgcggaatctttcataacgttcctctgcgatctgttcaccggtcataccggtgtatttttgcagaaattccttgatatgttccttgagataaccgccgatggcttccacggtactctggtctgctccgccgtattccggtacgatcctctcgatcactccgaggcgtttcaggtcctcggatgtaatattcatgacttcactggcttctctggcacggtcagcatccttccataatatagaagcaaagccttcgggagacaggatcgagtatgtggcattttccatcatccatacctcattgcctaccgccgtagccaatgctccgccgctgccgccttctccaataaggatgcacaataccggtaccttcagggccgacatctccagcaggttccgggcaatagcctcgccctgtcctctctcctctgcctccacgccgcagaaggctcccggcgtattcacaaagctgataatgggtctgttgaatttctccgcctgcttcatcaggcgcagtgccttacgatacccctccggcatgggcatgccgtaattgcgtctggcacactccgcaaaatccttgcccttcacatctgccagcactgtcaccggctgcccgtccaggaatgccactgcacctaccagtgctttatcatccccataataacggtctccgtgagcctccactacataatcgaaaatgtagggaatatagtcggttgctgccggtctgtccactctccggacggtcttgaccttttcccatgccgttctggggagtgtcagtattgaccgttccttcacgatctccgtaggttcaaaatggaagtcaaaatttttcttaaaatccgcataattcccctcactgcaccgatgcgtcgtgatcaggaaatataaggtcttcttcagattctcccggcggacgataccgtccacaaaaccatgctcctgcaaaaattccgctgtctggaagccatcagggaggcgctgtcccagagtctgcttaataactctcggtcctgcgaagccgatcaaggctcccggttccgccatgatcacatctcccagcatggcaaaactggccgtcacaccacctgtggtgggatctgtcaaaatagtcgcatagagaagtcctgcttctccatgtcgtttgatcgctgcggaggtttttgccatctgcatcagtgacacgattccctcctgcattctcgcaccgccggaacagcagaacaaaaatacaggcagccgcaattctgtcgccttttcaatcgcctgggtgactttctcgccgaccacatgccccatactgcccatcataaatttggattcgcagatgccgatcacagccttttccccgtagatctcgcattcacctacggtcacagcttcttttacgccggatttttccctggcctccgacagcttttcctcatagccctcatatttcagtggattgctctcttctatctcctcgaaccagggctgaaagcttttccggtctgccaccatgcggatccggttgtgggtcttcacccggaaataataaccacactcatagcagacatatttatttttcgctgcccggtctctgtttatcattttcttacatttcgggcatttgatctctgtttctgtatctacacttcccatacctgcacctcttattctgcgtcacttttatctctctgtcccgctcataaaaaatcacttccgcagactattcttattttaacgcaaaggtaagctctgcctttgccgccagttttccgtttaccgtggcgatcgcttccccgacacccaccggtcccttactgcggataatggtggtctccagctccaaggtgtctccggggcgcaccatctgtttgaattttgccttatcgatcccggcaaaataagcagtcttgccacgatgctccggcagagacagaattgctacagcccctgtctgtgccagtgcttccatgatcaacacgcccggcatcaccgggttccccggaaaatgcccggcaaaatacggttcgttaaaggtcacattttttcgtcccactgcccgcacaccgggctccagctcctcgatagtatcgatcagcagaaatggatgtctgtggggcagaatctccatgatttcctgggtgttatatactgacattactcctccgttccgcgaatgctgtcgtatcaactacttcctcgcattgtgcaatcgtcctcgttgatgctctgccttctatcctgtgtcttgaacatctgctgcggttattctgtgtacttcttcaacaacagactcgcattatgtccgccgaagcccaacgaattggtcaatgcataaggcacctcttctttgtagctgtcccggcagtaattcaggtcaagttcctcctccgtctcacgcagtcccacagtgcggtggatatagccttcctgaatttcttttacgcaggtgacaaactccactgctcctgccgctcccaggagatgtcccaccatggatttggtggaattgatcttcaggtcatacgcatgttctccaaatgccagcttgatcgctctggtctcgaacaggtcattatgatgggtgctggttccatgggcattgatataggtaagctcttccggtgccaccccgccgtcttttaaggcattcagcatggcggtggctgctccgctgccatcctccgcaggggatgtaatatgataagcatccgaagaacagccgtagccggtcagttccgcatagatcttcgccccgcgcctctttgcatgctccagctcttccagtaccacgatagcggaaccctctcccatgacgaagccgtttctctccttgtcaaaaggaatggatgcccgttccggatcctcactaaatgacagcgctgtcagtgctgaaaatccggcaattccgatgggggtaatggagctttccgttcctcccgctatcattacatccgcatcaccgtactggatcgtacggtatgcttctccgatggaatgtgtaccggttgcgcaggcagtaaccacattcaggctcttgcccttcagcccataggcaatgctgacattgcctgctgccatattggagatcatcagaggcaccagcatggggcctaccctgccggggcctttttccttcaggcggtcatattcccgctccatggcctgtaaacttccgatgccgcttcccacactgcagcccaccatataaggatcttcctgttccatgtcgagaccagcatccgagatggcctgtccggcagccgccacagcaaactggcagaactgctccattctgcgggcggattttttgtccatatattgtgcgggatcaaaatccttcacttccgccgccagcttacaacggtaatccgcagtatcaaaataggtgataggaccgaatccggtcttgccctctttgataccattccaaaattcctctacgctgttgccaataggggtgatggctcccatgcctgttactacaactcttctatttttacccatacagatatactccctcgcatcctgacttattttctatcctgctgtaccgttagcggacatattttctattctgctttactgttgccgaacttgtttttacatcgccataccgccgtccacgcacagcacctggccggtaatatagtccgaggcatctcctgccaggaacagaaccgcctgtgcgacatcctccggtcttcccattttcttaagcgggatctgtccaaccgcattatcctgtaccgcctccggaagcttatctgtcatatctgtccggataaatccaggtgccacggcattcacacagatattccgggatgccagttctctcgctacacttttcgtcagaccgatcagtcccgccttggaggcggaataattagcctgccctgcattcccgacgatgccactgacagaagagatattgatgattttcccatatctctgcttcataaaggtcttcgtcagatgccggatcatgtgaaatgcgcctttcaggttcgtatccaggactgcattgaattcttcttccgtcatccgcacgatcagattgtcccgtgtgatcccggcgttattgacaaggatgtcaactctgccgtatttctctgttactgcctttacaaaggcttcactccctgcaaaatctgcaacattgcatttcacagcctccgccatgccgccttggcttcggatgtccgccgccaccgcttccgctgcttctgcagagccattataattaatgatcaccgtggctccttctgctgccagtgcctgtgccactgcttttccgatgccccgtgatgcccctgtgacaatagcaacttgtcctgtcagactttttcctgtcaacatgccagttcctccatcacccggtccagatcctccggtttctcgatattgtatactttgacatttctgtcaattttccgtacgaagctgccgagtgtcttccccgggccgatctctatgaaagtgtccacgccatctgcgatcatccgctctacgctctgggtgaaatgaacgggactggatacctgttgtttcagcagttccgcaacctgtgacgcatctgtcacataatccgctgttacgttggacacgtaaggaatccaaggggttgacagcttgacgcttttcaattcttctgccagctgttctcccgcagttttcagcaaagctgaatggaatggtccgctgacctttaagggtacacagcgttttgcacctgcttctttcagcgcttccgatgctgctactactgcatctgcctctccggtgatcacgatctgccccgggcagttataatttgccaccgagacgactttgccggtttcttttgctgtctgtccgcagatttttgccacggtatctccgtccagtcctaatattgctgccatggctccgccttccggataggcctcctgcatatagataccacgcatccggatgatccggaacagatccggcagctccatcacaccagcggcagccagcgccccatattctcccaggcttaagcctgctgccatctccgctttcagtccttttgcctccaatactttcagaattgccacttccatggtcagcatggcgatctgtgtgtattccgtaatgttgatataaggattttcttcaaaggtcagctgttccatggagtacggatgtccgctttccgcctgtacttcccgcttatcctgccaatacagattctggagcaccttgtctgccagcttccataccgcctgtgcttccgggtaagtatcatagaactccttgcccattcctatgtactgggagccctgtcccgggaataaatatgcgatcctgctcattttgtcttctcctaattactatgtgatgctattgttctcctcggttacagcacattttttataatgcgccgttttccatataactacgccgcctgtcgctgttcgaaatctgttgtcagcggttacctgtcgctatattttatttatgctgtccttgtgccgctatgcactcctgcgcctgctgtactgtttcttcaataatctcacggcaggtctgttctctgcggatcaagcctgcaatctgtcccgccatcagtgttccgtttacggtatctccgtcctgcactgccttcctgagagatcccagtgtcagcttttccagttccatgaaatcggcattctctttttccagcttcagatactccctggtcatctgattacgtaaagaacgcaccggatgtccggtagacattcccgtcactacagaatcaatatcctttgccttgatgatctgattcttataattttcatggacgatggattcctttgatgcgacgaaccgggtgcccatctggataccttccgctcccagcataaaagccgccgccattcctctgccatcggcgatacctccagctgcgatcaccgggatagataccgcatccactacctgcggaaccagtgccatggtcgtggtggaaccgatatgtccaccgctttccatgccttccgccaccacagcgtccgctccggcacgctccatcatcttcgccatagccacactggctaccaccggaatgactttcactccggcattcttccacagttccataaattttcccgggtttccagcaccagtcgttaccgcttttactccttcttccacgacaatcttcgctacatcctccgcattgggattgagcagcatgatattcacgccgaagggtttgtcagtcagttctttgcatttacggatttcctcccggacaacctcaggcggagcggaagcggcaccgatgatacctaagcctccggcatttgataccgctgccgccagcttatgttctgccacccaggccataccgccctggaaaacgggatattctatttgtagaagttccgtgatctttgttttcattgtctttctgatccttctcgtcattctgcgttatattacatattctgatgataccagggtcaaaaggtctaagcccacatgagcttgctcataagtgggtgaaagaccttaggacccgccccgatatgagcataaaagtgggatgataatcccacgatatgcgaatattgggtagggtgctatgtgccagtggcacatgtctagcacggaccgaagcggagcggagacatgggagtgcgtagcacgaagcaatccgtaggtatcaaaatcgggggcttttgcctgcggattcttgcattcaggcagatatgccgttcttacgcatgctcctgaatatatctgataacatcacctactgttgccatattttccaattcctcggaaggaatggacacaccatattcctcttcaaatgccattaccagttcaaacagatccagggagtctacttccagatcctccttgaaacgggttgcctctgtgatttctacattctcctgatttaactgttctctgatgatggctgctactttttctaacatgtttttgctctccttatgcatttcattattgtgtttctgataccttgctttactactttgtcgtctccggcgtgtttgcctttcatttcaaattgttttgactatcaaagtatttatctgcaatatactacgcggatgttgttctgtcaacatctttttttattattaccgcttacaaacttattatcatcacgtaagcagtaataatctcattgcaaaagatccttttcccggaaaaatactgctacaaaagcgtaattcccttgccaagcggtaaaatccggtggtttccatcggaaaatttgcaaaaactaccgcctgcaaaaataatttttcaaatcaggcggtaaatgccatcgcaaacaatagaaactactaggttttttcgtttctccccttgccaaacggttatttttcagataaaataatctacgttgtaatcttttggagacgtatcgaagtggtcataacggggcgcactcgaaatgcgttagccctccggggcacgtgggttcaaatcccaccgtctccgcacataaaaagccggtaatctgtcaaaacagactatcggcttttagttttagaaaaatgtgcaaaaaacgtgtttattttccagaaaaatgtgttatgcctcccgcagaatctgcatgatcgtatcataatgctccggatcatgcgggaaggtgcagcccgagcaatccttgatccgtctgccatttttctcgaaatacctgggattcccggggcagtgctccaagcggtacatggggcagtagcagaacaggcagttgaaatctgcaagtcccttgtgacaggggaaatatttacaatctttattctcaaaaaagcgataggaattttccatttgcaacactcacatccttccataacctgcaaagtttgcgcattggcgcaaactttgcgtgtgaaacatagaacttcttcgcgaaagagcctttgctctgagtgattagaagttcttttcacactttacactacacttcttccgccatacacattccatgggcaataccctgctccttcagctgttcctccagctggttcaaggcatcatcttcatcttctgcaaacaccatcgcctgatagacttcctccggtccttccggtgccagtgctgtcacctcatacatctgcatggcaattacctctttcttcctcaaaatacgcattcacccttctctttattttatacccgtttccccgtttttttgcaagcgaaaagcgccactccggggaagagtgccgcttttcaggagagatttatgtattgaatgttgctggcgaaatattaacccttgacgcttcccattgccacgccctggacaatgtacttggaaaggaacaggtatacgatgataacagggaagatagagaatgcaatcgttacatacacctgacccatatcaaacttcaggaagtctgcggaacgcagctgagcgatcaggataggtaatgtcttcatcttgtcatcatgcagaaccagtgccggtgtgaagtagttattccagttcgctacgaaagtgaagatcgcctgcactgcgattgccggcttcatcagcggcaatacgatggaattaaatgtacggaactcaccggaaccatcgattctggctgcctctaccagagacaggggcaatgcactttccatgtactgcttcatatagaagaaagtagcaggtgctgcgattgccgggatgatcagggggataaagttatcctccagcttcatatcagctaccaactggataaatccgagtgcggtaacctgggtaggaatggtcatgattgccaggataaaggtaaacatgaacttctttaacttaaaatcatatacatggatcgcatatgcggtcatggtagagaagtaggtacacaacactgcactgcaggttgctactacaaggctgttgatcatacctctgactaccggcagggttcctgccatgacacctttccagttctggatcagatgtgtgctgggcagcagggtaaatccctgtgtcagctcgcctttggatctggttgcatttacaaacagtatatagaaccaaaacaggcagagaaaactcataataaccagtacgatatatgcaagtgctcttctggcatgaatgcccagacctttttttgtctcgtttgtttctacgctcaacatttctgccacctcctacttatcctgtttgccgttcgagaacttaaatacgatcaagctcaggatacctgtgataatgaacaacattacagacaacgcaccactcattccgtagttcttactgtacaaatggttgttcaggtacatgatcagggtcatgctggatctcataggatcgcccttaccgttggtcagaatctgaggtacatcgaacatctgcagaccaccgatcagggatgtgatcattacgtagatcagaatcggcttcaacaaaggtaatgtaatcttgaagaatacctgggtagaggttgctccgtctacctcggctgcctcgaagagggaagtatcgatgcccatcatacctgccatcaggaggatcgttgtattaccaaaccacatcaggaagttcatcaatgctaccagacctctggtactccatacgtttgtaaggaactgatatggctcttttaagactccgatctgcatcagcatttcattgataggaccaccatcagagaacagcgtgaagaacaacattgcaaatgcggaagccatgatcaggttcggcagatagataactgtcttgaagaatctctgtccctttaatctaaggctgggatccgagaaccatgcacccagaagcagagatatgatgatctgcggtacaaatcccagtacccacatgatcaatgtattcttggtgtacatccacaggtccggattggccaacagctttgcatagttaccaaatccgatgaaattcggtccgatctgtgtcagtccggaacggtaattttcaaaaaagctgtaataaaatgtcctgaataacgggatcaactggaataatacatacactactacaaaggggatcaggaaaatataaccccacttattatagcgtaccacctttccgcgttttacctttgccatgatgattcctcccttttgccgtcatgctctcttagcgactttacgtttttcgtgcctttctttgtttccgatcaggctcgcagcagctctcttctttttgttcttaattatcttcttctgaaaaaagcttctgccaaccgggaattttgagagaaaaaccgtgcctacctgaccagccaggcaggcacggttctcaattccttattgtttcgctattcgcctatcatttcggattagtgagtaagctcaggatacttctcttctacacccttgtagaacagatccagtgcatcatccagagaagccttgccatcgaagtagttcttcatagcatgctggaactcttcgttacatccctgatcgtatgcagacaggttgctcagatcgatcttctcagcgcctgcgcagaacatagccagagggttctgtccgcccaataccttgctctgataagaggtatctgctgccatagcttccatagcgggtttgttgtttacgaaatcatcatcagctacaacgatctctttcatgatgtcttcatcagtggtcatcttcaggatgatatccttaaccagagaagcgttgtcggttccggtagcaccgcagatccaagtaccgccccagaaaaagccctgaggtccttcagtagcgccccagccaccctgatttgcgatagatccatcggtatcagctgccatggagaagttgatcagccaagcgggtccaaagtagcagaatactttgccatcgggatagaagcctttgctccagtcatcagaccacaggtcgaaggtaccggtctccttagcgtcaaccatcttcttggagtcatcaacccacttcatcaggttgtcatcgattacgatcttgccatcctgtacccatttgctggatacgttgttggagtatacacgataagtatcgtttacggaagataccatgttgtaaccggctgctttcatcttctcagcggttgcggtgaaggtatcccaatcagatacagacttctgaacctctgcaggatcatcggttcccagaacagccttagcagcctcacggttgtaaatcagaacgccggggcagccctgccatgaaacacccttcagattgccgttggagtcggtaacaacatccttggtgtactgatactggttagccagatctgcatcggtgatgcccagatccttaacaggcattgtgtagtcggtatcaacatatttcaatgcgtagtcagcctcaatcaggaacaggtcgatcttgtcatcagctgctgcatcagcctgctttaacagtgtttcatccagattgttctgataagcgttgtcatcagaaggagtgatgttccactttacagtgatgtcaccgatcttaccggtggttccgtctacttcttcatatccgggataatgatctgtcagacggctcttgaactcttcgttccagcagtagatgttgaagactttgccttcttctgctgctgcaggctctgctgcctcggtggatgcaggtgcctcggtcttagcttcggtggaagctgcgggtgccgcatcggtggatgctgcaggagcttcattgctgctgccacaacctaccagcatgctggcaagcatagcagttgtaagtaaagcactaagtacttttttcttcatgtttgtttcctcccattttttgttgaatgtttgttgtaagtgtttgttgcatttatattcatatgtcggcggttgcgtcgcttccatataaatgcctgattaattgtctgtcggaattctggccaccgacttgccttcagcaactttcccgggtacgatgacctgttctatgatggtggtcttgggtctctcaatgagactgatcagttctctggctgccaggcagccgatctgttctgtgtcctgttggactgtggtcagtctgggctccaactgccttgctgcctgtatgccatcatagcctgctaccgagatatcttcagggatctgtaatcctctctgtctgatagcgttgatgcctccgaaagaagcaaagtcatccggatagatgatgcatgtcggtggattcgggagatccagcagttcattggtcacacgataggttgttgttgtgtctctgtaagctgcttctctgatatactcgtccggaatctccagtcccagacgttccgccgtccggtagaagctggacaaccgtcccgaggtaaccgctgacattgctccgtgaatataagcaattttcctatgtcctctactatatatgtactccagcagttctttcattcccgcaacattgtccgacatgattgcgatacgattgttgaacaggtagtcaatggtgactaccgggatggaactctgtaccagttcgatgacttcgggatccccgaaatcaatacaggcgagcaccactccgtcaaagcctctgtacctactgtgttccaggtaggacatccgatccggccggttcttgcagctattaatgaatgtaatgtcgtaaccgctcttctctgccgtcctcttgaaactgtccagcacactggaaaagtaatcgtgggtaagaccgcttctggcttcatctgcaaagaggactccgatgccgtaggtcctgttcgtcttcaaagctcttgcggaaaggttcggggaatatcccatttcctttgcgacccttttgatagttgcttttgtttcttctccaatgtccttgtggtcgttcagtgccttgctgacagttgcaacggagactccacaaatcttggaaatgtctttcagtgatgccatatctttctcctgttccatgtcttcgtcattccgtccgacctgttttgtaacttaatcgttttcgtagttttaatatataacacctttgagcattttgcaatacttttttgcagttttttttaaaaaagtatccactttgtctataattaacaatttcagataggctgttttgtacatttggcttgtacatagattgtgtttcttctatataaaggcaaagtgtgcgataacgtttgctattattttgtttcgtaaaaccggtgtttcgaaggttctttcattttgtatcttctgcccatgtttccccactgtttttgtatacattgcgcattttacgggctttttcaagattcgtattgcatttttccatttgcttctgtataatacaaatcagaaatccggagcacttaatcgtttacttaacattaagcactccgcagcgaaaaaacaaacactcaacatacaacaacatgaaagaaggagattttcttatgaagtatggtcattttgatgatgtgcatcaggaatatgtcatcaccactcccaagactccgcttccctggatcaactacctgggctgcaatgagtttttcagtctgatatccaacacctgcggcggatatactttctataaagatgcaaagctgctgcgtctgacccgttatcgttataat

SEQ ID NO: 978 - DNA, 6744 bp, unidentified
  source 1..6744: mol_type = unassigned DNA
ttatttgcctaactcagcttttaatgctgttgttaaagcaggaacgatcttattcagatcaccaaccagaccgtaatcagctacgtcgaagattggagcatcttcatctttgttgattgcgatgatcaggtcagaatcttccataccagctacgtgctggattgctccggaaataccgattgcaaagtagatctgaggacgaacagttttaccagtctgacctacctgtaaatcaactggtaaccagccattctctacaactgcacgggagcagcttacagtaccgccaagtacctctgcaagatcttcaagaagtttgaagttctctttggaaccaactccacgaccaccggaaacaaggatctttgcttccataatgtttgctgtgctcttaacagcttttacgatgtttaagatctcaacatatctgttgtttggtgtaaatcccgggttgtactctacaacgtttgcttttgcaccgctgatcggagcgatcttctgcataacacctggacgtacagttgccatctgaggacggttgtccgggcaggcaattgttgcgatggtgttaccaccaaatgcaggacgtgtcattaataactggttgtgtttctgctctgattctttaccaggtgcagcaaccagtgggaaatcaccgatctcaagagatgtacaatctgctgtcagacctgtttttactcttgcagaaacagtaggtcctaagtcacggccgatagcagttgcaccaactaacatgatttcaggtttgaactcgttaattacagatgctaatgcatgagcatacggctctgttctgtagtcttttaattcaggatcatctactacgataactttgtcagcaccatactcagctaactgatctgctaatccttttacaccagaaccaattaatacagcagttacgtctgtacctaaatcttttgctaagtctttgccttttccaagtaactcaaatgcaacgccatctaatacgttatctacctgctgtgcaaagacaaatactcctttatattcttctaatgccatgttattcaccacttttcctttttttattagataatgtgtttctctttgaatttaccgatcaaatatgctacggattctgccggatcaaggtttactttctcaccagcaccctttgcaactttatcagatgcttttgcaatcttagtaggagatccctttaaaccaagatcagaatcgtcaacatcctttaagtctgctctgccccaaacggttacttctttgtcaaatgcatcgaagattccgcccggtgtcatgtaacgcggctcatttaattcagaaagagcagttaccagacaaggcatttttgctcttaactcatgatatctgtcttcgtactgacgttttacaacaacagaatcaccctctactttgatgtctgctgcgtaagagataaccggaagtccaagatgctcagcgatctgaggaccaacctgtgcagtatcaccatcgatagcctgacgtcctgtgatgatcaggtcatagtctaagttacgaagtgcaccagcgattgtggtagatgttgcccatgtatcagctccacctaatacgcggtctgttacaagaactgcttcatcagcacccattgctaatgcttcacgaagaactgcatcagcctttggaagtcccatggtaagaactgtaacttttgctcctgtctcatctttgattctaagtgctgcttcaagaccagctttatcatctgggttcatgatagcaagcattgctgctctgtcaagcgttccatccgggttgaacttaacgccgccctttgtatcaggaacctgtttaatacatactacgatattcatgtatttttcactccttatgttttatatgtttaaattttacgcggattgattcgaaattactttaacagtgcaccggagattaccatacgctggacttcgcttgtaccctcgtagatctcagtgatcttagcatcacgcatcatacgctctacatcgtactctctgatatatccgtatccaccgaataactgaacaacctcagttgtaacagccattgcagtctctgctgcgaataatttcgcttttgcagcttctacagaatatactttctgagtagcttttgccattgcagctttgtaaactaaaagctgtgcagcttcgattcttgcagccatatcagcaagtttgaactgtgtattctgctgctgtgcgattgaacgtccaaactgttttctctcttttgtataagcgatagctctgtctaatgcgccctcagcgataccaagtgcctgagcagcaataccgatacgtccaccatcaagtgtgtgcattgcgatcgggaaaccttttccttccggtcctaacagattctctttcgggattctgcagtcttcgaagatcagctcataagtagatgatccacggatacccatcttcttctcttttgttccgaatgagaagcctggagctcccttatcaacgatgaatgcagagaagtttttcttctttctgcctctcttatcctctgtgatgcttgtgatagcgattacaatataaacatctgcaactttaccattggtaatgaagcattttgatccatttaatacccactcgtcaccatctaaaacagcttttgtctgtgcaccctgtgcatcagtaccagcccccggctcagttaatgcgaatgcacctaacttctcgcctgttgcaagtggttttacatatttctgtttctgctcttctgtaccatatgtcatgatcggatcgatgcagagagatgtatgtgcagatacaacaacacctgtggttgcgcaaactttagataactcttctacgcacataacgtatgtaagaggatcacaaccctgtccaccatattctttcggaaccgggattcccatgaatccgtatttctgcattttcttaaccgtttctgccgggaaagcttctgtctcatctgtttcctgtgcaagcggttttacttctgtttcagcaaattccttgaataaggaacgcgccatttcatgtttcttgtctaaagtgaaatccatgatctaattttcctccataaatatttattttactgagcatcgaccggagtctttgtacgatcagcattgtatacatagaatcccttgccgctctttgctccaaggttaccaccacgaaccatcttacggatcagtgggcatgcacgatatttgctgtcgcctgtctctttgtaaagtacatccatgatagcaaggcagatatcaagaccgatgaaatcacctaactctaacggtcccattgggtggttagcaccaagtttcatagctgcatcgataccagcgatatcggaaacaccttccattttgatgaatgcagcttcgttgatcattgggattaagatacggtttacaacgaaaccagcagcctcattaacctgtaccggagtttttccgatctcttcagaaattttcttaatagcggaaacagtttcatccggagtattcacaccagcgataacctcgatcagtttcatacggtctgccgggttgaagaaatgcataccaaccattggacggtttaatccgtttccaatctctgtaatagaaagactggatgtgttggaagcgaagatacaatctggttttgcgatctcgtctaattctttgaaagtagttttctttacttccatattctcgaaagctgcctctacgatcagatcacagtctttgcaaaggtcttcttttaaacctggagtgatttttgcaaggatgccatcaacagcttcctgtgtcatttttcctttttctactaatcttgcataaccttttttgatcttctcttttccgccttcagcccactcctgcttgatatcgcaaagtgctacttcatatccttctacctgagcaaatgcttttgcaatgccctgtcccatagttcctgcaccaataacgccaaccttcatttcggttacctcctgaaaataattatgttaactgtatgtttgaaaaatgcaatccccgggaagtcattccccgggaattactataaaaaactattatctctcaacgattgtagagcatcccataccaccgccgatgcaaagtgtagcaagacctctcttagcgtctctcttctgcatctcatgcagtaatgtaacaaggatacggcatccggaagcacctaccgggtgtcctaatgcgattgcaccaccgtttacgtttacttttgacatatcgaatttcagatctcttgctactgcgatagactgagctgcgaatgcttcgtttgcttcgattaagtccatatcatcaatagataaaccagtttttgctaatacttttcttgtagaagcaacaggtccaacacccatgatttcaggctcaactccaccaagagcacctgctacccatgtagccattggtgtaacaccaagctcttttgctttttcttcactcataacaacgattgctgctgcaccatcgttgataccggaagcgttacctgctgtaacaagtccgccctctttaccggagcagcattttaattttgctaaagactcagcagttgtaccggcacgtggtccctcatctttcacgaaatcaacgatctcttttttcactttaacaggaaccggaacgatctcatcatcaaatttgccttcagcgattgctttttcacatttctgctggctgtttgctgagaactcgtcaagttcttctcttgtaatgccatatttatcacatacgttctctgcagtgatcatcatatgatagtggttgaatgcatctgttaatgcatcatttaccattgtatcgatgatcgttgcattgttcatacgatatccaaaacgagcttttgtcatagcatatggtgccatagacatgttttccataccacctgcaacaacgatatcagcttcacctgccatgatcatggtagctgcatcattgacacattttaaaccagaaccacaaacaacgttgattgtgattgccggaacttcgattggcagtcctgctttgattgctgcctgacgtgcaacgttctgtccctgagctgcctggattacacaacccatttttacctcgtcaaccatctccggtttaacgtttgctcttcttaaagcctctttgataacgattgcacctaagtctgctgctggagtattgcttaatgctccacccattttaccgattgcggtacggcaggcacctgctaaaactactttctttgccattttgaattctcctttcaatttaacacaaagctctgcttttgcagagaatttgtttctttctctttaaagttgccgaaaaatgctgttaattttttaacaatcttttttaaaaaaataaattcaaactttcggttgaaatttatctttttttctttcattttaaaaagcttatttgctatgtaatcagctatttttctgcatttcttgtactttcttatgctaacatatttcacaattaattgcaatagctttctttatttttcatctttgtaaacaattttttacttcctttttgctccattttgcggggttttttgttaaatttttatcattttatcattttgtttaataaaacacatgattacctataactgttccttctataatgccgttattcacacgaaaatacagacaatttgttgtgctcattccacccagaaccgcctgtgccgcactcatacaatcggaatcgactccctgctccagacggtatgcaagacgaccgctggcaaccggagagaactgccctccctgataaatcacaccggaaaccgtattcggaaaataggagcttctgacacggttcatgatcacgctgcccaccgcaagttttccatcatatggctcgccccatgcctcacactggatgatggcagctaacagatacgcatcgctctgtgccggtgcgtatgtcacattcgacctgttttcctgttcctgctttttgatggctgcaaggcgcgcagcatcctcttttgccttctgtatctcaagctgcttttcgtattcgatcattttctcgatctttgcatcgatcgattccacatcggactgtgcatcttcaattttctcgctggattcctgtatcttcttctgcgtatcctcgatcaggctgttgactttttcctgctctttctgtttttcctgctgtaatacagtcagttcttccttctgctcctcgagttcctttttctgttttttgatctgctccgtgagctcctgatatgccgtaagcatatttctgtcatactgattgattgcacttgtatattccgcctgatttaaaaattctgcgatggaggacacatgaataagcatgtcccatacagactgattgccattttcataaatatactgaatgcgcactttcatatcttcatactgttctgcagatcgttcctcggaacgtttcagatcttccgccgccgtattgatctcgtcctctttctgcgctgcctgctgctctaactggttcatatcggaagtgatcgtatttaactgtccgttcagtccgctaaggtcgctctccaatccctgtttttcattggtcaggctgtccacctgatctttcgcatcttctttctgtttcttaaggtctgtgatctggtcttttgccttatcaatatctttctgtgtcgttcctgcatggacagttgccgtaacaagtatgcagccggtcagtattcctcccaggattcttctcaaaaaattgtgtctcat

SEQ ID NO: 979 - DNA, 24617 bp, unidentified
  source 1..24617: mol_type = unassigned DNA
tgtcagataccccatcggtgcacctgcagcataaatcaagattaagccccacaaatgattgatcaggttaaactgcgtcatcagaagataaactgcgatcattcccataaaagatggaaacattccaagtaccatcgtgattttcatcattggttttctggctgtaaatgtaaatcttgacattgtatatgcagttaaaatcacaagaaatgtccctaatatacagcttcccgctgccacaaaaagtgtattaaaaaaccatctcggatagttgtaaagtgtcgtatcagtaaaaagcttctgaaaacttgcaaaactatattcttttgggaaaaaaccgttaaatgaataaatggttcccgattttgaaaacgatgccaggatcagccagagacacgggaaaaaaaacacaaatgctacagcggtgagaatcagatatgttatgcctgtatccatcattctgccgaatttccactttttactcattgaaatgtgtcctcctctctataggatggtgattttatgtatactatcagtgaaatagctgatgtgatcaggaaaatgataagactgatcgccgccccgatgcaataataattattatcaatagaaagattatataaccagttaatcagcagatcggtatcacttgccagaaaatatccatccagatacagtcctcctctcaggaaataaaaaataccaaagttattgaaatttccgataaactgtccaagtaaaaccggcatcgtggaaaacagcataaaaggcattgtcagtttttcgaactgtttccatctgcctgccccgtcgatctttgcagcttcatataaagaaacatccctgttagaaagatttccagttgcaagtaacatgatggatggaacgctgatccagcaattcacaaaaagtccgatcagccttgcgctccatttcgcatccagatcaagaaatccaatggcacttttcccacaggctgcgataagctgattaaccggtcctccataggaaaacataaatttaaatgctaaaagtgtgataaatcctggtattgcataggcgagcaccggaaacgccctccagaatgcttttccttttacacagtctttatccagtaataatgccagaccaagtccggcaaaataattcaatgctgttgatgcagctgcccatatgacattccagcctaaaatcttaaaaaatgttggtgcaaactgagagagtgacacaagtttcttaaaatttgaaattccaacccagtcaactaattccggtggtacaatatccccgccataatttgtaaatgcgatcaggatcataaatacaatcggcaaaatgttaaatacacatacccccagtaccggcagtgccagcacaagtatgtaaaatttcttatcaaggagctgtccgatttcctcccggaaagtcaaccggtgtttcccctgttccatacgtttttgcatggaacatacatctttcagatttaaccggtacagcataataaaaacaccaagcacgatccatgcaaaaattcccatcaaaagcataacaacagaattatcaccttctattccaagccatgcatcacctttttgtgttcctaatgtaaaaaatcctacgatatcacgccatcctcttatcacaaaataaaggacgatactcacttctgagatcaaaaataagataccttttataatactcccataacatatctgccctgttcccatcagcacagctgacaattttacctgccagctgctgttatggcagtacttttccatcttttttccccgctgctgtcccataataatctccattcctgcgctgcttttgcgcatcccgagtttgtgcgcaagcacaaatcttgcgtgtgaaaaatcttattttcacactacctccatttctttatgttttccgtaaaaagttttcttttgctatttcaacgtataaacagcatcgtaaatctgccggtctacttcttctaaccctgctttcagggattccagatccggatactttttctcattttctgcacggaatgcatcttttgcaagatccgtaaagaaagtctgtcccggagtccagatctgtgaaacttctttgatagaaggcatcagtataatgtttccattttccagattctgatataaaagttctgatgtaccgccggcttctttcgcagcatcttctctggtcggtgcaattcccagcatttcacttctttttaccatcatatcataaccggttgcaaaatttataaatgcaagacatgcattcggatattttgtataagcactgactgcataggcattgattcctcccatcattttgctgtctgtcagtttgggattttcctcagttaaatcgccactctcaggaagttttggaagtgttgtcataatgagattttcttttgcggtgctctctgcctcttcttcccccataccttctgacttgtattctgacaccatctcatctaaaaaagatgaataaacatccggtgtcgaaatagttgcaaaataggttccatctgcaagcttactgtaggcattcgttgtgatcgtatcatcaatgcattcttcattcattgcacttgcaagctgttctaacacccacgcacctttttctgcttctcccgccgcaaaaccgatatcagatgcatcggtattgttatttccaaaaatgtatcctccataagaaaacaaaaagccactggaaaaataaacatcataaagagatttcatgtatccatacgcagatggatccgcatcatggcgttctagggaaaatgcatacatatcattccagttctgtaccatatccggtataccgtctttatccttatcccagctgttctcccagtcatccggcagaagatctgcacggtaataaagcatcggtgcctgcacatttaccggaactccacaataataaaccgatccatctttctctatcttataggcatcccatgcagtctgcggaatctgtccataacattccattgattccaccggcagtggataaatatgttttccctgtgcatattgcatgatcacatcatttgcctgatacagcacatccggtccatatccgtaaggtccatcatttgcaagatctaagtactgatccatatttgcatctacagctgtgattccctgatctttataagcttcattaaatgcctggatcagttcagcaaaatatcctttttcgattgctgtgtcattttcaagaacctggattgttacattttgttccagttctccggtaaaaatattactcagtgctgttcccgatgcagactcactggcagaagcagccttttcttcttttaccttctcaccgcagccacataactgctgggcaagtaataatactgccattgctgctacccatacttttcgtttcatgatcatacccccatttcctcttttacaactacgaacccttttgattgtaaaaaaagcggttcattgatacagttcctctcttcttttggattctttttccattccagctcattttctgcacagatgatttttttggtgtcagattttgaaaatgtgatttttttggtttgatctgtcccatttacccacaatgtaattgatacatttttccatgttctatgaacggaaagcattccattctcctctaaaacacagatggtcccatactgaagaacctcctccttttttaatgcaagcagttcttttatcttatcataaactgccatatcccaatgtgttttctcccagtcaaaacatcgtcttgaatccggatcgtaaccaccttccatacagatttccgtaccataataaatacacggcgtaccaataaatacaatttccaaagcaagtgcagcaagtaattttctcttgtcacatccaacctcggaaaagaaacggtgcgtatcatgagaatctaaaagattaagcatcataacattaacctgttccagattacgcatcaggtttgcatttaatttttcagccatcgcttttgcatcaaatttctctcttgcaaaataatccagacaggctttcgtaaaagagtaattcataatactgtcgtactgatctccctgcagataaggatatgcatcatgccagttttctccaataatgacacagtccggattgattttttttacttcctttctgaatcttctccagaagtcatgtgaaacttcatccgaaacatccagtctccatccgtcaatccctgtctctctcatccaataagctgcaatttctatcaaaaactcctgtacctgttcgtttgccgtatttaattttggcatataattgcaggatgcaaaacattcataattccctttttccacatccactttattgccattgatcaaaaaccagtcgaaataaatggaatcctgccctttttttatcacatccataaactgttccagatacatactgcagtggttaaaaacagcatccagtacaatcctgattcctttttcatgtgctttttttaccagccgtatgacatcctcctttgttccaaactgtggatctactttccgatagtctttaatgtcatatttatgattagacacggacgaaaaaaccggtgtcagataaagtgctgttaccccaagcttttgaagataatcaagtttttctatgattccttcaatatcacctcctgcaaagctttccggtgttggtttatccccccacgccatattgatatacccggtgtctttctgcatgtttccctgataaaaacggtcaataaaaatctgataaaatacagcatcccgcatccagtccaccgtctttaatacgtcattctgattgatataaggcatttgaaaaaaattataaaatccttcctcaaaacaatagttttttgtcactccatcttcactgaaataataaatctttcccgcctcttcaatctcaaacagataggcaaaacggacatcctctaacgcaagcctgatttcgtaataactatataaataatccctgtaacacacttccatcctttttttctgtcgttttaatgtaaaatcatatttctgtgcgtagattaaatacaccttcgccccgtcatcctccttagacatcctgaggcgaagcacaagttctttctcaccaaccgcaaaacaatatcttgagtccggtatatgtaaaattgcatactgattcattttaataataaacctttccaaccattttattttatgttttttattgttgacaaatgtgacatttttctttataacaaatgaaaagagcttaagcgtttcacttactgaaaacacagaagctgccaaaagggagtctcaccaatgaaacaatcagttaccattaaagacgttgctaaggaagcaggtgtttccgttgccactgtatcttacgtgatcaataaccgtacggataaacggatcagtgaaaagaccagaaaaaaagtccttcagatcatcaatctgttaggctatacaccaaaccagtcagcaaaagctctggcgacaaaccgcaatcagctgcttgccctttacctgtccgccggagactcacttttaaagaatgcagaacagtcttattttctgcatttccttatttcatattttcataaaaagaactatgatctcgtctgcctgaacgaatcttatactgaaaaattcgatcatgcagatgcaatcatctgttatgatatttcttccgagctgtttcatcagatcggtgatagtaattttattcctctggttgcctatgattgtatgatccatgatccgctgtttttccagatcaattccaactaccggaatattctggagcaggccgatatttatttttccaaaaaaccatacacactcgtattgttagataccaaaaactgtgaaaaaaaggatttcctttccacacttcacgctgatatacgatatgtacgggattttttagaagtttccgcaataaaagaggaaaaccttgttgtagtcgaccatgtactttaccagcttttaaattcttcccacaacacactgtatgtaccgtccatccgtacagaaaaagctgatgcactgcttacctgtctggaatatgcactgcagaggattccaatccggcagcatgatattttaatctgacatcctgccatcggattttattcacatgacactgtcagaatctgtgtggacggatcataagtaaaagtataagaacctgccgtatttgcaacaagattaccgccttcttttccggtcacgcaggataagctttccgtatcatcttctgcaatgttcgtatagcggatatattctgttccaacgctctttgtgtctcctaccgtaaccatggaagtaaacataaactcatcgccctcttcaagatcaactgtcaggctgtaaatcccatctctttccacaaactctgtctcatctgtatatacatcttcccagtttgtgattttagcacctttaatgtaataatcgatctgtttttccgctccgtccgactcattttctccattgtaagtccagtcaatcgtatcatacatgttgatattgaacgcttctttattatcttcactataatctgctgcagactcttcataaatatcttcacccggatatgttgttaaggtaaaggtataatttccagacacaagacacttaatgttagctctctttgtacccgcatctccaaggcttcctgaattttgaaaataatcttttccatcttttgaaaaggcagtaaggtaaccacagcctctctggtcattccagtcagagttaattgcaaactggaattcgtcacccgcctccagatctaatgtaatggtataaacgttagcatccggatcgacctcttttgttaatgtctgtgcatcaccaataaccgctccccagtttgattccaacaacaccggacttgttccacttcccacaattgcaaacttcctcgtatcctcctgataggaaacaaatcctgcgaaaatatctgtatctgccgtaatcgctgtcgtaaaatcaaacttatggctcatctgtggtgttgcaaaccagcctgcaaacgtgtaaccttctttttccggaacatattcctctgcacatgctccatcttccacctcttttgtctctaataccgtctttccatcggcatcataaaatgtcactacatgcgctgtctgctctgcttcaggcttctgctctgtcataactgtctggctgtcctgtgccacagtatctttttcccctccttttgactgacatccggtcagcccggaaactcccattgttgtcactaacgctgctgccataaaatacatgaatccttttcttttcatccttctccatttcctttctgatttatttctgcaattattccccagctatttcttttttgcttaagcgtttaaccaacatagtaaaaaaaagcgtatcctgtgcccattcttcaaacttagctgttttcccatgttcatcaggaacgtactttttcttttattataatataacgcaatttcccgggtttgcgcttgcttaaacgcttaacttaattttaaaataacacttcacttaaaacatgtcaagcatttgtctctaaaaaatagcacaaaaagcagctgcaaaatctatcacatttttgcagctgcttttcgtatttgtttaactgtaagattctggtgttaaaaggtggttcataacttagcggatgtcaaattgcacgaagtttggactcgttttgtgactttgggagaaaattagaaaatcttagtatgcctgtcaattcacagtgatgttctgccatggatggcagaacaaggcttcacgagccatggatgtcatcgtgccataactggcgcgtgttgaacgccgttcacgtcactctgggaaaacttgattcaggcatacttagtttttcttattttcggacgacggaacaaaacctgctccgccatctcctttaagatctgtgctgatttctgaagctgtttctgttcatcctcatctaaagaaatcggaacctgtctctcaattccgttttttccaacgatcgccggcatacttaaaacaacatcctccacaccatacattccatggatcataccggaaaccggaagaatggatttctcgtcgcgcacgattgcttcgcagatcctctttacagacattgctattccataataggtcgcatttttctttgcaatgatctcataggcactgttgcgcacatttgctgcaatgcgttccatcgaatcgtcatgattgaaatgtccgcgcatctcgcagaatgtatttaacgggattcccgatacatttgcactgctccatgcagcgatctcactgtcaccgtgctctccgatgataaatgcatgcacgctccggctgtccacaccaagatgctctcccaactcatattttaaacgtgccgtgtcaagcaccgtaccggaaccgatcacacggttttccggcataccgctcagcttatgtgcggtgtatgtaagaatgtcgaccggatttgaaacgataagcaggattccctggtaatctctttttgcaatctccgggataatactcttaaaaatgccgacgtttttctgaaccagatccagcctcgtctcgcccggcttctggtttgcaccggccgtcacaacaatgatcgccgcatccataatatcgtcataaccacccgcataaattttcatcggtcttgcaaatgggattccatgggaaatatccattgcctccccttctgctttctctgtatttgcatcaatcaaaaccatctcagaaaacaaaccactctgcatcagtccaaacgccgatgttgctcctacaaatccgcatccgatcactgccacttttctgttatttaattctacctgtttcatgatatttctcctttcctgcgtatgaaaaatcttatttttcacactgctgtccttgtctctggtgttatattaatttatttcgggcagattgtatgttgtaattacaacatttatttgagaaaatatatcatgactgtgttatcagaaaattgaaaatcactatttgccctggcattcttctataaagatgatattggggggcgaatagtgcattcacagcataacgactggcaaattgcacaaagtcgagactacttttgtgactatgggagaaaattagtaaatcttagtttgcctgtcaatgcatagtgttttgctgccatggacggcagcaaaagtcttaatgccccatggaaggggcatttaagacgtacacgtcactccgagaacatttaaagcaggcggacttagattttcttattttcgtacaacggaacaaaacaggcacggctttgtgcaatttgtcaatcaacaatcttgtatgcactatttgacctcaacatcatcatatcatattacagcatcaaaaaaggatgcctcccatttccggaaaacatccttaactatctatataatatccataactttatccaaacccattacgattcttcattctccccatatacctgctggaaaaaatccaccagttttgccagtgaataaatcaataccgtcgtctcctgtgtattcagctctcctttgatatgatcgatcatccggtgatgaaactcttcatgatgcagataagctgcctttcccttttcggtcaggcacacccagacaacacgcttatcctgcttactgcgctccctgacaacatatcctttatcggtcagaccgtccatcgcctttgtcagcgttccggtcgtaacgttcatcagctttgccaccgtgctcatgctctttggctctgacattccaatcgcttctattacatgaaaatcattataggtaagatccttaaattcatccgtgatcagagattttccctcaatctccataatgtttttaaacaattttaccaataactcatttaatgtttcatctgccgtcattcaaatatactcctattcatggcagtactgattgcctttcacacatatgtaaactgcagccagtctgtttactgctgcccttaccataccaaaaccgtcgccccccatgtcagcccggctccaaatcctgccaaaactatttttttaccttcacatatcataccatgtttattgatattatcaagcaaaatcggcacactcgccgcggaaatattaccgcactcttccagattggtaggaaacttttccatcggctgatgcagtctttttgcaacagactcaataatgcgcagattcgcctgatgcagtacaaacaggtcaatatcttcgacttccagtcccgcttttttcactgcctcttctatcactttcggcaccgtttttactgcaaatttatatacttcctgaccattcatcgacacataggaaagtttcgtatcgttgaccgcaaacggattattgaccggacggttatcacagcggaggacttccccccgcgcgccgtcggaaccctgtaccatacttagaatgccgcttttgtttgctgcccccggctgctttgctttacaatttgttctggaatccacctcaacgaccgccgcccctgcaccgtccccaaacaatacacaggtgcttctgtcattccagtccatgatctttgaaagagtttccgctccaatgaccagtgcctttttgtatacaccattttccagatacatctgaaccgtatttaacgcaaacaaaaatccggagcaggcagcgtttaaatcaaatgcaactgcattttttgctccaagcgcactctgcacttcacaggctaagttcggcagaaacttatccgccgtaaccgttgctgcaatgataagatcaagttcttccgcagtcatttccgcatcttttaacgcttcctttgctgctgcgacagcaagccctgtcgtcgtctcctccaccgcaagatgtcttgcaccgattccggtacggcttctgatccactcgtcagaggtgtccatcagtttacttaaatcatcgtttgtcacccgaagttttggaaccgcacttccggttcccttgattttgattttcatactttttcctcattccagagtttattttatttccatctgccctctgtaaaataatccagtaacctttttatcagaacgcacggaatctcgcatagcgctcctcggcaagctgctctcctgtcttaccattctgacgctctaaaaattctttcatatggcctttcatatatcttgagattgactcacatgctttttcgtctgccgtgccatactccgggattacctgctccacaatatttaacgcatacagatcatgcgccgtgatcttcatgacctcgctggcttcttttgcacgttttccatctttccagaggatcgatgcaaatccttccggcgaaagtaccgaatacgttgcattttcaagcatccagacttcattgccgaccgacagtgcaagcgcaccgccgcttccgccttctccgatcatcagacagaggatcggaactttgatggctgacatctcatagagatttcttgcgattgcttcaccctgtccgcgttcttccgcttcttttccgcagaatgcaccggatgtgttcacaaatgtgatgatcggacggttgaatttttctgcctgtttcatcagacgcagtgcttttctgtaaccttccggtgacggcattccgtaattgtgacgcatgcagtcttttaaatcttttcctttatgaataccgatcacagtgaccggctggccgtcaaggtaggcaacaccgcccacaatcgcaggatcatccgcgaactgtctgtctccgtgaaattccatgaagtcgtcaaaaatattgtcgatataatccaccgatgcaagccggtctgcacgtcttgccgcacgcactttttcccatgcggaaagcggctgtgcctttgtggcgcgctctttcatgacctctgtcggctcgtaacagtcatcgctgcgcagcggatcaaagtttgcatatccttccgttttctgatgcatctttaaaatgcggtaaagtgtcatttttaaatctttacgctccacgatcgcatccacaaaaccatgctctaactggaactgcgctctctggaatccctccggcagtttctctccgatcgtctgctcgatgacacgcggccctgcaaatccgatcaatgctcccggttctgcaaggatgatatctcctaacattgcaaaacttgccgtcacacctccggtcgtaggatcggttaacaccggcacatataaaagtcctgcctcggaatgtttctttaaagcagctgctgtctttgccatctgcatcagggaaacgattccctcctgcattcttgcaccaccggaacaacagaataaaataaccggaagagaaagttctgtcgcacgctccaccgcaagtgcgattttttctcccacaacatgccccatactgctcatcataaaccgggcatcacacacgccgatcaccgtctcaagtccatagatcctgcattttccgactgtgactgcctcatgcagtcctgtcttttcctgtgcggctttgatcttctccggatatcccggaaaatcaagcggattttttgactccaattcctcaaaccacggctcaaaggtatccttatccgcaaccatgcggatcctgtttttggtacggacgcggaaataattgccgcactcataacagacatatttatttttttccgcggttttcttattgatctctctgccacaagccggacagacgatcgttgccggcggctctgtattaactgtctctgcctctttttttgctgcctctaccgttttctgtggttcttctaccgtctctgttacttcttttttcttcttcaaaaaaaatgctgccatactttcccctttttgcctgtttacagttatttatcaaacctgcgctgttccagactctcttaacttcaactgatcgcaaatgtcagctccgcgatacatgcaatgtcatcccccaccttcgctgtggcacggccgacaccgatcgggcctttttgctttatgatctctgtttccaatatcaacacatctcccggcactactttccgtttgaattttgcagaattgattcccgcaaaatatgcagtttttccgcggttttcttccaccgagagaattgcaaccgctccggtctgtgccagtgcttcaatgatcagtacgcccggcatgaccggctcatttggaaaatgtccgccaaagaatggctcattgtagctgacacatttttttgcaacggcacgcatgccggattctaattcttccaccgtgtcgatcagcaaaaacggctgacgatgcggaatgatctccatgatctgtttcgttgttaaaacggacataattgcctccctgttttccaaaataaaatttgcccactggtgagcagaggcatttcctcccaattattcactgtattttttcagcaggatacttgcattgtgtccgccgaaaccaagtgagttgctcagtgcatacggcacatccatctgtaccgcctctttacagtaatcaagatccagttcttcatccggtgtcgtgtaaccgacggtcgcatgtacaaaactgtcctgaatttctttgacacaggttacaaattcaatggcaccggcggccccgagcagatgtccaaccatagattttgtggaattgactttcatatcatatgcgtgaccgccaaaagcgagtttgatcgcacgcgtttcaaacaagtcgttgtgatgcgtggatgttccatgtgcattgatgtaggtaacttcttccggacggatgcctgcatcttccaccgcattcgtcatggcgcgggctgcaccggcaccatcctcagcaggggaggtaatgtgatatgcatcagatgaagttccgtatccggctacctccgcataaatttttgccccacgcgcttttgcatgctctaattcctctaacacaacgatcgctgcaccttctcccatcacaaaaccgctgcggtttttatcaaatggaatggaacattttgtcgggtcactctcggaggaaagtgccgtcagtgaagtgaatccggcgattccaagcgggcagatcgcaccttccgttccaccggcaaccatcacatctgcctctccgtactggatgctgcggaatgcctcaccgatactgtttgttccggttgcgcatgccgttaccacgttgatgctctttccttttaaaccgaatgcgatcgagacatttccggctgccatattggaaatgacaagcggtacgaacagcggatttactttggacggtcctttttccaacagtcttttatgctcacgctcaattcccccaagacttccgattccgtttccgacagatacaccgacacggtaaggatcttctttttccatgtcaagcgctgcatccgtgatcgcctcttttgccgctgccactgcatactggcagaataattccatacgtcttgccgctttcgcatccatatactgttttgcatcgaaatctttgacttccgctgcaagatggcatttgtatccttccgtatcaaatttcgtgatctccccgaaaccgatttttccttcttttatggactgccagaactcctctacactaagtccgatcggagtgatcgcgcccattcctgttaccactactcgtctgctcataacttttcctttccattttcaagccccaaattcaggcttttcctttttgatccgacacaataccatgcggtcaaaatgtttttactgcttatatgctcataccgccgtccacggaaattacctgtcctgtgatgtaggatgctttctccgaggctaaaaatgtcactacctccgcaatatcatccacttttccgactctgccgagcgggatctgcgttttcactgcttcctttgccttgtctgtcatctgcgctgtcatttccgtatcaatgaatcccggcgcaaccgcattgcaggtaatcccacgggaagaaagttctctcgccacacttttggtcagtccgatcacgcccgccttgctcgcgctgtaatttgcctgtcctgcatttccaagaataccggatacggatgatagattgatgatcgttccggaacgctgctttaacagatagcgtgaaaaatgacggatcgtgttaaaagttcccttgaggtttgtcgcaatgaccgcgtcaaatgcttcctcgctcattttcatcaaaagatcatcccgtgtgataccggcattgttgaccagaatatccagatgaccgtatgtctccatgatgtcttttgccattttttcacaggcactataatcagatacattgcagccgtaaactgccgctttgccgccatccgctgtgatttctgacgcaacagcatctgcacgctctttagaaccgttgtaattgatgatgacaaatgcaccttcttttgcaaggctttttgcgattgcagctccgatgccgcggcttgcaccggtgaccagtgctgttttattagttaacataacttctccttttttctgatagctgccaaacttttttcacatcaaaatatgtggcatatcttatttatttttgctctcagcaacaaatttctcaaagtcttcatatttatcaatattgactgcagctacatcacggttgatcttgcgcatgaatcctgtcaaggttttccccggtccgatctctacaaatttgtctgctccgtctgcgatcagacgctcgatcgtctgctgccagcggacagatgaggacacctgtttttccagtaatggtttgatctcctcttcttttgtcacatagtctgctgtcacgtttgcgacatacgggattgccggtgtatggactgttacatgttttaattcctcgccaagtttttctccggcaccctttaacattgctgagtggaacggtccgctgacctttaacggaacaacacgttttgctccggcttctttgcagagttctccggctgccgctacggctttttcttctccggtaatgacgatctgtcccgggcagttatagtttgcgatcgatacaatgccctctgtttttttacaggcttcctcaatctgcgcggtatccagtgccaggactgctgccatggctccgccctccggcactgcctcctgcatgtagatccctcttttgcgcaccagtgcaaatgcatcttttctgctcagtgctccgcaggcaatcaatgctccatattctcccaggcttaagcctgcagtcacatctgctttatagccttttacctccaatgcacgcaggatcgcagcctcggcggtcagcatacagatctgtgtatactccgtgatattgatcttgtcgttttcctcaaagcataacgcagcgatatcaagtcctgacgcctcggatgcctcctcaaatacttctctgcattccggaatggcatcgtaaaaatcctttgccattcctatgtactgtgctccctgtccaggaaacataaaaaccgtctttcccatgttaatctccattcttgcgctgtcttttgcgcatctcaagtttgtgcgtaagcacaaatcttgcgtgtgaaaaatcttatttttcacactaacctccgttttttgcgcttatttttgcactatcttccaagcagtgactccgcctgtgtcacaacgtcctcgatgatctctttacagctttcttctttttttaccatgccggcgctctgtcctgccatcaggcttccgttgaccacgtcaccgtcaatgactgccttgcgcagggacccaagtgtaaggtgctctaactcttcaaatgaagcgccctctttttccatttttaaatattcgcggctcatctggttgcgaagaacccggatcggatgtccggtgctcatgcctgtcacttccgagtcaatgtcttttgccttgatgacacgctctttatagttcggatgcacgatggattcttttgcaaccacaaatctggttcccatctgtactccttcggcgccgagcataaatgccgccgccatacctctgccatccgcaattccgcctgcggcaataaccggtatctgtaccgcatctgccacctgtggaacaagtgtcatcgtcgtctgcgcaccgatatgtccacctgattccattccttctgcaatcactgcgtccgctccgccacgctccatcattcttgccattgcaacactcgcaacgaccggaatcacaacaacgcctgcctgtttccatgcatccatgaattttccgggatttccggcacctgtggtcacaaccttaacgccctcttcaatgacgatctgtgcaacctcggctgcatttggatttaacagcatgacgttcacgccaaacggtttgtcagtcagcttctttgcctccctgatctgctctctgaccacctcaggcggtgcacttgccgctccaatgatacctaaacctccggcatttgaaactgccgctgcaagatgatattccgcaacccatgccataccaccctgaatgaccggatatttcgttcccagcagtttacttacccttgtctccatacttaagccacaccttttccttttaagtactcgacaacatcattgacagttacgatagaaggtaaatcctcagatgggatctccacgccaaactcttcctcaagagccatgacaagttcaaataaatctaaggaatctgctcctaaatcatctttgaaattagactctgccttgatttcagactcattcacatttaactgctctgcaataatcgggatcattttctctaacatattttttctccttttctgcgcatgccttatcatttttccagcgccctgcccttatttctattgtgggctgattttcttttcttattttctgattcatgtaatcatttgcctttcaaatagtttgatagtcaaataattagcttttcaaagtatatgactgatggaaatatttgtcaaggtaatttggtaaagttttgcaaaatggtacttaggtattaagggacagtgtaaggcgcagttttccgggtgccgctggcaggtttggttccgttgtgcgaaaataagaaaagctaagtatgcctgtttgagttggtttcggagtgacgtgtacgtcctgaatgtgccttccctggcacatcaggacttgtgctgccgtccatggcagcacaacactgtgagtgaacaggcatactaagattttctaattttcttccaaagtctcaaatctgccggcggcacccggaaaactgcattctacatgccctcgataccgaaaaaagggaaatctatgctctgtaggttacgactgtttcctcattatttttttgttctgatcttgattgtgatttttctttacttatgttttaatgggattaatcggatttttaattttaactacaggagatttctcatgcattttgttcaggcgaagaggcttttatcaaaggataacggaatgaatatttaccgtggatgttcccacggatgcatttactgcgacagccggagcaggtgctatggttttacacatgcatttgaagatattgaggtaaaggaaaatgccccggaattgttagaaaaggctttgcgatcgaagcgtcagaaatgtatgatcggaaccggtgccatgtgcgatccttatcttcatttggaggagcgccttttgctgaccaggcggtgtttagagctgatcgaccggtatgaatttggtgttgcggtacagacaaagtcagcccggattttaagagattttgacctgttaacgtccatcaatgaaaaggcaaaagccatcgtgcagatcacactcaccacttacgatgaagatttatgtaaaaagatagagccagatgtttccaccaccaaagagcgcatcaacgtcctgatgaaatgtaaagaagccggtattcccaccgtagtgtggctcacaccgatcctgccgtttatcaatgacactgctgataacataaaaaatctgctggatgcctgcgtggacgccggcgtaaagggaattatattctttggcattggcgtgactctccgagatggcgaccgggaatatttctaccatgccctcgataaagattttccggggatgaaggaaaaatatatccgcacttacggtaatgcctacaacctgccaagcccgaatgaaaaaatgctcattccaatgatcgtggaacaatgccaaaaggctggcatcctttgttcgccggatgaatgttttgcttatctgcatcattttccggaaaaatacgttcagcggtcgttatttgagtgaaaattgatcatgaatttttgtcgattgggtatatacagaaaaaatctgctgtttatacccaaaaatacgggaattttgagtgatttttcactgataatgggcatagcagatccgtttttattatatatacccaaaacgcaggaaaatcagggggttttgtgggtatactgctgcagtttctttgccatatgcccaatctgcgatatttcaatatcttatgatgtcagatgcactttgccagtcatcatgttgtgaaaaactattgaaccccaatattataatggaggatctatgaacatgaatataaattctttatcacaaaaatactctgtacgaaaactcgacgaaaatgatgtagatatcatctatgatatgagctgcaaaaacgatatcttttatcaatatcatccgccctttgtcacaaggaaaagtattttagatgatatgggagccttaccaccgggaaagggctatgatgataaattctatgtcggttttttcgaaaatgattcactggttggactcatggatttaatccttgattatcccgaaaaagaaatttccttcattggattatttatgacagacacacgctatcagaacagaggtgtcggttccggaatcatcagcgacgtgatcctttgtctgaaatcatctggatataaagaaatccggcttggcgttgacaagggaaacccacagagctattctttctggataaaaaacaaattcactccgatccgtgaagatacctatattttaatgggtcttcggatatgatctgaaaagaacggctgcaacagattttattgtttaaagaactggaatttccgttaaaagaaatcaaaaaaatgtaaaagaatttttttctccttttacactttttttcgtctatgattttatttttaaagttctacgcttcgatcacaagctcttcttttgtgacctctcctttttcgatatggaaggaattgagcaccagctcctccgggttcatcagggagaggatcaggtaattcatcttcggatcatacgctaagcggatatcttcctgtgaagggcgtgacggcgattccgggtgcgagtgaaaattgccgagaagtacgccttttttctggcggatatctttgatcgccgcaagctgctctgccggatccatggaaaaatgttccctgctctcgtctacgttgcgaagcagatacacgtctgtcaccacacgtttgtcaccttccacatagccgccaagcagtccgcatgcctcgttcgggagtcctttttttgcatgatccacgattttattgtaatcttcctgttttaaaatcagcatatgcgcctcctaagttaaataccgtctgtgcagacaacctgctcgtagtcgatcagttctgtgattgtcggatgttttccacatactgcgcagccatcagtattagacggcagtttaactttgtggaactcctgattgattgcatcgtaggttaaaagataaccggttaaaagttttcctacaccgagaatgtacttgatagcttccattgcctgtaaacttccgatcacaccgcccatggcaccgatgacacctgcctgtttacaggtcggcactgcatcctttggtggcgggtttttgaatacacagcggtagcatggtccttctcccggaacataggtcataagctgtcccttaaaacggatgattcctgcatgggaaaatggtttttttgccatgacacaggcatcattgattaaaaactttgccgggaaattgtccgttccgtcaatgataaaatcataatcggcaatcagatccatgatgttttcgcttgtcacaaactggcggtaggtttttaccgttacatccgggttcatcgcattgatcgtctcttttgcggattttacttttgcttttccgatgtcggctgtgccgtggatgatctgacgctgtaaattggaaagatcgacctcatctgcatctacgataccgatggttcccacgcctgctgcaccaagatacattgctgcaggtgcaccaagtccgccggctccgatgatcagcacttttgcatttaaaagttttttctgtccctttgcgccgacttcttttaatatgatatgtcttgaataacgctcaatctgctcatctgttaacgccatagctgcctcctcccatgaaatataaaaattctacgttgtcgccatcttttaataccgttgattccacctgctcggatggaacgaattcctcattgatggaaacggtcacatactccggggtttccacctgctctaactcgaacagttctgttaactttaagtcatcttttacttcttttttgtttcctgctactgtgatctgcatgtttctcctcttttccgcggaacctttttttgtctgcccgctattttaaattttcatcgatccacgcctcaatatcagcttttcctgctgcaccggctctctctgctttgacctcgccctgtacaaacaaccgcagtgccggtacacccatgacgtcatatttttcagcaagctccatgtcatagttgacatttactttatatacagaaagtgtgtcttcgcgttcgtcctcgatatccccaagcaccggtgataactgcttgcacggaatacaactgtccgaataaaaatctaccagaaccggcagcggacttttcaggactttttcttcaaaattgtctttattgattcgctgtgccatgattcctcctatccctctaccttgcggacgatcaggttataagttccatcttcattgtccaccagttttaagatctgatgtccctcttccttgacactgcgtggtacgttctgtaccggctcaccatcgttcatgcggatggcaatgacttcgccatcatctaattcctccagcgctacctttgcttttacgaaagtgagcgggcatactttatcggtaatatctactgtttcgtcgattgcaattcctgcgatttccatttcttccctcctgtttcttcttattatatatgctgcatttttgattgctccagattgttttctgtatgcatgcttttgctgcatctatttgtttacatgcttatttgttcttgcatgcatatttttttgtgacatatctatttgtttttatatacaattttttcctgcatacatgttttttctgcccgaaatccttactttccctcataagcctctctgatcttcttgcggaactctacctcgccgacgcgctgtaacgtcaggcggaaacgctcgcccgggtttgcatgatctctgaaaaagtcgatcgctgcatcggtgacacggaacagtgtctctttgtcatgtacgattgggagaagctgctcccctttgtagatctgatttccgaacaatccaccgaaggaaaccagatatccgctgtttccttcccacgcatccgtcggacaggacttcacgcagcggccgcagtagttacactgatcgcggttgatcgtcactttgtttccttcacatttgattgcaccctgacggcacgccttttcgcagacaccgcagccgatacatttatcctcaacccaggaaacttccatgccgcctttgattccgatatcattttcctctgcctttaagcagttattctggcatccggtcacaccaaacttgaacttgtgaggaagttcaagtccaaaataatgttcatctaactcctgtgccagtgaataggtatcaatacatccgcttggacagatctccgaaccctgacaagctgtaacggtacggactctcggtccgcagacacccggtttcacgccgccttttgcaagctctgcttttacttcctcgatatcctcaaagttgacaaacggtatctcgattccctgtctggatgtcatatgtacatagcctttgccgtacttttccgcaacctctgccacggtcttaatattttctgcagtcagattacctccgaccacctggattctgagtgagaaaaatcctttctgtttctgcctcatgaatccgcctttttttaatactgcataatcaactcccgccatctttacactccttatcttttctgatttttcaatatcctggtattctactgtgcttttctattgtaacactttaaagtgcccgttttaaagtattactgtaacactttggtatattttttcgttttttaagaaaggctctcgatcgcctgcttaaaatcccagatcagatcatcaatatcctcgattccgacgctgacgcgcaccagatcatcaaatacaccgcccgctttcttttcttcctccgtgctgtgtacactgatggtcgattccggatggatgacaagtgttttggtatcgccgatattagataccttaagcggatattttaatgcattgataaatgcaaatgcccgctccttactgccaagccttaaggtaaagatgccgccgtaatgaccgtcaaactggctctttgcaatctcatgccagttgctcgtctctaaccctgcataatttaccgtaatgtctttatagttttcttcaatataagccgcaagctgcattgcattgtcgcagatacactccatgcggagtcctaacgtttcaagcccaatgctgtttaaaaatgcattttgcggcgagagacaggctccggtgttgcggaacagtccgtttctcaattttgcagtgtaggcaaacggtccgaattttacaaaatcacgcatacccggatatttttcggtatcccacttaaatgttccgccgtctgtgataactccgctgatcgagttgctgtttccattgatgtatttcgaagtggaattgactacaatgtctgcgcccagtgaaagcggttttaccagatatgcggtggctgctgtgttgtcgataatgagcggtacgccattctcatgtgccagctttgccagcgctttgatatctgtcacatccagcctcggatttccaagtgtctctgcaaaatagagtcttgtgtgtgcgttggtcgctttgcagaatgcatcgagatcgttgttttcgacataatgagtcgtgataccaaatgcttcgagatcccggaagagatcaatgcttccaccatagaggctcgcgctcgatacgatctcatctcccgcctgtaagatgtttgcaaatgcattaaacatcgctgccattccggatgcgcatgcaacgctcgatttaccgccctctaacacggtcatccttttctcaaatgcttccaccgtcggattattgatcctcgtataggaaaatcccggagcctgattatgaaatatcttttccagacgttccgccgattcctgttcaaatgcactcgactggtaaattggtgttaatgttgctcctgtctgcggttcaccccgaaaagcaccgtgcagcaaagatgtattaaatttcacggtatcgctccttt

SEQ ID NO: 980 - DNA, 5095 bp, unidentified
  source 1..5095: mol_type = unassigned DNA
tgcaagatgaacggcatgaactactccaccttcatgcacggcctgaaggtcgctggcattgagatcaaccggaagatgctggcggagatggctgtcaacgacgccgccgccttcacccagctgaccgagatcgccaagaaggcgtaagatccctttccagactatgtgagcagcgccctcccaaatgggagagcgctgctttttgtatatccaggggcggaggggaggcaatccccgttgtgccccttcggtcaggctttccggcagaagtacggcccgcggtccgcctcatggggctgcgcaaacgtccaggtgaaatccttgtctaccacgtaccagtccgctccgggaatggcgcgtgcatctgcgggcagggtaaccagctcctccgccgtcaccggccgcaccagaggctcaccctccggcggctcttcataataaaagaggtatttctcaccggatgcctccgacagagcctgccgggccgcgtcgccggacaggcagggcaccaggttccaggagaagagatgccacaggtaattcccatccgacagcacatgcctccccaactccgcgtcggacacgccgtcggcaaaaacgtccagccagcggttcttcacccgccgaatgtcggtggggaagggttcctcccagggaaccatggtggccacacaccggcagatgggcagcccctgctcatggaacttggcctcgtagtccgtcatgacgcccaccgggccattcgcatggaggtcccgggtgacctcggacagctcaaagccgaacagaggcagctcctccacggagaaggtgaagaggtcctgattgtccgtcttgaagtggatctgcccgcccatcttcagcacctggcggtacagccgcaggaagttgccgtgggtcaggcggcgcttggcgtggcggttgctgggccagggatcgcagaaattgatatagatccggtccgcctctcccggggcaaagaacaggggcagctggtcagcattggcgtcgatgaagaacacgttggtgagcccctgggccgcacaccgctccatggccatgaccatggcatccggcacccgctccacagcgatgaacagcacgtccggctccgccgccgctgtgccggcggtgaagcggcctttgccgcagcccagctccagccgcagctcccgggcctggggcatcagctcccgccacttgcccggcatggagtagggctcccggatcaggcggtcgccgcagcgctccatccgggggatcagattctttttctttcgcatccgcatgtgtcaacatcctcctgggtcggttcccgatccgatttcaggaagaccccgccggggagtcctccgtacattcagaatgctattgtaccatacagacccggcgctgtaaatggcggcgtggatttcctgcttgcgcggaaagcaaagagatgatatgatagcccaaatgggaggggggagcgatgtgcccaaggtgccctactgcggcagaagcatgttttatcaggaggcgggcgagggcccggtcctgatctttctccatggcaataccgcctcatcccggctgtttgagccgttgcttccactctatacgcctcatttccggtgtgtgctgctggactttctgggaaacgggcgctccgaccgggtggagtcgtttccggcggacctgtggcaggaagaggctcggcaggccctggccctgatccgggcggcgggctatgagaggccctgtctgctgggaaccagcggcggcgcctgggccgccatgaacgcggccctgctggcacccggcgcagtaggcgccgtagtggcggacagctttgacgggcggagccttcacccggggtttgcgcgggatttgacagcagagcgggaccgcgccaaaagagacaaggcagcccgggaattttatgcatggtgccagggaccggactgggaggcggtggtggaccgggacacggatgccctgttgcgatgcgccgcctccggacggccgctgttctgcggcccgctggagcagatgcggccgccagtgctcctgatggggagccgggaggaccccatgtgcagacaggatttggaagaggaatacaaggcgatggcggcgcagatgccccatgccgccgtgcgcttgtttgcatccggtgggcaccctgccattctttcccgggcggaggcggctaaggaggagatcctggcattttggctccggtgcgaggcggccgagaggctgtgagatttccggcagatacaactggaacgaagggccttgtgaatgcattaacaaaattgtataaagtttaacgaacaatttgtatgaagtgtaaaaaacgtgaaatttttcgcaaactgcacaaattatacttgataaatgccgccagtcaccctataataaagtttgtgagtaaattggcaatatcggaatgactctgtgttctcccggaggggcggcacagcccggccccctggagtgccgaaaggcatgaaacaaggaaaccaaacaatttattcaaaaataacaggaggaaaaatcatgaaggttgcagtttttggcgcaggtaccatgggcagcggcattgcgcaggttttcgcggcaaagggccacaccgccctgatgtatgccagctccgtcgcttccgcgcagaagcacaaggataagctggctgcttccctgcagaagcgggtggagaagggcaagatgacccaggaggctgtggacgccctgctggccaacgtgctggtggaggagaagtccgcctgcgccgacgcggatctcatcatcgagtgcgtcaaggaagacatggctaccaagaaggagctgctgaatgagctggacggcctgtgcaagcccgaggccatcttcgcctccaacacctcttctctgtctatcaccgagatgggcaacggtctgaagcaccccgtcatcggtatgcacttcttcaatcccgtgcccagcatgaagctggtggagatcatccgcggcgccaacaccacccaggagaccttcgatttcgtctataagctgtcccaggagatcggcaaggagcccgtcgaagtggctgaggcccccggtttcgtggtcaacaagatcctgatccccatgataaatgaggccatcggcctggtagagactggcgtcgcctccgtggccgacatcgacaaggccatgcagctgggcgccaaccatcccatgggccccctggctctgggcgacttcatcggcctggacgtgtgcttggccattatggagaccctgtacaatgagaccggcgactccaagtaccgtcccgcgctgctgctgcgcaagatggtccgcggcggcctgctgggcaagaagaccggcaagggcttctatgattattccaagtaattgaagtcagcaccaacaagaaaaggagttaatggtatatggattttcatctgacaaacgagcagcagatgctccggaagatgtaccgtgaattcgccgagaacgaagtgaagcctctggctgaggagatcgacgaagaggagcggttccccatggagaccgtcgaaaagatggccaagctggggatgatgggtatttacttccccaaggagtacggcggcgccggcggcgacgttctgtcctacgccatgtgcgtggaggaactggccaaggtctgcggcaccactgctgttatcgtttctgcccacacttccctgtgctgcgcccccatctttgagcacggcaccgaggagcagaagcggaagtatctgcccgacctgctctccggcaagaagatcggtgccttcggcctgaccgagcccaacgccggcacagacgcctccggccagcagaccctggcggtgctggagggcgaccactacgtcctcaacggttccaagtgcttcatcaccaacggcaacgtggccgataccttcgtggtgttcgccatgactgacaagtccaagggcaaccacggcatctctgccttcatcgtggagaaggacttccccggcttctccaccggcaagcacgagaagaagatgggcatccgcggctcctccacctgcgacctgatctttgaggactgcatcgttcccaaggagaatctgctgggcaaagagggcaagggcttcaagatcgccatgcagaccctggacggcggccggatcggcatcgccgcgcaggccctgggcctgggcgagggcgctgtcaacgaggctgtcaagtacacgcaggagcgtgtccagttcggcaagcgcctgagccagttccagaacactcagttccagctggccgacatgcacacccggatgcaggctgctcagtacctggtgtacgctgctgccatgaagaagcagaatcacgaggactattccatggacgcctccatggcgaagctgttcgccgctgaggctgcctccgatgtcacgcgccgcgccgtccagctgttcggcggctacggctacacccgcgagtatcccgtggagcgcatgatgcgcgacgccaagatcaccgagatctacgagggtaccagcgaggtccagcggatggttatttccagccgcctgggcgtgaagtaagataggaggtaaaggttaacatgaaaatcattgtttccatcaagcaggttcccgacacctccggtaaggtggcggtgaatccggacggcaccctgaaccgtgcgtccatgcagaccatcaccaaccccgacgatatgaacgccctggaggcggccctgaagatcaaggacgccaccggctgcaaggttgttgtggtgaccatgggtccgcctcccgctgccggtatgctccgcgaggcgctggctatgggcgctgacgaggccgtgctggtgtccgcccgcgagttcggcggttccgatacatacgccacttctcagatcctggctgccgccatcaacaagatcggcgtagaggctgacgacatcgtcatgtgcggccggcaggccatcgatggcgacactgcccaggtgggtccccagattgccgagaagctgcatctgccccaggtgacctacgccgccgacatccagaaggacggcgacaccatcaccgtcaagcggatgctggaggacggctacatgaccatcaaggtc

SEQ ID NO: 981 - DNA, 53679 bp, unidentified
  source 1..53679: mol_type = unassigned DNA
ttctttaaattgcgtgcgcggttataatatccaagtccttcccacaatttcagaagttcttcctccgaaactgctgccagagaaggaatatccggcagacactttgtaaaccggtcataatatgcttttgccgcttctattcttgtctgctggagcataatctccgacagccatacatgatacggcgtagcatcatcccgccacggcatactgcgtttttccttttcataccataagcaaagaggctcaacgagagcctccagtttaaattctttattttcgttcattttcaccttttcccagttctatttcattgtgggacaaatcgacgtactgattaatttcctcaatatccatatgggtaaattcggaaagttcttcaattgtcgcaatacgtccgtattcctgcgctaatgtcctcgttgcctccagcaaaaggttcacacgcccaagcagtgcatgcacgctgtccgttcctgccagttcttcatctactaattcaatcaaccggcttctcactgcatgttcaatggctttttgataatccacaacttcttcatttccacagagcatcgcaacacaggcggttaattccaaattaccttcctgaatcaaatcttccaccggcacaccacggccgcggtatttatccgccaactgcatgacccggtgcagatgcgcttcgataacagaagaaattacttcttcctcgcctcttcgcaactgttcgagtaaacgcacaagttcctcttcttcgtaccgctttaactgacacagttcttctttgtataagcgcagatatttggaatccttttcgcttttttcgacagcctcttcttccgttttctctaccggcgcacgatatccttctacctcaatccgatgttctttaaggtatgcatagacaaatggcatctgttcctctgtcaaattccagtcactgcaataatcggcaatttcttgtttggtgagcaaattttctttcgttcgtccaaaatctaccaactcttccatctgacgtagaaattctctctggtccatatctgcctccttaattttacaatgcactccgataaatcgcaatcacatcatcacgattcaatttcacataatttccttcggtcttacgccccttcaaaagcttatcggtcataagctcgatatcctcttcttttgcaccaatctctgcaaaggaagacggcatgccgatttttttcaaaaatgcttcaaacgcctcaattcctttgagtgcggttttctccggatgtttctcattcatcggcacatcaaatatacggtttgcaaataaagcaagtttacccggatttttcttacagacataacgcatccaaagcggtgcaattactgcaagtcctgcgccatgagtgacgtcataaagagctgacagttcatgctcgatgtggtggcttgcccaatcctgcacacgaccgacaccgcaaacattattatgtgctaacatacctgcccacataatgtttgcacgcgcttcataatgatttggattttcaatgacacgcggtgcctcatatacaattgtttttaaaattgcttcacacaagcggtctgtaatctcaacttcctctgtgttggaaaaataacgctcacaaacatgaatcatgatatccgttgctcccgctgccgactgatacggaggcagggtgcaggtaagttccgggttcaaaatagagaacttcggacgaagcaaatcactttttgttccctttttcaccattgttttttcatcggtgattaccgtatttggagaaccctcactgccggctgccgcaatcgttaatatcgttccgattggaagcgctttctcaacggatgccttgccctgataaaaatccatgaaatctccatcatacaaagtaccggcagcaattgccttagacgaatcaatcgtacttccaccgccgacggcaagaataaagtcaaccttttctttcttgcacaattcaattccctcgtatacgagtccgcttcttggatttggttttacaccaccaagttcacaaaattccaaaccgctttcctttaatacggaaatcacggtatcataaagtccgctctttttgatggagcctcctccatagtgaagcagcactttatgtccgccaaatttttttattaaatcagcaacatgcttttcggcgcctttaccaaaatcaaaataagtcggcgcataaaaggtaaaattatccattataaaatattaagtcctttcttcgatgcttctttccacacatcatccggccaaatcgatgcttgtacttctccaatatgtgcttttttcaggaaaaacatacaaattcttgactgtccgattccaccaccgatggtatacggaagtttcttttccaagatttctttctggaacggaaggttttcgcgctccgggcatcctgctttttcaagctgctccttcaatgccttttcatccacgcggattcccatggaagaaatttcaaatgccatatcaagaaccgggtaataaacgataatatcaccatttaatgaccagtcatcataatccggtgcacgtccatcatgcggctctccggaagctaacttatctccaatctgcatcaggaaaatggcaccatattcttttactgcctcgtactcacgctcttttggcgtcttgtccggatatcggtcctcaagttcctgtgttgtcacaaaggtaatctgctcaggcagggatttcttaatgtagtcatactgcattgccatataatcttctgtttccatcaatgcctgatatactttatttacaatagctttcaaagtatctacattacgttcttctttgtcgataatgcgctcccagtcccactggtcgacaaacaaagaatgtacattatcggtttcttcatcacggcgaatcgcattcatatccgtataaagcccctctccatgagcaaaaccatagcggcccaacgcatgacgtttccacttggctaacgaatgtacgatttctgctacccttccgttctgctccaaaatatcaaaagaaaccgggcgctctacaccatttaagttgtcattcaatccggaatccggatctacaaaaagtggtgctgaaactcgtgtcagattcaaattggcagccaaagccttttcaaagaaatcctttacttttttgattgccacctcagtctcacggatatccagtgcggactgatagccttgtggaataattaaattcatgttgctaacctcctcatgtatgctttataattcacaattgtttacggtacgtgggaacggaataacgtcgcggatattctgcatgcctgtcaaatacatcacacagcgctcaaatccaagaccaaatccggcatggcgtgccgtaccatatttacgcaaatccagataaaattcataatcttttttatccagtccacattcgttcattctctcaaccagcttatcataatcatcttcacgctggcttcctccgataatctctccgattcccggaaccagacagtccatagcggcaacggttttattatcgtcgttcatcttcatataaaatgccttgatttcttttggataatccgttacgaaaacagggcgtttgaaaatttcttccgtaagatatctctcatgctcggtctgcaaatcgcatccccagcttactttgtattcaaatttatcattgtgctcttctaagagtttgatagcttcggtataagtaacatgtgcaaagtccgcatccacaactccccgcagacgctcaatcagtcccttgtccacaaactgattgaagaatttcatctcttccggtgcattttcaagcacatagcggataacatattttaacatgctctcagctaacatcatatcatccttcaaatccgcaaatgcaatttccggctcaatcatccaaaattctgccgcatgacgtgtcgtatttgaattttccgcacggaatgtcggtccaaatgtataaatgtttttaaacgccatcgcatacgtttcaccatttaactgaccacttacggtaaggttagtttctttgcggaagaaatcctttgtgtaatctacttttccttcttctgtcatcggaaggttttccatatccaatgtcgtcacacggaacatttcaccggcaccttcacagtcacttccggtaatcaatggcgtgtgtacataaacaaattctctctcctggaagaatttatgaatcgcatacgcaatcaaagaacgcacacggaacactgcctgaaatgtatttgttcttggacgaagatgggaaatcgtgcgaagatactcaaaggagtgtctctttttctgcaatggataatccggtgcagactcaccttctacaacaacctcatctgcctgaatctcaaatggctgtttcgttcccggtgttgctactacttttcccgtaacaatcacggctgctcctacattcaatttggaaattgttgaaaaattatcaagtttatctgaatataccacctgaagcggctcgaaaaatgttccatcatgaaccactaagaatccaaatgttttggaatctctgacgcttcttaaccatcctccgaccgtaaccgtctgttctacatacttttcctggttgcgatacaaatcgcgtatactaattaattccatatctgcctcatttctgcgtctaaaacacaataatatagttagttctattctcaattttacagtttatcaaaatatgaaaaaaaatgcaagggctaccgcttgtgtttgtgtaaaataaacggatggcggattttttagtttccgtagttcagcagaaaagctttgcgtctcgtgggtgctttcgctcattgagtacgtagcggtatgggcaccgaaaataccagtgcctcataccgacgtactcaaaacccacgagtcacaaagcttttctacggaattactggaatccaaaacactcctattacacagccaaggaatgccaaatcacttgccgtgaaagcagatagattagcggtttccatttgttgctttaattccggcagtctgccgccaaactttaccgctgcccctatccctgctatcacgcaaaaaaccacaacacatataagcagttcacagtatactcttttcggattcatttttatttctctttcgttttttcattttatcaatttgctcaacaaatagcatcgttttaactcactcatatcttctgtttcgattttatgaatcaaacacacaatacattttcgtgcattatcaaaattatgtccgcggaatttttctgtttttaaacttccatgcagataggtaaaagggttatagtcaggctcaacactgcctaatatcaatgcatgctttaagctcttttttaccggataattaaattgtgccatcaaataatggctaagtatcttatggtcttttgtctttattccgcatccttctttcttttttctttagtataaaaagaagtgttaaacgagtacattcaaatatctaaacttttttaaattcgtagatagaatctactatcaacaacataatctagcaataaagcatcttgttttccacgtttattcacgttatttaacttttattcacgttttatgttgacatttgttaacgattgtgctaatatctgagttacaatacaacaaccattaaaggaggtaaccattatgtttattgaagaaagacacaaaaaaatactggaaatgctgcaaaaaaacaaaagtatcacaaatcaggagatacaagatatgtttggcataagttatgattctgccaaacgtgacctgcgtctgcttgaagaacaaggtatgctaaaaagaactcacggcggcgccattttaagagaaacaatcggggctcaatataacattggtgatttaacagctaaggagcgcattgccaaagttgacccaaattatcttgccattgcaaagaaagcagtcacctgtataaatgataatgatgtaatatttatcactagcgcaagcattgggtatcttatgacacagaatctgccgcatgatttgaattgtaccattgtaacaaattccatctctatcgcagataatctgcgccaatatccaaacatcaccatccttcttttaggaggccaattacacaaaaacggctgcgtatatgatggtttcgccattgagatgttaaaacggctgcgcttcgataaaatttttatcacctcagcaagagtcagtgctgacttcggattatccatccagcgaaccagaaatttatgtctgtataacactcttcttgcgtctgcaaaaaaagtttatggactttaccctaccagcaaaattggcacagattctattataagcatttgtcctattaacgctttagatgttcttattactgatgacgatgcattagaagaagacttaaaagcaattgaagaaaatggtgtcgaaatacttctaacagtatagtcaaccgaggcggcagccgagacctcgaagtaaaaaagagcgattccttttggaatcactcttttttatattagagcgcgagacgggactcgaacccgcggccccaaccttggcaaggttgtgctctaccaactgagccactcgcgcatatatctcatgtccgtctttctgacagacacaagatatattatacatatatacatatcacttgtcaatagcgaattttatttttacgaattttttacgaatttatgcattcacaatctgaccaaaatccggtttcaaagaagcgccgccaatcagtccgccgtcaatatccggttttgccaaaagttctgcggcattcttggcattcatagaaccgccgtactgaatacgaattgcatctgcagtagctgcatcataaatctcaccgatacaagcacggattgctgcacatacttcttctgcctggtctgctgttgccgtctcaccggttccgattgcccagattggctcataagcaataactgctttttttgcctgatctgccgttacattctggaatgcaattttaatctgcatacgaatccaatccacataaataccctgttttctctgagtcaatgtctcaccacagcagataatcggggtaatgtcatgttcaaatgctttcaaaacctttttatttaccgtctcgtcagtttctgcaaaatactctctgcgctccgaatgtccgataatgacatatttaactccggcatctacaagcatgttcggagaaatttcaccggtataagcaccgctttcttcaaaataaagattttctgccccaacatttacattacttccctttaccgcctcaacaaccggtacaatgtcaattgccggtacacaaaatacaacatcaacatcatcatttttcaccaacggaagtaattcatttacaagggcaactgcctcacttggtgttttattcattttccagtttcctgcgataattcttcttcttgacataaaaatcactccttatacaaatatcttctcactctgcactaaatgtgtaattatcgtttttttctccaaaaatttctgtggtggcatacaaaacaccaccacagaatcaaaatcttatattattatttgtcgtttgctgctgcaacaccaggaagttcttttccttccaagaactcaagtgaagcaccaccaccggtagaaatatgtgtcatcttgtcaccaaatccaaggttgttacaagcagaagcactatcaccaccaccgataatcgttgtagcgtctttcaaatctgccattgcctgagcaactgcaatcgttccttttgcaaagtttggcatttcaaaacatcccatcggtccgttccaaacaactgtctttgcgcctttgatggcatctgcaaacaatttgcatgtcttaggtccgatatccagaccttccatgtcatccggaataccaccgcgctcaacaaccttgaagtttgcgtcgtttgagaaatcatccgctactatattatctacaggaatcaaaagtttaacacctttttcttctgctttcttctccatgtcaagtgcatactgtttgtaatcctcttccaaaagagatttaccaaccggctcaccatgagcagccataaatgtatatgccattccaccaccgataatcaaagtatctactttatccaaaaggttctcaattaccggaatcttggaagaaactttggcaccaccgaggattgcaacaaatggtctctccggattatttactgcatttccaaggaaatcaatttctttctgcatcaagtaaccaacaacagcagtatctacatatttggtaacacctacatttgagcagtgtgctctatgagcagtaccaaatgcgtcgtttacgaaaacatcagccaaagaagcaagttctttggagaaattatcttcgttctttgtctcttctgcacgataacgtgtattctcaagaagaactacatcaccatctttcatggcagcaacagcagcttttgcattttcaccaactacgttatcatctgctgcgaattttacttcctgtcccaaaagttcagaaaggcgaacagcaaccggtgccaaagaaagttccggtttcggctctccttttggcttaccaaggtgggagcaaagaataattttaccgccatcggcaatcaacttcttaattgtaggaagtgctgctaccagacggttttcatctgtaattttaccatcctgaagcggtacattaaagtcacagcgtactaacacgcgctgaccttttacattaatatcatctactgattttttatttaacataacaaacctccattttaattatttctatgaaaaaaggtccggtccaaccgaccggaccctttttgggatcaatttcaaaccttgtcctaaatcaagacttatgctaactcgctgaagtatttgattgtacgaaccatctggcttgtataagagttctcgttatcataccaagatacaacctgtacttcgtatgtgtcatcgtcaactttgcaaaccattgtctgagttgcatcgaagagagaaccatatctcattcctacgatatcagaagaaacgatttcgtcttcattgtatccgaaggactctgtagttgctgctttcatagcggcattgataccatctactgtgatgtcttttcctttaactacagctgtcaaaattgttgtagaacctgtaggtgtaggaacacgctgagcagaaccaatcaatttaccattcaactcaggaattacaaggccgatagcttttgcagcacctgtgctgttaggaacgatgtttactgctgctgcacgagatcttctgaggtcaccctttctctgaggaccatcaagagtcatctggtcacctgtgtaagcatggattgtaaccatgataccagactggattgcagcatatttgttcaatgcatctgccataggagcaaggcagtttgttgtacaagaagctgcggagatgattgtatcatctgctttcaatgtctcgtggtttgtgttatatacgatagtaggaaggtcatttcctgctggagcagagataacaacttttctagcacctgcattgatatgagcctgtgctttttctttggatgtatagaatccggagcactccaaaactacgtctacaccaagctcaccccatgggcagttgtttgcatccgggaaagcatagattttaatctctttaccatctactgtgatggaatcatcacttgcagaaacagtatctgctttctcatatttaccctgagaagaatcatacttcaaaaggtgtgcaagcatcttagggcttgtcaaatcgttaattgctactacttcataaccttctgcaccaaacatctgtctgaatgcaagacgtccgatacgtccaaatccgttaatcgctacttttactgacatgatatttcctcctaaaaatagttaaaattttggtttgttaaaaaatatacaaacttctagaacctattctacccaattccgtaataaaattcaagagtaaattcaaataatttgtatttttttacattctgtcatacaactgctcatatttcttcgctgaattcttccatgaaaaatccattgccataccgcggtcgataatcttattccactctctctttctattataataaacatcttttgcatagcggatggtattgagcatctcatgtgcattgtaattgctgaatgagaaaccggttcctttgctctcatattcattataaggctctacggtatctttcagtccgccggtctctcttacaatcggaaccgtgccatatcgaagactcatcagctggcttaatccgcacggttcaaagagtgatggcatcaaaaaggcatcgcaggctgcataaattttgtgcgaacgctcattggaatagtaaatattcgctgatacgcggtccggatatttccaagcaaaatgacggaacagattttcgtacttttcctctccggtaccaagtaccacaagctgtgtatcttctgcacagatttcttctatcacatagtcaatcaaatcaaagcccttttggtcggtcagtctcgacacaataccaatcataaacttcttatcatcctgtgaaagaccaagttctttctgaaggccgcgcttatttttaattttttctttgcgaaatgttcttgcatcataatttgcataaataagtggatcctttgccggattatactcatcgtagtcaaggccattcacaattccggtcaaacaccctgacttcgcattaatcaggccatctaatttttctccataaaacggggtcttaatctcttctgcataggtattacttacagtcgtaatctgatctgcgtaaacaagaccaccctttagataattagcatccccaaaggcttccaatttatcaggtgtaaaatagtatgcatccagccctgccgtatccataactgtctttttatcccagacaccctgaaatttcaaattatgaatcgtcataattgactgaattccacggtaaaattcgctctgctggaatgcatcatgcagatataccggaatcagccccgtctgccagtcatggcagtgaataatatccgggcggaaatcaatcacaggcagtgttgataacgccgctttatcaaaaaaggcaaatttttcaatatcctgataaatttctccataaggcttgctgccgctaaaataaaattcattatcaagaaaatagaatttaacaccgtttaattccatttcaaacacaccgacatactgcttacgccatgcaagttccagataaaaatgcgtgatataatgcatctggtttttatactcttccggtatcgcagtgtattttggaatcataacccgtacatcatatttactcttatcaaaatactttggaagtgaaccgacaacgtctgccaatccaccggtttttataaaaggaacacattcagaagcaacaaataatactttcttcaatatccttctcccctttctttttgacacaaaatcatattggtattattatacaccaaaaagggagcggtgaaaagatttttttaggctttcattttctgttctaaccgtatcttgtccgcaattagtgctacaaactccgaatttgtcggtttcccttttccattatgaaccgtatatccgaataattcatcaatcgtatccacttttccgcggctccacgccacttcaattgcgtgtcgtattgctcgttctactctgcttggtgttgtcccatgttgtttggctatagaaggatagagaatttttgtaatagaatttaacatttctttatcgtcaactgacatcataattgcatcccgcaaatactgatacccttttatatgtgccggcaccccgatttcatgaatgatattggtaacatccgattcaagattatatttcgccattttttcatttcttcggttctcatttcccgtagcaatgagttttgccctcgcacccggtttaaatttctgtacatgagaaagaagtgtttccgactcgaatggttttaataagtaatatgaagctcccaaggcaaatgccgtatccgtaattcgttcctgcgaaataccggacaccacaataatctccggcacctttttcatcttctgcttttcctgcagccgctccatcacaccaagaccatctaatttcggcataatcaaatccagcaaaagcaaatccggctccgtttcctcaatcattcccagtgtttctactccatcttctgccgttcccacgacctgaatctcatcatcatccataagaatattctgaatcatggatgccattcttggattatcatctgcaattaatacttttaatttctgcacaactagtacccccttgaaataattataaattttttataaactcaatgtgattaaaagtatatacctcttttctccatattacaagagtaaattctaaattattttaattttttatttatattctttttatatttcatcatctttcgactcctaacttcggtttttgacagcaaatgcggttctttttactgcaccaacatctcctcaataaaaattccataacctcttgtcgggtcatcaacaaaaacatgagtaacagccccaacaattttatcgttttgtataatcggcgaaccactcatcccctgtacaatcccgcctgtcagttttaaaagctttttatccgtcaccctgatttccatactcttattatcccttgcattaatttttatatcttcaatttcaatttcatacattctcgccctgccttcaagattcgcatacagatacgcctttccggcttcaatctcttgttttctgccaacttcatacgcctttccggaataggcggacacacgctcctgtttcatctcaccaaacaccccctgctccgtgttctttttaatttttcctatcgtattttttgcaatcatattgatatatccctgcagttctcccggatttcctttctcccccttcataatatcgactatctgcgtctgaaacaattcacccccgtgtaaattcaacagcgtcccggtatcaacatctgtaattccatgtccaagtgtaccaaattcaccggtcttcgttacataagtaagcgtgccgattccctgtgtatcctcccgtacccatgttccgattttatatgtgccatctgatgaaagcaccggacgcatggcaatttttatcttttctccgtttcggcgtattaaaaccgtaacctttttatcttttgtcccctgaatttcacggtttaaactttgaatcgtagcaacctttttctgattccactccaaaatataatcccccggctttaacaaattttcaccgggcgcataagtaagcccatcttttgccgggacctcagtcgtatccagcactagcagcccattagtctccacataaataccaattggctccccactcggaaaaatctttttccttttcaccactttaacgtccatcctctttaccggcagcacaccaaataagcggaccgatacctcataacttcctaaccggtttgacttcatagaaaaactgccaccctgattttgcacatgcagagccggaacactttgctcggtcttaaaaaacgccggcaggtccagttcctgtttttccccgacgtaagtcaaaacagaatcaggaattttattttgaacataatcatacatcaaatatccaatcaataatacatcagccactaataatccagccagcaaaaaacgaactttttttctcatactcattcctcccataattggcaaaataaaaacagaaggtacaaaacttactattgttttggttccttctgtttagtatagccaacttctatttttctaattctgaaaactatctgaacttttttggtttgctaacgctttcatctctctcgcattttcaagtaccgactctgtaatctcaacaccgccaagaatacgtgccagttcctgttcactctgcgacttatccaacggacgaatcactgtctccgaatgattttcatcaaccatcttttcaatcaaaaaatgggtatctgccattgccgcaatctgtgccaaatgagtaatgcatagaatctggtggcttttacttaaaagtttcagtttttccgaaaccttctgtgccgtacgtccactgattccggcatcaatttcatcaaaaatcaaggtctcaatatggtctttttcggcaaaaaccgatttaattgccagcataatacgggacaactcaccgccagatgcgatttttccaaggcttttctttggctcgcccggattcgttgcaatcaaaaattctgcttcatcccatccatccgcaccaaatgtatctttgcggctccatgcaatttcaaaatctacataggcaaaattcaaatctgataaagcagctttaatcttttcctgaagaatggaagcggtttcttttctttcttttgataactgctcacatttctttgtcaaatccgactcatattcctttattttagcaagaagtttctccttatactgttcaaaatctgcaagtttttgcagtttatcctctacttcttccaaatgcgaaagtatttcttcataggtacttccgtatttcgcctgcaaattgtgaatcgtatcgagtcttttctctaattccgaaaactcattggcatcgaaagaaaagtcctgcatataatccgctgtttcatgattaaaatcatctaaaagtccttcaatctgcaaaagttcttcctgcaagttccgaatttcatcaccaaagcctgtaatccgctgcatactctgcaacgcatggctcacagctcccgcggccgtatcacttgtcaaacggtgtaccagaccaagcgattccacaattgtctcagcgccggatgctctgcggtatgcttcttccacttcttcgatttcaccggcttgtaaagatgcctgctcaatttcctgtttttcgtattccagaaaactaagttctctcgcacgctcctcatccgacacatcttcatcctgccactgttttttcaacgctgtatattcacggtataaagcggcaatctcttgtttcagagcgacacactgtttggtggcaaactcatctacaattgctaaatgtttatccttctgcaataatgactggttttcatgctgtccatgaatgtcaatgcagagggcagccacctggcgaatcacactgaccgatacattttcaccattaattcggtttacactccggcttcccgtaatacggcgggaaatgacaatctgtccttcgtccgggtctacacctaatcttgataatttcttttttgtctcttcatcttcaatctggaaaacaatctctaccatcgcagagttgccatgctttcctataatttcctgcgaaactcttgcgccgagcgcgatgccgatagagccaatcaaaatcgatttgccggctcccgtctctccggtaagaatatttaacccggaagaaaaatcaacatcaatctcgtctattatcgcaaagttttttacatgtaaatttactaacaatagtctcctcccattccactactttaattttgtaacgttcacgcggcatccgagttttacaccgttgacaaccgcataaatcgttgttatacctctcttacgtccggtaacaagtccggtcgatgatacggttgcaatgttaatatctcttgaataccatgttacaccggtactaatctcgtttacatgaagctgttcggtatcatatggacgaagggttactgccttgcggtttaaatctacaaccaatacatcacaataaccatacagtccggtcgaagtcgttccgtaaatcgtagcctctccggcacgtttggtcttaatcttaccatatttatttacggttgccactctcggattatcggagtgatatttaatcttcgtcgtcgaattaaccggatttaaggtaatgccggactgggcaatctttcctttcgccacggtaatctggctgtttgccacagtaattcccgttgcctcaatcggctcaacaacatgaagtatgcaagttgctgacttaccggaaccatcttttgccgaagccttaatctttacaataccctcgccggttcccaatactcgtccggtactgctgactgttgcaatcgattttttattcgtcgtccacttcacggacttaatcgtcgcatttttcggaagaacagttgctttcagtttcaacgtacttccaacaagcagtctgcccgaataacggttcagtttaatttttttcactttacgaacaacacgcactttacatctggcgtatgcaccggaaccatccttcgctgtcgctttgatataagtcgttcctaatttctttgcctttaccttaccgccggaagtcacggttgcaactgattttttgctgctcgtccattttacctttttattacttgagccggtaactgtggctgtcacatagaatgacttgcctttagccaaatatttggttttcggcgataccgtcaccttcgtatcattttctttctgttttggcagaatcgtaatcaaacaggatacagaaaatccaccatctgtcgtcgtaccggttaccatcgccgtaccggcttttacaccggttactttcagattggaaatacctgccgcctctatttttatattactattggaagtcttccacgtcattgccttattaaaagctgttaccggattaaaaattggaatcagcgtaagcgagctgcccactcgaaccgtcttttctgatgagtctaaggaaactcctttcacaccatcctgcacagtcaccataataactgtcgtcggtcctgccacttttccgttgtaagcagtcgcctgaataaatgtcgaacctgctttcacaccggtcacacggccattcgtatcaaccgttgccacaccggtattataactcttccatacaatcgtatctgttgaatttgccggtgtaaaggttgcctttaagttcacactgtcaccggtcttaagcgttacgtcttttggtgtcagattcaacgccgttgacggctgtttcacagaaacttttacattcgatatcaaaccttcggttgtcaccacattaatattcgtagttcccggtgctttaccggtcaatgtagcaatgcggcgttcttcatcataagttaccgccacgataccatcatcatttggcgtccacgtaataccggttgccgtatttttcggattaaaatctactaataacggaaccgcctcacctacattcatcgtcacatccatctgacttatcgtcatactatccggcgtaccgataatcgttaccagacaggatgccattacattgtatggattgtaggtcggatacacactaacaagcgctgtaccggctcccttgaatttcatataaccatctttgtctaactcaacaacggaagtatcggaactagcccatgtaagcgctgtatcggtcgcattggttggaccccacttcacttcgtctttcatattataaccactcttgtaaagctctaactgcatctgtgcggcactaaatgaaatttcattaattggaatacgcaccgtcacctcaaacgatttgtactcgttattcacagtactgtaaacagtcaacgtcgcacgtccaccaccaactgcagtaagaattgcactcttgccgtccgatgcctgttctaccgtaaagaccgaagtattgctgctaatccagcgaagcggtgcaacggtaacggtctgtttgatgtttgcaactactgtaagatgatcgccaactaacatctgctgatccgttcccggattcaaggtaaagccggataccgtagcctctacttttaccgtacaggttgcagtcttatacaaaccatttccggcatccaaagttactgtaatcacaacatcctgcgttgtcactttcttaccttcaatcaaaccggtcagtctgtctaccgatacatagttcgggtcactgctctcccatgtaatggaaccggaataaatactatttaatttaacacttaactgctctttctgcccaaccacaatcgtcattgacgtccgatttaactgaatgttatccgtaatatcaatctttgttgtgaaagccgccggcagcgcctcattctcggcaagtcctaaaattctgcgaacataggcttccctgccgcttctcacggtcagcgttgccactaggttaccgacattttttgccgttaattctgcctttgtattatcaaagtccgcatattcggaataatccggtgctccctgcgccatcttaatatccacactgaaacactcattaaaatcttccagcgtcatattataactttccgcaaaatgatatccatcaccaatacttaaaatctccgttttgtcctgaatatcactcttaattgtcagatgcacaacggtcggtgtatatgctgttgttccattatccacgttttcatcataactgccataagtatagaaatacaggtcatactcacccgcttttccttcaatccgcagttcattgcttcgactcgccgtcggcgtaatcgaaatcaaatccgaatcttttccaagggaatctgcaataatttttgaatttccctgatcatcatctttttttacaacccacacaatcttacttcggattacttccagattgtttgcaaagttcgtatccgtgtataaacattcaccggaatttaactgggcgtcaatcgccgttccataatttgccccattggttgtcgaaacacgagggataacataaacatccagatatgccgtatacgtttccgcaccaccggtcggtgtatacgttgcaatcacctgcgtcttaccggcaccaaccggagaaacaagaccaccgctctgtgttacggttactacctcctcattcgcactcgaccactgggtattcgaagaattggcagaaccaaagttcaaaccaagattaaccggtgcactgttcgaatacatcacaagagaccttgccgtgtcattttcatgaacaaatttataaatcgaatcgtcggttgatgtatcgatcgagaatacgacacggatattacacgtcgtactacctaacacagcatccccagccatactgtccttaacggttactgtaacggtgacatcaccaggtgacaaagcctttacaataccaattgttttggatgtaccaggactaattgatgcaataatgtcacgggctgtagcatcttcaatcgtccattctaccttataacgttcatcatcataagccgttccttccgtacgaagcatcagctgcatactgcttgtcgtcatgtcataagtaactgccgggtctaaatcagcaccattaaactgaataaaaatctggtcagccgcatgagaaaactgcccacgcaggagaaaaaataatacccccacaaaaagtgtaagaagcactgcatatcttctttttttgaatcttttcttaatttgttctctcatatccataaccatacctttctatatcatctatctaaaatctgattctaaaataaacattcgcatccgtaatctgtatatcggacaaattcaaattaaaatttagtcttgattgtcaaaagatgcctcttttgttcccttaaacacaaataatttgctgataaaataattaattataataaccaaaacctgagtcaaaagtttcgccacaaacaaaagtgtattagaatcagggaacaatattacagcaagctgaacaccgccaagttcgataattaaagtggatacacggccgccaacaaacttaacaaattcaaccaaaagttctttcattcctgttgttttcgacgcaaatacaaactttttatttgtcacataagcaaacaaaatagcagacacaattccaattaaatttccaaggaacgtgcccagtgcaaatttcccgacataccactgttcccatttcaaaccataccacaatccatatgtaatcacaagattaacaagtgttgtacatcctccaaaaaacaaatataaaagcttgtccttattttttttataaaaaggccacataaatcgaagcaacttccaattcataatacggtcaaaaatatctgtaatttccggttccatctttgttctccattctttttattattttactgtaattaaaagggattcctgcaaacgattcgtatctccgttattatcctgtccccagtaaccacttcttccttttcagccccacaagagcacctccttttttatatgaattctattttaccataaaagaacaaaaaaacctagcattttgtttagcgttttacgcccgaacttgccacacaaaaaaaatcgtgctataatacgattttgtggtttttgcatgaatgaatggaggtttctatgaaaacaacaagagacgatatcagaaacatcgccatcatcgcacacgtcgatcatggcaagacaaccttagtggatgaattattgaaacaaagcggtgtattccgcgccaatcaggaagttgccgaacgtgtcatggactcaaatgatattgagcgtgaacgaggcattactattttatcaaaaaatacagccattacctatgaaggtgtgaaaattaatatcatcgacacaccgggacatgccgatttcggtggtgaagtagaacgcgttcttaaaatggtaaatggtgtcatcttagtcgttgacgcttttgagggtgcaatgcctcagacaaaatttgtgttaaagaaagcactggagctgtctttgccggttgttgtctgtgtcaacaaaatcgaccgtccggaagctcgtccggaagaagttgtcgatgaaattttagagctgtttatcgatttagatgcggatgaatcccagttagactgcccatttatctttgcctcggcaaaagaaggtgtagcatcctgcgatgtcaatgagaaaggcaccgacatgaagccgctctttgatgcgattttaaattatattccggcaccggaaggtgacccggacgccgacacacaggtcttaatcagcaccattgattacaatgaatacgttggccgaatcggcatcggaaaagtcgataacggaaccatccgcgtcaatcaggatgccgttatcgtcaaccatcatgacccggataaaaatgaaaaagttaaaatttccaaattgtatgaatttgaaggactcaaccgtgtggaagtcgaagaagcaacgattggctcaattgtagccatttcaggtattgcagacattcacattggagatactctgtgtagtccggaaaatccacaggcaattccgttccagaaaatttcggagccaacgattgccatgcattttatggtaaatgacagtccgcttgccggtcaggaaggaaaatatgtgacaagccgccatttgcgtgaccgtttataccgcatgttaaataccgacgtatccctccgtgtggaagataccgacacaaccgaagcttataaagtgtccggccgcggggaactgcatttatccgttttaattgaaaatatgcgccgtgagggatatgaatttgcggttagcaaagcggaggttctttataaagaagatgaaaatggcaaaaaattagaaccgatggaacgtgcttatgtcgatgtgccggatgaatttaccggaaatgtcattgaccgcctcagccagcgtaaaggggaattacaggcaatgaccccattaaatgcaggcacgacacgtctggaatttatcattccagcccgtggactgattggataccgcggcgaatttatgacagacaccaaaggaaacggtgttattaatacagaatttgaaggctatggtccatttaaaggagaaatcccttatcgtaaacaaggctctctcattgcttttgaatccggcgaaacaattacctacggtctttttaatgcacaggaacgaggcactttgtttgttggtcccggtgaaaaggtttacggcggcatgattgtcggcgaacacgcaaaaagcgatgacattgaggtcaatgtatgtaaaaagaaaaacctgacgaatacccgttcttccggtgcggatgaagcactgcgtcttacaccgccgaaagaattaagtttagagcaggcactggattacattgacactgacgaattactcgaagttacaccggaaaatcttcgtatccgcaaaaaaattctcgatggaacggagcgttaccgtgccaaacgaaatgcggcaaacgcagcaaaaagctaatgtaaaaaagaatgtcaatcacgaatgcttgattctgaaacgatataggcttatacttacagtattatttcgatttcagaattacagggggaaatgttttgggtaattataaagaaagtattgccatcatcattccggcactggatccggatgagcgcatggtatcactcgttggacaattgcacgacgatggcttttccaatatcattttggtcgatgatggaagtcttattgccaatcgaaagtattttaaaacatgcaaagagactttccactgcaaaataatccgccacgtcgtaaatttcggaaaaggaattgcactaaagtctgcgtttaactatattttagagcagcgcccggatatcaaaggtgctgtaaccgtggactgtgacggtcagcatgtacttccggacattaacacttgtgcaaaactaacctatgagcatccggattctttgattcttggctgccgtcagtttaacgacaaggaaattcctctgagaagccgttttggaaacaagttgactcggcagatgatccggcttttatgcggcatacatgtttctgacacgcagaccggactcagaggacttccaacccctctcataagaaagcattttgcaaatgtaaagggagaacggttcgaatatgaaatgaatatgctgattgctgcgaaggaataccagattccaattgaagaatttccgattcagacaatttatctggcaaataatgaaagctcgcattttaatccgttcattgattcgattcggatttacaaagtgtttttgaagtttatgctaagctctttatccagttttattatcgacattgctttgtactggctgcttggctatctgcttcgtccgatcatctccgacaagtggatgcttccgtttttcgatttgtccgtgcttatattaatgcggactgtgatttcacgttttgccagttcgctatttaacttttttgtgaacaaaaatcaggtgtttaaaaatgactcaagctcgccatttcttttcgtaagatattacacattggcaattgttcagcttttgttgtctgctgttttagtcaatcatctgctgacatttattacttattcgacacttcgcaaatgcattatcgataccctgctttttgcaatcagtttccagattcaaagagaatgggtgttcaagaaataaaaaaaagaaggattagtaaatcaactcgaaacaaaggattcgctttgcgaataaagtttctcactgatttattaatccttctcttctatctattgcaaatgacattttctatcttttatcatcttgactttttcctgcatatagaaaaggccaagcatagccgctgtaatataaaacggaacaaatataaacaaatatctggcacgcacttcaaatatcataaggaacaaattaatcccagtcaatgtcatcgcaatgaaaagtgctcttttattcctattatcaaaaaacattgcaaagaaacaaaccaaaatctgtagagaaatccatatactctgcaaaatattataaatcatcttattatcctgtgcataataaaaagattgtaatttttgagcaaattcactgtgcagtccacgatattcaccaaaaaaatttccttcccatccccatgcaaatgagccatcatcatttgcaattatcaatttctgcatataaaactttattgtgccccaaatacctttctctcttatacgttgtctccacacctcaatttgcatttcctttctcttctccggatcggatatcccccatgaacgctccctgtcaacgccaaaataagagccatgtgtttcctcatttgcccccatcatcagataatgctgccatgtcatttgtgcatctgcattccgctggtcatacacagcatcactcaaactatttatcagacccaaaacaattatggttcctcctgcaacaattaaacattttgcggcaatttccttaatttggcactttcgcaaaaaaaatatttctgccagaacaattgcaagcaaagcaatcaccaccgtcggcttgatttttatccccagcgaagccgctatcacaattcctatccatgatgcataaccctttttctcatctttcatggaacaataaaaatacaaaaccgcactcaaaaaaggaagtacgtatgtatctgaataagggattataatccatgggttgaatcctaaaaaaactgtgcaaatgattatagacaggaaagtcacttttcgactatgcgttaatttccaaacagtcatcacagtaaacacaatggcagcatctgtggaaatcacccctacaacaatcgtaggaaaataattatctacacatccaaataaagatgacagatattttattccggcaaaaataatcgtcaaaaaaatattattcggataagcattaaaataattctgagaaaacgaatctcctctttggctgatccaatcctgaattgttccaccatgtgtcacaatatctgctgccgactgcagtataccgacatcccacgtcgtataaaaatagatacatttacacagatacatctgcatcacaaatataattaccgcataaaatacgcaaaacataacaactctgttttttttgcaaacacaacttgctatttttctcgtgcagcatataaaaaaaaggagggaaattgctgtcaacccaatcaatgccagcaaagcattcaacaattgataatgtaacggaaacacatcacctgcaagtcttccgaactcaagcaaaatcataaccacaataaaaatgtgtaagcaaagaaatatctttttcgctgtcacacacaaaaaattttgtattttttccactatcactttctctttgcattcctttccccgtcaaaacaaaatctctgaactcttactcggcccggtctacatcatttagaatatcctgtatagcaaatctcggacggcctttcgtctctagatacatctttccaatatattcaccgacaatacctatcgcaagaagctgcaaaccgccaagcgcccagatagaaaccataagactgctccagccaagtaccgttgcacccattgcatggcgcacaatcgaatagatcaggattccaaggcttgccaagaagatgacaagaccaaggcttaatataaagcggattggtttgacactaaatgaagtgatgccgtcaaatgcaaacgacaacattttcttcagcggatatttgctctctcctgcaaagcgctcctgtctttcatagtatacgttgtctgccggatatccgattaacggtacaattccgcgtaaaaagagattgacttccttgtaattttccatctgcattaaaacacgcttactcatcaagcggaaatctgcatgattaaagacaatgtcaacccccatccatttcatgattttataaaatccttctgccgtaaatttcttaaaaaacgtgtctttttttcggctgctgcgcacaccgtaaacaacatcaattccatgattaaatttatctaccatctcatcaatagcatgaatatcatcctgtaagtcagcatccattgaaatcgctgcatcacaatgatccttcgcatacataaggccggcaagcacagcattctgatgtccgcggtttctggaaagattcaatccactgacaagtgtatattcttcatgcagacggcagataatcggccatgtctgatcttttgaaccatcattcacataaagaatccggcttttttcactaatctcacctgcatcgatcaatttttgcaatttatcacttaactgttttgtcgtctcatcaagcacctcttcttcattataacaaggtacaaccatataaattattttaccctttgacatacctgtcctcctatattatcacattattatgggcattataccacagttttcatatatttgcaaaacatttgactttttacctataaatcgttatagtatatgaggtatctattaacacttggggaaaggaacatacaaccatgaacaagcagtctcgttacatgctaagacaaaatttgtcctactataaaaatcggataaaatacggtattacaaaactgcactcgacagtctctgacaactatattgtctttgaatcctatggcggaaaaaaagccactgacagcgtgcgtgccatatatgacgagctgcaaaaggatgaaaaattccgctcgttttattttgtgtgggcattcactgaccctgcagcgcattttgatttactggaaaaccatcataccatactggtaaagaagggaacttctgcctaccgcagatattatgccagtgctcgttactggattaacaatatcacagttgctgattatctaaaaccacgaaaaacccaaatctatatcgagacttggcatggtacaccgttaaagagactcggctgtgatatcgaaacagattccgatcctcgtcagacacgttctcatatgcacagacgataccgggcaaaagggaaaaaagtaaccttttttccatctccgtctccttattatagtgaaaaaatagcttctgcttttgcaatcggagatccttctgtaaaatttgtcgcaagtggatatcctcgcaatgacaaactttttcattatacaagtgaggaaatccaaaagaaaaaggaagcattacatattccggaagggaaaaaggttcttctctatacaccaacctggcgtgactcatcactggatgaaaatggggcattttccttgccggatggttttgatgtcaatgtactgatggacatgctcggcagcgattatattcttttatttcgcgcccatcaccaaattggagcggcaaaagtaaaagataaccctgtcatatatgacgtaagtgacgtagagtcggtcaatgatttgtatttagtcagtgatttaatgattacggactactcttccaccatgtttgactatgcaaatttaatgcgtccgatggtttttcatatgtacgacgcagattcctacgaacaagatgtgcgtggtctttacctgtcgccggaagaattaccgggaccaatcacaaaaacggaacaggaactggttgatgccatccaccgtcaggaatgcgaatttccttatcgagacaaacaattggaatttaaccaaaaatttaatccatatgaagatgggaattccggcaaacgagtgattgatatgtgtcttagggcactgcctcataagagaaccctctacgaacgttttgtacgctatacaaaaaaaacgctcaaccgaatgcgcattttatggctgttactgcgttataatgttctcggatttttccgctctcacggaatgttccataacaataatagtttacgcctcgagcgtttgaaggacagtcacaaaggagaacggtgttttctcattggaaacggtcccagtctgaccggtgaagatttacatttattgaaagatgaatacaccttcggtacaaacatggtatacaaaatttttgacaaaaccgactggcgtccgtcatttcactgtgtatctgacacaatttacgcatccaagcttggcatcgaactttccaaaatggtaaaggctcctctgtttacaacagagcgcacctatcgccgcatgcgcaaaaaaccggtcgataccacttacgtccataccattccaaccgaacgctacaaagtccgcggaaacattcaggcatactgcatgattaaggcaaccgtactttctctagctgccgaaatggcgtttcatatgggctttaaagaaatttatctgctcggtgtggattgtacaaaccctcatgataaaggtggacattttacagataattacacaacaaaagaagttgcagaaaccgatattaaccgaatcaagacaagaatgcaagcagatactttaacaaccagacaaattggggagcacatcatagaccgctccatggaagtatatgcacttcttgattcgtatgcaaagaaacataatattcatatctataatgcaactcgcggtggaaatcttgaaatctttccacgcgtaaaacttgaagatgttttgagtaaaaaaatggaggaatcaaaatgaagataatcggtgttattccggcacgttataaatccagccgttttccgggaaaaccattggttgaaatctgcggaaaaccaatgatatactgggtctatcatcaggctatgaaagtcaaggaacttaacgaaatttacgttgccacagatgatgaaagaattcgtgccgcgtgcgaaaaatacaacatgaatgtaaaaatgacaaaagatacccatcagacaggctccgaccgcgtagcagaggttgccgaacacacggatggtgatttgtatatcaacattcagggcgatgaacctgtcattaacccggaaatgatccgagaagtgatttccatttttacggaagatgaatcggtttattttggcagtttaaaaaaggaaatcacagatcctgatgaaatccgtgccacaagcacagtaaaggtagtaacaaacgacacgggagatgcaatgtatttctcccgctctgttattccgtccaatataaaagacggtcagttagcacgagtttttcgccatgtcggaatctatgcttataaaaaagattttttgttgaaatttgcaaatatggagcagacagaattggaaaaaggtgaaggtattgaaccactgcgtgccttgcaaaaagggtatcacatgcgtttaaaagaaacaacctacacctcgattggtgtggacttaccggaacatgttgcactggtggaaaacataataagaaaaaacaatgtgtccatttgacatattttcttcacatatgttttttattttataaaccaaaggatttttaacaaaaggagatgctattattatgactataacaaaaaaagccttatttttcttgggtgctgcattttttttaacatgcagcagtacttatatcaaagtacaggcagctcaggatatgcctgataaatccgtacaaatcggaaaaaaaactacaatgcaagtgaaagattcaacactttcaacgcaaaacaaagccgcttggatatggaaaagcagtgattccagcattgcttctgtaaacaaacatggcaccgtcaccggaaagaaaaagggaaccgttacaatttctctcaaaattcccggtaaaccaaacgatattacagcttctgtacgtgtcgtttcctattttcgtaccaaatcaatcaaaataacaaacaaaccaaaagaagccatggcaaccggcgatagactggaattgaaaacattggtaaaaccccataatgcgcgttttaagaaagtaattttcacctcctcaaataaaaaagttgcatccgtttcaaaaaaaggcattgtaaaagccaaaaaaaaaggttctacaaccataaccgcttcggtaaaaggaacagcaaagcgcacttcatttaaattaaaagtaaaaaaacgcatcaagataaaaaaaatcacactttccggagaaaataccgcacttgttggtgaacaaatagcactgacaactactctttctccaaaaaacacaacggatgatacccttgttttttcgtcaaacaatccaagtgttgccacagtcaatgaggatggtgttgtcacatcccaccatgcaggaaaggttactataacagttcgcgtgaaagaaagtaaaaaaaaggcaaaacatcatattaccattgaggatataccatatacctcaatagaatttgcaaagaacaatcctgtttcgttagaatccggaacatcacataaaatgcagttagtcacaggtccggccaacgcaacggatcatcgaatcaaatggacatccagcaacaaaaccgctgcaactgttgatgaaaatggtacagtaactgcccttcgtccaattgaaactgttactattactgcagtatataagacaaatccagctcttacatgcagctggaatcttaaaatcactcgtacaaaaggctacattacgaaacaaatgttagataaccttgacttaacttccataaaaaaagtgatgattaccgcacatccggatgacgagacactttggggcggcggacatcttatagaaggtgaatatctcgttgtctgcatgacgcatggctggaatccaaaacgaagaacagcctttgagcaaacaatgcgtacgacaaatgacaaatacctgattttggattacccggacgtccgaaaaacatttagtaacggaaagtatgaaaccgatatgctttccacatgtaaaaatgctatgcaggaagatattaatcttatcttatcctacaaaaaatgggatttgattgccactcataatccttttggtgaatatggaaagtttttacacaaaacgatttcccaaatggtaacacaatgttataataagatgaccaataaatctgctaccctatattattttggacgctattacaattcaagcaataaaattccgggagaacagattgccccggaacttcttgcaattaaaaatagtatggtaggccgctactatccaacagcgaaaggggccattgacgcatttggacatatgataccatatgagaattggcttcttccatcagaatggtagtatcaattttaacagggaggtttttatgaaacgagtaaatatattagattgtacactgcgcgatggtgcatacctgattgacagtcaatttggcaataccgcaataaaaggaattattgaaggtttaacagaaagcggcatagatgttattgaatgcggatttctgaaagacgaaccacatcgggagggcacaaccatctttaataatgctgcacagctccgctcatttttacctacagacaaaaggcattcatcttatgtctgccttgccgattacagccgataccatattgataacttagagccttatgatggcacttcgattgatggtgtacgtgcctgcttttttaaaaacgaacgttttgaggttattgatttttgcaaagcaatcgtcaataaaggatacaaactttatgtgcagcctgttgacatattaggatatacagatgctgaacttttagacttgattgaaaaaataaatgaattggaaccatatgctttttccatcgtcgataccttcggttctctgtatcgtgaggatttacagcgtgtattttatctggttcatcataatttatgggcaaatgctaaaattggattccactcacataataacctgcagatgtcctttgctctatctcaggattttattgatatgagccagggactccgcgatattgttgtagacagcacaatggcaggcatgggacgtggcgcaggaaatacaaatacagaacttgtcatgcagtatatgaaccgtaagtttaatagtggttatgatattgatattgttttagatcttatagacaattatatcgacggtttccataacagttatgaatggggctactccatcccatattttcttgccggttcacacagtgcgcatgtaaacaacatctcctacctttcggcaaaggcaggaattgcaagccgcgatattaactttttactaaaccgtttggacccggtggagcgaaaacggtacgactactcgcttctcgaaaagacctatttggattatcaaaatacacactgcgaggatgattctgccattgcatcacttcaaaatgcactcagtgggaaagatattttggttcttcttcccggtcacacgattaaaacatgccagggacaaattcagcatttttataaagagaagaatcctattgtaattagcgttaatcttctcaccgattgttatccgattgattttgcatatttcagcaacaaaaaccggtaccagtattggcgtaatgaagcggcttttaataaatgtaaaaaaattgtgacatcaaatgtaacgacaaggaaagatgataatctctttattatcgattttctgcgattggtaaaatgcggttgggagcagctcgataattctggcgtgcttcttcttcgtctgctagacctgatgaatgtgaatagcatttccatcgcaggttttgatggttacagccataatagtgaaaatccgaattacgttgaaaaagccatggaaaaaaccagaaatacattaaatgctgaagaagcaaataaagatataaaaagcatgcttgttgattataaaaatacgagaaaatcaagttgccctatctcattcattacaccatcttactttgaaacggtaatggatgaataattactaataccggaggtactcacatgaaaaaagatttttcaaatattaaattgtttgcaatggacgtcgacggaacattaaccgatggaaaaatttatattggtaatgacggtgaggtaatgaaagcatttaacgcaaaagatggattaggtattaaactcttaataaaaaagggtattgttcctattatcatcaccggccgccgttcaaaaattgtcaccagacgatgcgaagaaatagggattaccgtgctttatcagggtgttcgcgataaagctgatatcttgaaaaatgtaatggcgaaatatgactgcactcctgaacaaacggtatatattggtgatgatatgaatgatctgtctgcaatgcaaacagccggcattacctttgcaccggctgactgcgctgccgcattgcttccatatgttgattttgttctgactcaaaagtccggcgacgctcctgtacgtgaggccattgatataattttggaaaacagacttacactgtccgattatgaaagcatctgattttcttgactcctttggataatccggtaaaaagccagtaaacagctgctgctgaagcaaaagaaaccactgtcagcacgataaaaattaatatcggatttccgaaggaatatataaatttctgtccaaattgaaacacgtaaaaactatgaatcaaccaaacaaaagtaatatatcttcctgccttttttgacacccagataactcccggaattttctgaataagcataacacacgcataaatcataggtccaaccaggaaaaagtcataagaagatccaattttataacgcatataaaaacctgcagccgcaacaaataataatacagggtaacttaatattcctttcggtaatatctgatgataatacgagaatacctgatactttgcaaaaatcataccaaatagataaattggaagtaggtaaacaacgttgcaaagcagaattccccatactgtccctttaaagtcaaccaacatatcataactcatcaacctagggataccatacaaagaaaacaaagcaatccccaaaacaacgagaaaatctgtaaagaaatcagctttttttctctttaaaaaccgaagcataagcggcgtcatcataagtaaaaatatgtatggcataacaaaccaccactcaccattatacttttcaaatccaagcatgctaagaataatgctttcaaaatcatattgaattgtccatgaggatgtaagatttacctttgtcacacctaatataaaatcaattggaacaaaaataatcataacctgccatatgtattttaaaaaccgaaatatacgatttgcaatcattttcgaaattgatttacttttacgcatactcagatatgttccatatccactaaggaacaaaaagaacgcaacacacaccttaaaagaagcacagattgctgcttctataggctgcccgcgaaacatatataaactctggtacatattctcaggcaaaatccgatccgtaaatccaaataagtgatgcaaaagcatcaaactaatagcaattaatttcgcaattgatgtgtcggattttgaaaaatgatagtgtttcactttatcctctcccctctaaggtaatctctccatgcaaaaaagccatcggcagctaacaaaatcataataggaataaatacaactaaatatcttgaattacattcccaaatagtctgaaacaatgctattccaagcatcgtaatacttgaagcaaaaatcggcatatccaccgcttttgcatcagattttctttttactgcaaatcgtgccgataaaaacatcccaacaagtattaagccataatatagcgtcatatacaaaagagctatccagtatttgcttccttttaatgtcacaaattgttttaatatattgtcaggctcctgtgggccttcagctaaatatacacagctggcaagtgtagcatctccccatgttctaacttgtttatcataaccaaaaaatttaaaactttcatggaaagaacgtgccttcaatcgtttcttaatctcttttatattagcttcttttttcttttcgtatgaattaaatgaaatggtaaaatcgacatcctcctgctgatatcccccatatccaagtgccatcataatccaatgggtcagcggaaattcataggcatcgcaatacgattcttctaacggaattacagaagactttacataattacacaatccatgaccgactccaaacgaaattgctacaatgacaataccggcaataatctttttccatgattttttttgaagtaataagcaggcgaaaaccgcaataaagagaataaacacagtaactttaactgaaaatgcagcagatgcagccactccaaataagcacaaccagcaaaaaactttccagccgggttcactcaaaacagccttcgtgtagcaatacagcataactaccagcaaaagcattcctgctatatccgtataagcatacatagcccataaccacaacggcatacaaaaccatgtcattaaaccaacaaaaaacgccttcttttcattccaaataagaactgctatgtgatgaagcaacaagatagatgccactgtcataacacatccaagtgctatagacgctaaataaaattcatttagccccgtctccggccatataaaatgaaccattctgaaaaagaatgtcaaaatacaataccaaaactgattattcggatatcttgcaaagtacgtagtatctgtcaacttatctgttaatgtatactcacttgcagaacgaattacttttccccaatcccatgaaaaaatctgcacacgcacggaataagcaacaaaaaacataaacacagcaaaaacaatgcttatgacataaaaaacaatctgataatttatctctttaaaggcaattcgttctctcataaaaaaatgatatattccataaacaacaattggcagtaaaatcatcgcaaaaaaagatttttgtatcaaactgctaaaggcaatcaaagcaatgccgtacacaaacacaaaccaaaaccattgccccgctttaaaaaaatgatctttacatgtctttttcatcatctctgtcgatttcgaattcatcatgttcttctgtttccccttcaaaataaatcagccttacctcattaaatacaatctcattcatcaaaatatccgcatctgcttctgcaatatgaattccaaacacagcacgatcccattctttcggaatcgcaatggcaaaccctgcatgatagtagcatcgcagacgttttccaagaataaaaatttgtttacggcaaataaattcttctgaattaatccgtacgccgttatgctcggcaaagatataatcttcttttttcatagcgtaaatcggtgtgcagaaacgccctctccacataccgttaaactccgattcctcatcttctatgatatggaacaatttaacggaacgctcagacattctggctaattcaacgcccttatacataagtacacagtcattgtccttgtagacacgtttggcacgcacctgttttccggcacgcattgagagcattccctcaataatcggaagtgacgtcggaatctgtaaaatgtatttcacttttatcttttttaataccttctgcacatcatctctgagtgccgccaactcttcttccgataaaatttcttcgataattctctgcttacttttcatcatcataagccgcatatgatacgctaccatgtactgcacataaggaataatacgatggtgctttttccttgagtaggcaaataactgtccataaccagacgataacagcgttgtataacgctcttttttatgccatgccgtatcgacaagagaagattcatcttctctctttctatagtaataatgcgttccggcaatcaatccgtattttccctgagaaacaatcacctgattcacagccagcgcatcttcccaaaaactcagcgactcatcaaaatgcagttcatcaagtaccgcatgccttaaaaacacgccgcctacataataatgaggatacgtataatcctttttaatatcaacaacatccgtcttttcaaaacgccagtttaatcgctgctcaccttcataagcatcaaaataacgaattcctatagccgccacaaagacatcttcatgtgcatcaaaatactgcaccgttttttccattgcatcatctgctaacttgtcatccgaatctaaaaaagtaataagttcatcacccatctctccggcaatccgtacgccttcattgcgaagtgcagaaacaccctggtttgtgtcatagtgctttactaaaatctgctttggatactgcttctgatactgctcacaaatggcaaatgagccatctgtactggcatcatctaacaaaatcagccggatatgctctgcaaaagacagtgtctggcaaatgacactgtctattgtttcccgtaaatatttttctgtattataaattggtacaatcactgctatcataagatacctcatttctcccaaagcataatcgtctttccaaaggacttctgaatgtccatctcaaatgcttttttcatatcagctatcgaacgaaccggaattaccgcacctacaatattagacaggtaattgataatttccggatgttctctatataattcaaccgtcttttcaaaatccactcttccgcttcggctgcttccgaatactctcaatcctttttccaaaatcatgcgggtattaatcggtaccggatactccgatactcctaatatagagatcgttccctcaggcttaataaaatcaataatctggtcgattgcctttccggaaccggctccacccacacactcaaaagcatgatctaattccatattctccggaatgtcacttacctgatacgttgcgtcagcaaatgtaaaatcagaaagcttatctttgttgacaccaaaaatatacagtttcgtatccgggaacattgttttgaaaaacacagccgtaatataacctaaattaccatcgccccagatacctaccacatttcttctaccatgtgcaaaacggtcaaagcgtgaaatcgcatgaacactgacactgacaatttccgtaaatgccgctacttctttgttgattccctgtggcagacgaactaatctgtccttgcggattttaacatattcctgcataaatccattaaatccgctggcacggaatttacttgagcgaagatagttctccgcaataaactcatcttcttctaccggtgtattcggtatcatcacaacctcttcccccggctcaaactcgccacttgggtcacgaagtacaacaccaatcccttcatgaatcaatgccatcggcagtttctgacgaagtacatgttcttccctaagcccctgataatatctctggtctgcattacaaatcgaaagatgtgtcggacgaacgataatgtcatcatcctgcaatccgatgttttcataagtgacctcgaatttacgaggagccaccaactggtatactgtattaagcattcgctcttaatcctcctgctccgactgaatcaatgtttctgccacacgcaaatcataaggataagttatcttaatgtttgatacttctccttctacgagatatacgtcttcgcccttcataacaaaaatctttgctgcatccgtaagaattttcttttcctcatcggtcaaagattcatacagcgatttcagtttctttaagcggaatgtctgcggcgtctgtccctgatacatcttactgcggtccggcacagatgaaatcactttgccatcttcactctgtacaatcgtatcagttgcagctaccgccgtatcgcaggcaccatactccagtgcataacgaatattttcctcaataattctatgtgtcacaaatgggcggacggaatcatgagtcaaaataatcgtatcatcatccacttcatagttttcttcaatataagaaatggcattcataatcgtctcatttcttgttgtaccacctgccatcacagcaatacggtctgtctcccccaaatatttttttataagattcttggtgtgtgaaatccactgttccggacacaaaacaaggattttttcaaatttatcattcacaaagaacttttcaattgtgtgaataataatcggtctgtcaccaatattcatatactgtttcggtttctctacatttcccatgcggcttccaacaccgcctgctaacaatactccaaatatcataatctgctaaaacctccaaaaaaattcgttgttttcatcatatcacagatagtttgtcatttcaactcatcatcgaggcgaagtttccatttactggacaaaatcgcacggcagcatgcatcaaatggtttcaagcagcaaatcaaggtcaccacaattccaaataaaacaagtataatttcccatgtatttgggaaattatgatatagtgccttgtaccaacaagaatgcacaaaaaggttaatgaaattataatgaaatacataaacacccaaagttctcgttcctaattgagaaaaaatattctttccttttggaatgatgcataaaaaagcgaacacaagcccaaaggataacacatacgtaaacaaccgtaaaataccaccataaaatgcaccatgcgtaagtgcctcataacttcttcccgtcaacagaaatctcgcccaaaacaatttatcaattccgacatagcagactaaaaaatatatcaggataactgccacagaaactattttcaactttctattttctgtccatttcgtaattgtatccattgacaatgcatatccagtataaaaaaatggataaaaaactgcaatcctcaaccagcagaaaagattcgtatccatattggagtaacctgctgccattgaaacaaaaacagatacaatcaaaacataagcaggtcgaaattgtttggtataaaacgtaattaaatacatgaaaaataacgcaagaataaaccaagcggcacccggttccctgaagaaatcaaccgatataaatgttcctccattcataataccggatacaaaataaccaaacattttcataaacaaataaaccagcagatatggtactacttttacaatttttctttccttaatggttttcttggaaaacatacctgaaatcagaaaaaaggccggcatgtgaaacgtataaacggagaagaacaaggaatttaccaatttagaacttcctaaataattttcgtaaaaatggcaaataacaaccaatattattaacacaaattttgcattatcccattttgcaattcgattcatctttttcctctctttctcattcaatctaacaagcatttcaacgtttgatcatatatatttttctcaataccatatgacatacttgcgttaaaatccgcctgtgctctattgcacacatccacctgatatgctgtctcacacaacctcccggcattttcaaaatacatttccggatattttaaacttacatatttttcaaaataatttttgttgtagcggcaaacatataaaggcttttgtaaaattgaaaatgcagaagccaaacgtccgttatttgtcaccaaaacgtctgtagcatacaacaaatccggaaccgggagaatccggtttacatagccaaagctttttttgtattgatttcccatagaaaatgcattttccatcaaaatttcactgtttgtaaaaacaaaccattcttccccaagctctttcatccattgctttacatcaatagtttcccaatccttccttttcatctcttcatcaccatatacaataacagaaagaatctttttgtctcttgcatgcggaaagtaataataaatcagttccgagacattctctcttcttttagcatcccctatatcataggcaaacggcagggaaacaccctcgattatttctttatcttctaaacggtacgcccgttttaacaaatctgccgtaaatggagagcccggaatgatgtgcgtaaatcttgcaaaggtatttaaattaaattcttttccttttgactccattaaaaacatattcttaaactggtaatcatacggaacacccagtaaaatccgactgccttccggtgctaagttattaattttagttgatagagaagcatccacacagacaacatttgtcataccctccataaaatcctttttcgcacggcggtaaccatgtgctgccagtggatttttatgtctttcattattcaaataatagcggagctttacatcctctccggattgtttcgcaagataatctttcaaaagcgcaaggtcattactcagcccacgtccgcggctgctcaaaaatgtaatttctgtctcattcatgtttcgcttcctccatatactgattaatcatagcggcaatccgctcactgctgtgtccgtcacacgctcccatatatttttcaatgaactggtcatatttttctgtcaacgtatctttttccggtgactttagatacgctgtaagtgcctgctgcgtctcataaacatcccccggcaaatcatccggataattcagataaaagccccggttataattgagtaaatcataacagtaaaatgctattggttttcgcaaaagcgcatattcaaaaataacagaagaataatccgttaccagcaaatccgataccaacatcatatcatttgtggagaaatctctgataacttcgatattgtcataagacttctctacaattttatttttcatgaccggatgcgggcagattacaaatatctgatttggcagtaagtcttttgataatttatcaaaatccaaatccggtttaaactgcgttctgtcatcccctatatcacgaaatgtcggtgcatatacaataacatagcggtctttgaattccggatgtgcagcatatactttctgctttgtctcatccatcagcttttcatcataaaatgcatccgttctcggacatcccaacgcctttaccttgtgcacatcgatatcaaaggcatctgcataaatacttcttattctgtcactgcttaccgtcaccatattgtactgcacatgataagcatgatccgcagcaatcgacatgttggttccccgctgtccgaatttcttaaacgcaccgcaggcatgccacaactgtacaacacgctggctctgacgcagctggaagtgacgcagataacggttatagtcatccgttacaataacacggcttgtaatgtttttatagtacatataaagtttcgtaaaaggattatgtggcagacgcttggcacaaatcactttctttcctttgacatacggatataatgcttttgcattgccctctagttcaccgtcttttcgcaccgtaaaaaacagcacctgctcttttaccggatagcgtcgcaggaaatttaccatcttacggaacaaaatctgaccgatgttttcagacgggaaacgaagcatcttcggcataatctcatttaaatccggaacaatctccgggctgttcaaatctgcttttctatctaccaaatattccttcatcatcggaatggtttccttcgttccaacataatccacatatgttgcttccaaatcctcatagaatacaatacggtcattcataaacgtaaaatatcctctatggtaccactgtgtcagatgtgacaacagactttttgacttatctagggtttgatttttcaaaaattccgtcttgaaaaatttattggcaagtgtgtaatccatacccatgtatgggttattttcatagcctgtctttacggaattcaatgccaccgtgctgaaaagtaccgcctgcatatctccaaaattgcggtgatatatcaattctgacataaaatctgccggtgatttgataaagttcttaaccacatacttaaatgcattattcgcataactgactttggcatccgcaaaagtaatgtacggcgtctgtgcctgttccaatgcctgataatacagttcatctcttgtttttacatcaaaaaactccatattatcctgtaaaaatccggccttttccactgtctctttccagaaaagcggcattataatccgaatggcaatcagattttgcagtgtcagactctgaatacttaacaaaaatttttcttcctgttctttctccccataaagggcaatagtaaaccacgcatgagaaagcaaatcctctttgtctaccgcaagattgtcaagtgcaaattccgggtgagaatcttttaacatcgaaatatcacgcatatccaatgttgaaattttatcattcatttctgaaaccagatgcgtaattgtctcctttggcagtgtccagtatttcgcataaaactgatccaacagaatctgcacttcttttcggctgatttcatttaaatatttgtgaatatcgtcattattctcttttacttcctcaatatctttatactgtgggaaatcaattaaaatactttcttttgccgactccaaaatcagccggtgtgcctcaatgtaatctttgattttccaagaagaaatcgaagccgtaatcgactccgcctcaccatcgaacattctgcggtaatggaaaatcacacggtcaagtccggtaattcggctcgtacggtatacataacgcatcaaaaatgccccatcctccgaataggaaatcggtggaagacgcagttcatactgctcaataattgagcgtttaaataatttattacacagagaaaacgtccacagaatctgtggctcatatttgtctattttttccatctgcaccaaatcattgattccattgactgcaaaagtctgaaaacgattaaaaatatcatacttagcaatgactaaatctgcctttttttcttttgcacgctcatacagtgcctctaaggcgtctaactctaagacatcatctgcatcaaagaagtatacatactctccttttgccaaatccagtccgcagtttctcgccgaagaaggtccaccattctccttgtccacaactgttatgttgtcataacggctttcataatccctcaaaatgtcaatcgtgtggtctttggaaccatcattgactacaataatttcataatcgtcgatactttgattggcgagactttccatcgtctctgttacatatttctctgcattataagcagcaacaattaccgaaactttcactctttctctcctccacgagtctctttctcttcctgataaatatctctgacaatatatatcggtcgatccttaatttccgcaaacaaaacggcgatatattctcctataattccaattaccataagaacaaccgcaaacataaaacataaaactacaatgattgtagaataccccgccggtgctccattgacaattttgtttataatagtgaaaatcatcaatataaaaccacaaagagccacaaatacacctgaatacattcccagtttcaatggcaaatccgaaaagctgcacagcgcattaatggaaaaatgcagcagttttcgaatgctgtacttactttcccctgcctctctcttctgtgcctcaaactccaatgttgttttacggaatccaacactctgcacatatccccttaaatagcggattttttctctataatcttttcgcagaacacctgcaacatttttgctgatggcaaaaaagtcagaagaattattttcaaatttaaccggcgacataagattcaaaactttataaaaggcacctgacgtaattcgcttaataattccggcatctgcattcttcgttcgaatcatcgaaatcacttcataaccatcctcaaacttagcaattatgtccggaatacatgccggcggatgctgcaaatctgcgtccatacacacaactccatccccttgtgcatgatcaataccggcaatcatcgctgcctcatgtccaaaattacgcgaaaaatccaccaccttaactttggcattttcctttgcaaaaccttttaacaattcaatactgccatcctggctgccatcatttacgaaaataagttcatagtcccaaacacacttgtccaaaacacttactgttgtcttatagaattggttcaaagacaattcctcattatatacggacacgacaactgaaatttttttcctttccataaaacattcctccgtaatcttgttattttttcttactgtattcccatactgcttttatttccaaattctcaggcagaccataaaacagtttgtaacgctcaatccatggctcccattcaggagtggctgtccataaataagattcgtatggcaagtgccgaatttccacggacgttttacctgcctctacctgtctctcaattctagccaaccgatctttatccacctgatagattgaggaaaaaatattaagataaaaccctaatccgaaaatggacacaactgcgcatgtcttacaaaatgtctttgtaaaaatccggctttctttctcttctccgtctaaaaggataagcagttccaaaaggagcatcaaaaacagtatatacgtggcaaaaaagcatctctcaccaatcggattaacaacaagtaacggcgcggcaacacaaacaattcccgcattccaaaacaaaactttccataaacattttttttgactgccaataataatacaataaataatgagggcaatcatgtaagctgccacaaaagccgcttcaaaatataataaccggttctgttttgcaaatgtactgatgccaaaggacgacaacaaagaccatgtcgtaaatcctgccataactaccagacaaatttttgctactaacacacttctgtttttatttacatcagaatagatctttttataaatcatggcacatacaataacgattgctaaattcatccaacaattattcaggcaaagatgctttgcaatttcattgacataattgtcaaatgcacgactgattactcctccctctgccatttgacgatactgatcctgattatttgcgatcgtatgatatgccgaatttgaaaacatataagctgcccctgccacacttccgattaaatacgccacatgagaagcaaccaccttgcgatgaacacaaattgtatacacaagcacaccacaagccaaaaccacattataaattgtcaaatgctctacaattaatgcatttattaccgctaacacaaagagcggcagacaatgccaaacttttcttcgtggcattgtctcctgaaaaataggataaacatacgctataaataacaatgtgaaaaacattgaggttacgtagtttgcataacctgccgtccatacaacggcctgacgaaaaatcaatttaggtatcaaaacaagtgcaacacaacttacataaaaaacccattttcttttaaatatatactcgcaaagtgctacaattcctgttaagcaaaatgacataataactgcctttaaaaggtttgagcgcgtcattgccaaaacgataagatttcccacatatcgtccgttgtaattttcaaaccagttgtttaatctgtcgataccgattttacttccccatgcccagtcatctccggtatatggaaacaagtagcatagaatggcaatcagcccaaaacatatgatataacgcaaccatattttattattttccttcatgtttttctcctatccttcaatcatttttttatactaagacgtttacatgtcaaaattatatcatgcctcgtcctctaattcctgtagaaatttattttttggtacttttttcacaaataaatcaccaaatgcaaaccagtacgcaaatgccggaaatacttcaaacggcagaaacaaacattccgtcagtgtagcaataacaaatccgatacagattgccggtatcaaaaaagcatatgttgcattttttcttctctgtgtcaggtaaaatttcaaagaaaacgctacccctaataacgtaatcacaccatagaaaaacatactgagaagtccataggtgtaaccaaactgaatccagttgttatgcgagtggtttttcttttccccatccactaccattgaggtgctggcatgtcctttaaaattcattttatcccaataggcaagataaatatcaattcttccattcgtaatagcattcaagccctttgaatacttgatgttataccaaatgcgttcccacatattgcgtggtgcaatcgtatttttctttttttgtgtctcctccacatctttatactgtggcaccacaacatcgtccggctcatccgctttttctttattcccctgaaattcacttgtataatacaaaggttttccttcaaacacaatcggatgtccaacaatgtttggcagatgcaaaaggcagattaaaaacagaggatacagcactacggtgaatactgccatacagcctaagtttcctaaaaaggtccggtaattttttgtctttttggccaaataaaaccgcagtacaatccaaagcagcacaattgctgcaaccgcaatcagtgaagttctcgcctgacttttttccagatagaaaaagcataaggcaagcgaaacatacgttacaatgtttttccggcaagaccggccggtctccacacaccagtccaaatccgacaaaaatacagcgataataatatacaaatacaatccaaacgtattcggatttgtaaaaatgccggcatacctgcctccctcatacagaggacggaacaaaaaggaaatcaccgacataacggcaaacgaccattttatggcattcttgaagcactgccacaacaaatcttttctcgtatgattctgccacacaaaaaatacagcggtaaagacaaaagctaaaatcagacccagtccacacatttttttcggcactagaatatccgaaacggtaaaggaaatgcacataccaaaccaagcaatccaaagagaacgtctccagtggatatgaaccaatgtccggtcaagcgataatatggcaatggcaaacataacaaaaataccacaaaccgtattataaaaatagctttccttatgaagtccgtagcggacgatacaaaacaaaacaaggtcaattacaaagcacagcgtaatcagccggtaccttaccttgtcttttattcttcccacaatcggaatccatggatcaaggagaagaataaacaaatcctgtaatttcgtaatcaattttattccccacttattcacgacaaacgaccgctaaaaagcggccgttttatctcatgtaatgtcttacttaataacgtcattcttatcggaagccgagctctcgctttctttcgtttccttcattactttttttattctctttgtaatcttcttcacggaattgtagtttggctcacaaacatacagtgccgttgagcgaatcgagaaggtcgtcttcttagctccggtaccctcggcattcgcataagcaatcttccattttgccatatcattcaactgcatattgcagagcgatacaatcttgtcctttgacatacttgtctggaacatggacttcgattctttcaacaaacttgagaaatttggcagtacggaaggtgacatcaccttgttcaaaattgcctcaatcatatgctgatggtcacgtccacgctggtagtcaccatttgcgaaatggtgtcgctcacggcagaatgccaatgctttcttaccatttactttgttataaccttttttgaacttataatgtgtaccggcaccgtgtggaccccagtcagaaatgaagtcataatccgaatacacttctacaccgccaagcaaatcaacaatctttttcagactggtgaaattgacacgtacgtagtaatcaatgtcaatgttatacaatttttccagtgtattaatcgagcagtcaacaccataaataccggcatgggtcagtttatccggcatacctccggaatacgatttaccgcccttactgtacagcggtacatagtaatcacgaggtgtagatgtcagtaatactttctttgtaactggattaaccgtcgcaataatatttacatcacttcggcttgtctgtccaatcttaccatatacatcaataccactgatataaacattaaatggttttgttgttacatcggtatcaaccaattcttctacttctgactcaatcttgcttgtatccagttctctggtgtccgtagaaaatgtcttatactggctcttaaccgtatctacaaaacttttattcatgataattgcctgcacttcttttgcgtacaaggcatctaccattgtcaacggatcatcatactcaaccgtgttcaatgtcttgttcagtttcttacttgcatcctgaactgctttgtccgtattctcacggtcctgctgtcttagaataccaaaagagtaatttttagcatctgctaatgtctttgctgcatcgtccttcatgacgtagaaagaaataacatcaacctttttggttgcaccaccgacattctggaatgctgccatactctctctcacatagttcgcaccaacaaggaacacggcacaaaacagaacggctaacacacgtccaaatatataactggagtttgtcagctggctcatcacctgatagacaagcaatacaaccataacgactgcaatcgcaaccatgtacttaaccggtacaagccctgttgttccaaaataaatacaaaccaacaaggaaactaaaaactgcaaaataattactactaaactaatctttctctctaataatgttttcactcgtaaccctccgttctcaaattagcctaataatacgctcacaacattatatcttatttcttgtcaaaaatcaaacataaaagtcgatttacggcatttttatcctgatacttgaaaatgcgcctgcaaaactgctctcgttgtgagtcatcctcgtaagccgtatgccagtttttttccagctccggctgcgtatatacaatcattcccggcacaaatttctcatagtcctcgtaaaaatttctaccatctttctgaaatacttcatagtcatacgcataaaaaatcatttttctttccaaaaggcagtactcataaataatggatgaataatccgtaatcaattggtctgccacagataacagcgtagccactcccggataatcggaaacatttcttattttatccggatacatatcccatataccgacaggacaatgctctgccacgtgcggatgcagacggataagaagcacctcattctcttccatacattgattaagggaatcaaaatccaaacaaatttccggattttcaacctgtgaatctcggaaggtaggtgcgtataacgtaattttcttacccctcaaatcaggatattgctcaaaaaaacgctcctgcatcttctgcctcttagaatcatctaacatcaaatcggtgcgcggcagtccaatcgggaaaattttttcatcgtctacaccaaacgcacttttataccattttgccgtacattcggaactgacaatcaagtgcgtaatattttcatttgctttttttgctagtctttttacttccccggtatccgaatccaagccgaatttcttaatcgtaccggttccatgccacaactgcaccactttcacatttttattaaatttcatatacgccatcggcatgaactcattatcgagaaaaatcaccgatgccgttgccatatgaaacgcttttccaaagaaaaacgaaaatggtcttcgtatgccgtctttttttgtcagatacaccattttcatggatggaaactgattttttatagcatctgccacaatgccgatatttccctcttcgctgtcatcatgcgttgcgacaaaaaatactttctgccgatttatgggtaataggcggaacagatagaaaaagaaagcaaacagcacatagcctgtttttttaatcattttctcagtctttcatattcaaatcatttttaatttttgttgtggaaattccttcggtacgcggcaggtaaacaacctcgcagtagtctttgaggaaatcaaacttgcccttccagtcatctcccataacaaaaacatcgacattattatttactacatcatcaatcttctgttcccatgtatattccggcagcacttcatccacataacggattgcttcaagaatttttttgcggtcttcaaaagaatgatacgcttttttgcccttgccggcgttaaattcatctgaggaaacaacaacaatcagataatcccccaatgctttcgcgcggcgaagtaaattaatgtgacctacatgaagtaagtcaaacgttccataagtaatcacttttttcattttcttttcctcctattcgttctcactcatctttgcttcgtatacacttactacgtcttcaacatccccctgtgcaatcagacggccctgctccaaaagaatgcccttgttgcacattcttaagacctgactggttgaatgtgatacgaaaatgacggtaacacctttatcaaacatgctctgaatacgattttcacattttttacggaatttcgcatctccaacactaagcacctcatccagaatcaaaatatccggctcaacaattgttgccacggaaaaaccgagtctggcacgcataccggaagaataattctttaccggcacatcgataaaactgccaagttccgagaactctacaatttcgtcgtaacgtgcttccaaaaactctttactgtaaccaagcatcgcaccatacagataaatgttctcagcaccggtatactgtctgtcaaatccggctcccagttcaagaagcggtgcaatcttgccatttgttgtaaccgttccctgtgtggcttttaacacaccggaaattacttttaaaagagtacttttcccggcaccattcaatcccataataccaacacggtcacctttctgaacttcaaagctgatatctctgagtgcccaaaactcctgaaacatcaattccttttttatcattttaataacatattctttgatgttatcaactttttcagaactgagattgaacttcatactcacattctctattttcattgctaatgacttcttcgccataataacctccaatttgccttacaccttaaatattcaggataaaggaatcctgtttccgataaaatacaatcataccaataaccaatgttccaaccgcaaaaacggatgtatacagcaataatctcatatcaaaaggctgtccaaaaaaggcgcggcggaaattgtcaatcacgccaaataatggattcaattttaccagtttttgtgtgtcaccactcatgttgcttgcgaaatagaaaatcgcactgcaatacatgatgagcattaacataacgctccacaaatactcgatatcacggaagaatacacataaggtcgataatatcatgccgactcccgttgataggataaacaaatttaagagcggaatcaccgtcataaccatataaccgttaatcggtgcatggtactgaccggttgctaagaaaaataccattacaccaaccagtacaacaagcgaaatcaaaaatataatgaagtttgccaaaatgccggaaaacggataaatgtattttggtacgtacactttcttaatcatagcgccgtttgtacgaatggaacgcatcgcactgttggttgctgatgaaaagaacgaatacagcaaacgtccggtcaagacataaatcgggaatggcacgcctgcaaatgcagcatcggtactgtttcttcctaacaaactgccaaacacaaccgacaatacaatcattgtaagcagcggctcaatcagtgtccataacattcctaaataagaacgacggtaacggagcttgatatttttcttcacaagctgtcccataagatacttgtactttaggaaattattaaaaaattgaatcattctctagtccatcctttttattttttcaatcatttgattatagcacccaaatacgcatttcgtcaactattctacaaaaaaagccaacataggattgacattttttctttttatggtatatgataggtttcgtagtttcaagtgatattttaagaaagaatggagaatgaacaatgtcaacttacaatatggagaagcagcacaagcttggcaaacttcacgctttagagcgtatttgcatgctgctagatgaagattcatttcgtgaaattggctcgaacattacgaacttagaagatgcttttaacattaaaaagggacaatttccttatgatggcgtaatcaccggttacggtaccatcggcggacaaaaagtcgtgatttactctgaggatttcaccgttatcggcggtactcttggtaaacagcacggtttcaaaattgccaatgcaattaaaatggcaatcgagagccgttgtccggttatcggcatcaacgattccggcggagcccgtattcaggaaggtgtaaatgccttagccggatatggtgagattttctactataatacaatggcatccggatacattccgcagatttcgattattgccggtaactgtgccggtggtgcggtttactcaccgggtattaccgattttatctttgtcattgatgaaatcagccagatgtttgttaccggaccaaaagttatcaaaagcgtaacaaatgaagatattacagcaaaagaattaggtggtgccaatgtgcacgcatccaaaagcggtgtcgctcattttcatatgccaaacgaaaaggaatgtttccgccgcgtgaaggaattgatttcgattattcctccgtgctatgaggatggctacctgcacacaaaccgtccggcacttcctaaatacaacgaaaatgttacttttaatgaggatttagcaaatatcattccaaaagaaagcaatcacagttacgacatccacgatgtcattaacggaattgtagatacagactcctttatcgaagttcaggaagaatttgcaagaaatgtagtcgttggattcggacgcattaaaggagttgtcatcggtatcattgctgaccagccaaaatttatggcaggcgtccttgactgtgactcttctgataaagcagcacgattcatccgctactgtgatgcttttaatatcccgattcttacattaacggatgtgccgggatttttacctggtaaagaccaggaatataaaggaa

SEQ ID NO: 982 - DNA, 39771 bp, unidentified
  source 1..39771: mol_type = unassigned DNA
tctttagactttacacataaatgaatatgtgctataattaagcataaattttgaatagtatcatatcccaaagttagaatgggttaaattagggggattatgtgatgaaaaagacaattgctgtgttatttgcagttatgatgatgttattgtcggcagttcccgcatttgctgccgtaagtcctcagccgaatacattcaaatataaggttgaagttattccgacagagggcggtaacggtgattataagtttacaacaggtattgacgaaaagggggaacagcatgtttacattgagccgattccttatgacggctatacttttgatcactgggaaatttcgggtggtcctttcagaaccgacagcaagtatacagatcctaatatgaatattatcatttcaggtgaccttgtttgtactccttattaccgtaaggcaagcagtggcggcacaacaggtcctgttgctactgctacggcaaagaaagatgattcaacaacttcaccaaagacaggcgcaagcgatgttgtaccgtatgcaattttagttctttctcttgcggcttgcggtgcggctgtatttaagcttgtaaagagcaaataatccaaccttaactaaaaatcaagagacttctcataaggaagtctcttttttattcattagatgtttgaatattaggttttgtattgcagatgcagaagtttgtaaattgtaataaaattttactaacaagtaatgattaattgacatactgacacaaaaatgatacaatatgaccaattgggagtttttgatatgagcagaaaaagaaacaaatttcttatagctttgattattttgcttgtggctgcaattatcggcacacttgcgtacatagtcgttaaaaacttaaatgaaaataacgaacgaaaaagtcttgataacatcgcaggctcgtatgcgtcaggtattgaaaacggtacaacctctgcaacagaatctgcaacagaagtgacttcaccgtcaatcaatgtgaaaaaggtcgaaaatccgattgatttcaagtcgcttcaacagcagaacggcgacatttattcgtggatttacattccgaatacaaatgtaaattatcctgttttgcaaagtcatcttgacgataacttatatcttgaccacgatatttataaaaattacagcttttcgggcagtatctattcgcagatgtgcaacaagcgtgattattccgacagagtgactgtgctttacggtcataatatggcaaacggctcaatgtttgcaacgctccatcgcttttatgatgccgatttctttaacaagaacaggtacatctatgtttacactcctgacagaaagcttacgtacgaaattgtgtcagcttttgaatatgataaccgacacattatgaattcgtttgatttttccgatgataatgtattttcggattatctcaatatgattaaaaatccacattctgtttctgtgaacaagagaaatacggagcttactaccgatgataaaattcttgttttaagcacatgcttaaacagcggtgacggaagatatcttgtgcagggagtgctgaagaaagatgaaccgacaaaatgaaagttcggctgaggcaacaactgaaaatatagaaaacaagcttgatccgaatacaccggaaattcttgaatcaaaaagagaaaagaacagtaaggagcatgtaagcaatctttcaaggctggatatagaaggttatattttcaaggacagcaagttaataaagaaaaagaaaaaagtatatacagatgtgtatggagttgattccgacagcattgtcgtgaatagtaataccacaaatcactataaaaagcatagatcaaagtcgcatcatcaccattcaaagcatcgaaagatgaaaacctggaaaaaggtgcttttgtcaatcggctgtacattacttggattagttatacttgccgtaggcacggttgcgtatttgatttatcagggcggaaacgagctgtttaatacggatattcatgttaccgccccacagggcattgaaaccgaggaaaacggtaagtatgtcgtatacaacggtgaaacatatcagttcaacgaaaaggtgacgaatgttctgtgtatcggtgttgacaagcgcaaccttgacgaaaataataacagcaaagtcaaggcgagcggaggtcaggcggatgtgcttatgcttgtgtcaatcgacacttcaaacggtaaaataacgctcttcaacatttcgagagattcgatggttgatgtcacaatgtattcagcaggcggtgcatatgccggcacggaaaaacagcagatttgtctttcgtattcatacggtgacggtaaggaatcaagctgtgaaaatacggtaaattcagttcagaggctgttctataacattccgattaatacatacttttcgcttgaccttgacggcatttccgctctaaacgacagcgttggcggtgttgatgttgtgtcacctgaaacaatcggggagtttgttgagggagaaagctatcaccttgtcggacagcaggctgaaagctttgtcagaacccgtgatacaagcaagaccgattcaaacaatatgcgtatgcaaagacagaaggtttacattcagtcttttatgaatacggttcttcagcagacaaaggaagatttaaccacgccgattgatttgttcaatgcgtccgctccgtattcatgtacaaatcttaacccgtcaaaggtgtcatatcttgctcagcaggctgtgcttggcggtatgaacggaattgatatggtttcagtccccggtcaggttacaatgggttcaaagtacgcagaattcaatgtcagcgaggcagaattttatcagctgtttttgagtatttattatacgaaaatagaataataatcaaacaaataaaatgcatcagattccaagtaaggttctgatgcatttttgttttatgtgcaatgcggttgttgaatcgtgcgaataataacaattctacgctcgggcataatatgttttaatatcgcaaactttattcacgaatagggaacggcggctcgccgtcacagtaaaacagacagccgataattggctgtctgcattttgttcaatattcaatttgatgcggaggttgtttcttttgaagaagtgccgcctgtgaacaattcctcaaaaacgaagcttgcaaacttctttctctgttcttcaaggtctgaaattttgattgttgatgtgattgcaccgttccatgtttcggttttatcatcatagtaccaaagaccttcttcaggaacataatactgttctacatcataggaaagatatgtgagagcgtgagaaacaagtgctgtgatttcgtccttcttgaggtttgttgttacaaggggaccgacagagcttacaattgaaacaatctgaccgaggtctgcacttttcatacttgtgaacaaagtttcaagaagctttctctgtcttgaggttctgtcccagtcgtcaccgtcaagaccgatttcgttgccgtcctcgccctttttaagacctctgtttcgagcataccaaagagcctcctgaccgttgagatgaacagtaccgggtgcgtctgtgatagttgttcttgtgtcagcctgattgttcttgtacatctgatagttgatgtagtcaatttcgtcctgagtaacttccatatcaataccgccgagggtgtcgataatcttcttaaagctgtcaaagtcaacaaccgcataacggtcaaccttgatgccgaagtttgcctcaattgtctgaattgaaagctttgctccgccgtagttataagatgcgttgagcttgtcatatccgtaaccggggatataaacatatgtgtcacgctggaatgatgtcagtttaagctttttgtgattgttatcaatggtcatcatgatcattgtatcacttctgccgtgtttatcgccttttgaattgtcttcgccaaaaagcataacattaagctccttggagttctgcagaagttcaccctctgaaagcgaaaggtttgttgcgtcactctcaagcggtgcaaccgatgagttggttgctgctgtgttgttgtttgtgtcatcaagctctttgaagttgagagtgtcaagaaatgaatagtagtagagcattccgccgccgcccaacaggaagattattgaaaacacaagacaaaggattcttttgagtctgccttttttgttgtataattttttgacctgcttatttgagcttatgtcaataaaattgcttttctgactgtttttttcgtaatttggcatattactcctccaatcgggtaaaaagcacacaatacacaagtatagtttattataccatatgagaatttcttttaatgctaaattagaattaaaatctgccttttcgtaaagttttagcgaaaaatctgactgaaaatattgatttttttgtcggtaactgtcaatcctgttcatcaagtgacaaatagaaggacggaaggaactctttttcaaacacctcgttttcgggcatattcatgttgtgaattgatttttcggttgcctcttttgcctttgaaaactcgctgttgcccatttttatttcttcaatacattttatgagtgcggaaaacttatccgccgcttttacatattttttaagttcatcgtcacctgcaccgttcattttgatgattttattcatatcgtccttaaaatcatccggaagcatcgacacaagcctgttgcctgccgttgtttcaatctccttgtaggcatttttgatttcggggttgaagtattttacgggagtcggcatatcgcccgttatgatttcggttgcatcgtgaaaaagtgcgagcaatgcggccctttcggcattgagattaccgccgaaacgcttgttgtgaatcaaaacaaggcaatgtgcaatcactgcaacatcaagactgtgttcgctgaggttttcacagcgtgtgttgttcataagtccccaacggttgatgtacctcattcttgaaagcattgcgtaaaaatgtgaaatattcataggtagtttctcctgttttttgctaaaaattagtgcaatttgtatcgcattatgttataatgtaatctaaatgcgagtgtcctctgttctctgcaagcaaagcagagcgttgctccgaattgaatatgtaggtgtcttttgaataaatgacggtgaaggacatttatattactgattatactattcataatttaaaagtaaagaaattatcgaaaaaaagattttttcagactttttgctccgtggagggttttatgccgagcagaattttgcaaaaatatccaacacaaaaactatttggtttgcgtgtgtttcttatatcaattataactgcaacagcactttttctaccgtttatcataatgggtggcggtgttttctattattacggtgatttcaatgttcaggaaattccgttttatcagcttgtgcatgacgccgtaagaaacggtgatatgggttggatgcacaatgttgacctcggaacggatatgctctcaagcttcagcttttatcttcttggcagtccattcttttggctgacaattccgttcccgagtgaggctgtaccgtatcttatcggaccgttgctgattttaaaattcggctgtgcgtcactttccgcatatctctatctgaaaagatatgtggctgacaggaatttcgctcttgtaggcggattgctgtatgcattttcgggattttcaatctacaatgtgttctttttccactttcatgaaccgatgataatgtttccgctgttgcttgcggcacttgacgcattcatctatgacggaaaaagaatagtgttcgcacttgcggtattctccgcctgtgttgtgaattactacttctttgtgggacaggttctgttcgtaatcatctattttcttatgattacgcttaccaaaacctacaaatttaaagttaaaaattttctcttgcttgcgcttgaggttatcataggattccttgcaacggcattcatactgctgccgtcagtgctcggattaatgggaaatccaaggcttgccgagcttccgaacggctgggattcgcttgcctacagtcaaccgcaaaaatactggctgataattttaagcctgtttttccctgcagatatgcctgcgtttcctgtgttcacacccggctcaaattgcagatgggcgtctgttgcggcatggttgccgcttgtcggaatgacgggagttatcgcatattttcaggtttgccgaaaaagctggctcaaaaagcttcttgccgtgcttgctgtgtttgcgtgtgtgcctgttttgaacagtatgttccagcttatgaacagctcaatttactacgcaagatggttctatatgggcgtgcttatgcttgttcttgcaacaatcaaggcgtttgaaaacagaaaaaccgattggaacagggcgattcgttggtcagcgggaattacggtaggtgcaactctgcttataggtcttatgcctgtgagctatacggatgaggagagcggcgatattcaaaatacggttatcggcactcaggcaacatttgaacgctattggctctatgttcttatggctttgttaagtctgcttgcgttcgttctcataatcaaaaaattcagacgaaataaaaagagatttacggttatgctcactgttggtatcctgagcgtttcgcttttcacctcatattttataatcgccacaggctatttctcaagcagcagtacaaataccatcaaagaagatatcataaacaggcgtgacggtatcacaattgccgatattgacaatgttcgcagtgatttttacgaatgtgttgacaacacggcaatgttctggcagattcagagcattaactgctttcagagttctgtttcaacatctataatgcagttttacgatgcactcggaattacaagggatgttgcgtcaagacctgaccttgatgtatacggacttcgcccgtttctgagttgtaagtatctttttgattaccgtggcgacggaaaatcgggaagtctgaattcattcgttgacgaaaacggcaacacaagaatgccgggttggaaatatctcagaacgcagaaccgttttgatatttaccgcaacgaatactacattcctatgggatacacctttgataagttcattgccgaagaagaatttgaccttgtgacgaacgcacacaagtcagaggctttgctctacgcaatggttcttccccgtgaccttatgaagaagtattccgatattacgggctacagcgatgaaaagtacaagcttttgtacggcaaacatccggaggattatgacagcattacggaaaagtttgattacagtaattcagattacaaaaaggtttgtaatctcagagctttgaacagttgtacttcatttgaatatacagataacggctttaaggctgtttacaataataaaaagggtgacgataacctgttgtttttcagcgttccttacagcgatggttttaccgcaactgtaaacggcaaggcggcagatgttgaaaaggttgattacggctttatggctgttaagattccaaagggcgaaaagtgtgacattgtgttcacctacgaaacacccggattttcaacaggtgtcaaaatcagcctttgcgcattcggagcatttttaatctactgtgcggttattgtgaccgttaaaacagttaaaaaaagaaaaaataagaactgataaagatataatcagcatttaagtacggaggtatttattatgtttggaaacaaaatacttgacttcaaagacgaacttttaaaggatcttaacacacttctttcttttgaatcggttgacggtgaaaagaatgacgagtgcgataatgccttgaattttattcttaaaagagcagaagatttcggactgacaggggagagaacaaccgacaagagcggtcatataacccttggcaacagcggaaagctttgcggtgtgcttactcaccttgatgttgttcctgcgggaaacagctggagcgttccgccgtatgcgcttaccgaaaaggacggcagactttacggcagaggaattgcagatgacaagggtgcggctcttgttactctctattgtttgaaagcaatcaaggacagcggtgtaaagggcgtgaacactctgcgtgctatttacggcacgggtgaagaaacgggtatggaggatatggaaaattatttcaagaaaaatccacttcccgacatggcattcactcccgacagcgactacggcatctgctttgccgaaaagggtattcttcagcttgaagtcagcacacttttaaataatgcaacaacactcagccagttccatgcaggcagagcagttaatgcagttcccgacagagcgtatgtaatgcttgattcatcagactatgacgagcagactctcatgcgccttgcagacgcaagtgacggtgattttgaatttaattacaccattgacggtcttatgataatcagccgtggcaaagcggctcatgcgtgtgaaccggacaagggctacaatgccgcagcggcacttgttgaccttatctcaaatgtttacacaacaaaggaaacaggttcaatttgttcatttattgactacgcaattaacaaggaaacaaacggcagatcactcggtcttaaaatgagcgatgctgtttcgggctcactcaccgtaaacctcagcagcgtgaatattgagggacagaccgcaaaggctgtgtttgatatccgttatcccgttaccgtgagcggaaacagagttctcaaacagttcaaaaaggttgcaaaaatcagcgacctcaaggttactgttctcaatcacgaagaaccgctttatgccgataaggacagcaagcttgtaaagcttctctctgacgcttatgaaagcgtaacaggtgaaaaggctgagctttattcaacaggcggcggaacatacgcaagaatgctcggaggtcacggtgttgcattcggtcctgcattcaaaaatgacgatgttcgtatgcacaatgcagacgaaagtatggataaggagaacttctttaaacacgctcagatttgccttgaggcaatgtacagaatgtttactgacggagaataatgcgtttcgttatgaacaaattcagatgaaaagggaatgctaatgaatacggaaaaaactgttagaaaacaggcaaaaaaggttcttgaggggaaccggtcggtaattatctcagagataatggtcactgtgcttgcatttttgacagggctgtttgcgttcagccttgcaatgtctgtggcaggactttatggtgtaaaaaatccgaatcagactcagcagatgcttacaatgatttttgggcttgtattttttgcttttgttgttgtgtgtctgccgctcataaacggagtttacagaagtgtgtgtaatgtagtcaggggcagagagtgcagtcctcttgatgttttttactattataaaaagccgaaattattttttaagtctgttattcttgatgtaatttcagtcggcttgttttttatcataagcggtctgctcaatgtgttcaattatcttagtgcggtttcggataaaataattgacaattcaccctcactcacggtggttgtggctgtattgcttgttttggcgtttatcgtcagcactgcggttgttgtggtgtgttacattatttttgttcattatacatttttggcttacggttttaacgaacatctgccgctcggaatttatcttccgagaatgatggctttttcaataaagaacttcatccccacaataaagctgtttatcggttttatcggctgggcggctttgtgcttttttgttgttccggcattttatgccgtaccttattttctgacaacctctgcaatgtctgcaaaatggttgttcgagcttgaagggagcagagatattatatgttagtttcactttgtatgatagcctataacgaatcgaatgctttgagcggacttttcagggatattgcacttcaggactatccgcatgataaaattgaggtggtatttgttgacagtatgtcaaccgatgatactaaagagaaaatggaaaagttccgtgataccgactacggcttttggaatgtgtccgttgttcaatgcgtaaagcgtaatcaggcaacctcatggaatgccgctctgatgaccgcaaagggcgatgttatcataagagttgacgctcacgcaagaattccgagaaactttgtttcacgaaatgtttataacataaagcagggcgaaaatgtagtaggcggcggcagaccgaatatcacttcaaatgtttcaagctggaagcttaccttgcttgcggctgaggattctctgttcggcagttcggttgcttcgtacagacggccgcttgcgcaaaaggaatatcttgacagcctttttcatgcggcttaccgcagagaggttattgccaaggtcggcggatttaacgaaaatctcggcagaaccgaggataatgaatttcactaccgcattagaatggcgggctacaagatgtgctgttgccccgatattatttcgtatcagcattcacgaaacgaccttcacggaatgataaggcagaagtattcaaacggacggtggataggacttacactctcggaatgtcccggttgtctttcatactttcactttgcaccgttcctttttgtaatggcacttctcggctgttctgtgcttgcatttctcggacttccgctttttttgtacattcttttgataatctacggaatgtttgatattgtaaacgctgtcggatgttgcacaatgaaaaatgttcagcctcagtttgtgtttttgccgttcattttcccgttgctccatgttgcctacggaataggcacaattgttggtttgattcagattccgtcatggcggaagaaaatcaaaaacagcggtgcgaaagaacacattgaaaaggtaaaaagaaaaatcagggaaaacacacttcccggtcattcatacaaataattttttgggcggataatctccgcccgtatttgatatttacggagatacttatgactgaaaaagtagaacttacccccgaacttttgcgtgagttacagcttaaacagcttgatatgctcgtgtatttcagggacttttgcgaaaagaacaatctcacattctatctcatcggcggtgcgttaatcggtgcgctcagaaacggcggattcgttccgtgggatgatgatgttgatgttatgctgccacgagaggactacgaaaagctgtacaagctttggcatgaacagggcgcagacggaagatttcgacttctcaaaaccgacagcgatatgttcacgggcaatatttttatgaccgtaaccgacacaaattacactatggtcaagacaaatcagaccgaggttgatattccgcacggacttgtgcttgatgtctttccgcttgatgtttgtcccgacagccgttttgcacgcaaaatgcagtatgtgtggacaatgctttattcgctgtttttggctcaggttgttccagaaaagcacggcggaattgtgggggcaggcagtaaggctttgctttcaattttcaggggaaaaaagctccgtgaaaagatttggagaactgccgaaaagcatatgattaagtacaggcttgataaaaacaagtgtgtaacggagctttgttcgggccctcattggatgaaaattgagtatccgaaacacatttattcgggtgttgattatgtcacatttgagggcataaaaatgccgtgtatgtcgggctatgacgagtatctcagaatggttttcggtgattatatgcagcttccgccggttgaggacagagtgccacaccacgatattgcatatcttgacctgaactcaccgtgtgaaatttatgacagcaaaagaaagaataagcaaaaataacggtgtattatggagcttataagagataattggactaaaaatgactatgatgattttgtagaggagcttcgttcatatgccgatgaaaagtacagaagctttcattcctcattgattcccgacaatgacaaggacttttttatcggagtaagaatgcctgttatgcgaaagctcggcaaggaaatttctaagggcaacggacgcagttttttagagcagacaaccgataattcttatgaagaaaaaacaatgcgaggtattgtaatcggtttgctcaaaaccgaaagctatgaagaatttttgatgtacagcgatgattttgtacagcgtatagacagctgggcggtttgcgacggcttttgtgcaaatttaaagcagacgaaaaagtataaatcagaatttttccctcatgtttgtgaatacaccaaaagcgacaatccgtggataattcgtgcaggtcttgtgctgatgctcgactattatcttgaagatgagtacatagacacggtgcttaaatgttgcgacaatgcgaaaaatccgcattattatgtgagtatggcaagggcatggcttgttgcaactgcacttgcaaagtgcagagaacagactatgcggtacataaagtcaaattcgcttgataacgcaacctttaataaaatgattcggaaatgcgttgaaagtttcagaattgacgatgaaacgaaaaaatatctcaaaacactgaagagatattgacaaatccgaaattcggcatataatataatcaacagttgtcttcggggcggagtgaaattctccaccggtggttaaagtccacgaacaggtgaaagcctgccgagtctgtgaaattcagacaccgacggttatagtccggatacgagaagatgcggcagaacaggcggttcgtctgttttattttggtacgcaatcccgttacatttgtagcgggatttttcttttcccgacaactcgaaataatttttcaggagtggtcgtaatgacaaaatcaaaagcaaaaacaatcaattcagacaacacggcaaagacaacaaagcttgccgtaaccgcaatgcttgcggcgctttcggcagttcttatgttctttgaatttcctctcggattcatcgcaccttcattctatgagttcgatttttccgaagttcccgttcttgtcggaacattcagcatggggccgattgccggtgcagtaattgaatttgtaaaaattctcgttaagttccttatcaaaggcacaagcacaggcggagtaggggagcttgcaaacttcctcatcggctgttcgtttatcctgccggcaggtttcatctacaagtacaaaaaaacaagagtcggtgcgattgtcggaatgcttacgggtacggttgcaatggcggctatcggtgtggttcttaacacattcgtacttgttccgctctactcgtcatttatgccgcttacagaaattatcaaaatgggacaggcaattttccctgcaattgacggcacatttacattctgcctgtactgcgtaggtccgttcaacatcattaagggactcatcatttcggtagttgttttcataatctacaagccgctttcaagacttatcaacagcctcgatgcccttcttacaaagaagaaaaaagcaacagttcagtaaactctaaattaatttttggttgacaaacagcaaattcaggcgtataatagcatatggtgccgaaaggcatctatcacagagtagaaatttgtgcgtgaagtgttttgcggacggggagttgccgcaagaacgaaaggtttatcctgcggtacagatttcgcatcccgctgttactttgggacatataattcagcgggcagagcaatctgtccgcttttttcttcctgaagcaacaacagagattcaggaggtaaaaaatatgtcacaactcaaaaaaattcaaagctctttgcttgaaatgaagagtatctacgctcttgcggcaattgcaatgctgcttgcacttcgtattgttctcggattttttgcaaacagcacacttccgtttttcggaaacaatgtaaagctcagcgcagcgttccttcccattgccgtaacaggcgtaatgttcggaccgattcctgctgcaattgtcggcgctttgggagatattctttcatttatcattgccccgacaggcgcatatttccccggctttacaatcaacggctttattacaggttttatctacggtatgtttctttataagaacaatgtaactccgctcagagttgttcttgcatggtttacaaatatgctctgcgttgaaacattcctcatagctttttggctttacacactctacggcggcggttcaacaccgtacacagtttatcttacagcaagattcatcagtgttgccgttaagtgcattcccgagattattcttgtgtttgctcttggtaagcttgcaggtaaaattcgtgttccgcacgcaataaagagaacctgatgaaaaactaatgcaaaattttaaggttggaaatcgactgctccccgcagtagtttccaaccttttttgtttttgtgaaaaataattttttgtaaacataaattcacctaattcgggcattggaattgtttttctatcaaactatctgctcgaattgggaacggcggctcgccgtgctggcggataatatccgcccctacgagattgctatttcaaataaaataaaagtcggaaagcaaatttgaaatctgctttccgactgaattttttgttataagatttgactgcacgattaagcccacttgagggtatcgttgtagagattgatgtagtcctgagccgaacgatcccaactgttgtcgctcatcatagcacgccacataagctgatgccaaccctggtcgtcctgaatgccccacaatgctcgtcttacggcaagctgcatatctgcacattcatagtttttgaatgtaaatccattaccgtagttgtcggcactgtcgaaaacagagtctttaagaccgccaacctcacgaacaacaggaattgtgccgtaacggagtgcaatcatctgtgcaagaccgcaaggctcctgagcagaaggcataaggaaaatatctgcgcctgagtaaatctttcttgcaagttcgggaacaaagccgtgacagaagcaaagtctgcccggatacttcgcctgcatatagttgaagtagtcctcgtactccttgtcacctgaaccgagaattacaaactgcatattttctgtgtccataagctcctcaagacccattcttacaaggtcaagtcccttgtgtgcaacaagtcttgttaccataccgaccagcggaacatcccagcgctgttcaagacacaaacgctcctgcaaagcacgcttacattcgcccttgccgctcatatcgtcctttgaatagttgcgataaagctgatagtctgtttcgggattatagctttctgtgtcaataccgttcttgataccgcaaagcttgtagtgacgaagattgagttcgtcatgaagtccccaactgaaccacgggtctttaatttcagccgcatagcttggagaaaccgttgaaacacgggtagctgtttcgatagcacccttcatcatattgagtttgccgttcatttcaagaatctttgtttcggatgcaggaatgccgacgcactctgtgttaacttcccagccgtattcaccctgatactggatgttgtgaatagtgaacagactcttaatgttatagtaccatggtctgtgtgaatagaacagatagtagtaaacaggaacaagagccgtctgccagtcattacaatgaatgatgtcgggatggaaatcaatgtaaggaagcatttcaagaattgcacgggagaagaaagcaaatctttcagcgtcgtcataatgaccgtagagagtgcctctcttgaaataatattcgttatcaataaaatagtatgtacagtcattccatcttgcccagaacaaaccgcaatactgatgacgccatgcaaccggcacggtaaagtttgtgatgaagttcatggagtttttaagttcctgcggaattgtgccgtaaagcggaacaacaattctgcaatcctgaccttttctgcaaagtgtgtgcggaagacttcctgctacatcagcaagtccgccactgccgcagaaaggattagcctctgaagcacagtataaaattctcattgtaagattacctcctgtttaaacaactttatacaacagattttttagcaatataaatggggtacgaatcatatcccataagtgatcgaccatccttgatggtaacatccttatctatgataacatagttgaggttggtattgcaacctatttttgtgtcctgcattacaatacagttagaaagctttgcgccttcgccgacataaacgccctttgaaataacgcagttctcaacctcaccgttgataacacaaccctgtgcaatgattgaatttttcacattgcttgtaagtccgtagcgtgacggagcgtcatctcttacctttgtatagataggtctttgcggattgaaaagctcatccctcacttcttttttcataagatccatattgaactcaaagtaatcgttgattgagctgattgccgcacaataacccttattttcataagcataaatactgtatttgcccagactgctctggagaagtcgctttacatcaagctgattaacgctgatggcgtttcggatttcactcataagaatgtctttcttgatgagaatagagccgtatgcgtggttgaatacttctttgtcaacaacaccgggctttacaaaaatctgatttaccttgccgtcattgtctacatcaagggtaatcggtctgtcatagccctgcggaatcgcatgattcttatatataagtgtaatgtctgccttcttctttgagtggaagtcaaaaacatctgtgtaatcaatgttagtaattacattgccctgtgaaataagcacatactcctcacggcaatgctcaatgtagccgtgcatattgtagattgtttcaacaaagcttgaaaaagccttgccgtcatatggtgggagaattgaaagattgctccttctctttgaaaggtcatatgcactgcccgaacccacatgatccataagtgactgaaagttgctttttgcaactatgcctacattgctgatacctgagtttgacatattcgaaaggtcaaagtcgataattctgtattttccgccgatcggaacgcttgcagttgttcttgaagacgcaagctcggggattttgtcgtcaagtgttgccgcaaagatgaaaccgagtacattattacttctcattgccgtccacctccgtgtcgctgtctatcatggtttttgctttgataacggtgttttctttgataacggtatttgcaccgacaacagtaattccccagtcgtcaatattttccgtttcttcggggttttgtccgacttttgcatttttgcctacaacggtgttttcggcaatgatagcaaactgaacctcggcaccgtcctcaattaccgcaccgggcatgatgattgaagaattaatcgtagcatttttaccgattgtaacacctgcaaagagaattgagaactcaaggttgccgtaaacattgcatccgtcggcaacgagtgaattttggattgacgcctcgtttgaaacatagtgcgggggcatcatcgggtttcttgagtagatatccttgaggtctaaagtaacctttggatcgagaagatccatattcgcctcccaaaggctgtcgattgttccaacatccttccaatagccttcaaaaggatatgcaaacatacgctcacctgcgtcaagcatggcagggaggacatccttaccgaaatcgtggcttgaaccttctttgaattcatcctccgtaagatactttttaagttccttccagctgaaaatatagatgcccatagaagcgttagtgcttttcggatgagcaggcttttcttcaaattcgtagattgagccgtcctcatttgtgttgagaataccgaatcttgaggcttcttcaagcgaaacatcaattaccgcaattgtacaagcggcattcttttccttatgatattcaagcatcttgttgtagtccattttgtagatatggtcgcccgaaaggattaccacatattcaggattataacgctcaatgtagttgatattctgataaattgcattggctgttcccgaataccagtctgcaccgtcaacagcctgataagggctgagacagtttacacccgagtgcatactgtcaagatcccacggctgtccgtttcctatgtattcgttaagaacaagaggctgatactgtgtgagaatacctacagcgtcaatgcctgaatttacacagttagataacgggaaatcaataatacgatatttgccgccaaacggtacggcaggctttgcaagctttttggtaagcacgccaagacgagagccttgaccgccggcaagcagcatagccactacttccttttttggaaacatcttaaaatacctccgatatttattttattatctttatcaaacttattaattacagtcttgtgactgaaaatatcaattttctttctgagcttcatcgggttcaagttcttttgcacatctcagataaattacgctgagtggggggagtgtgagtgaaagtccctgatcaaaaccgtgaattttcattacctcggttttgatattattaccgttcacaacaccgcttccgccgaaacgctcttcatcagagttgaaaacctcgtcataaagaccgtatttaggaacaccgatgcagtattcgtcacgcctgatgggctgaaaattacataccgaaacaatttcatcaccgtttttgtcggtgcgcttgaatgcaataacactgtttgtgtaatcgtcatggtgaatccagtcaaagcctttccagaccgtgtcaagttcgtagagcggcttgcagtcaagataaaatttgttgagctccttaaaaaatgttctgagctttttatgcttttcaaattcaagcaaatcccattgaattgcctcttcgtgattccactcgtcaaactgtccgatttcagttcccatgaacacgagtttcttgcccggatgagcgtacatatatgttatgaatgctctcacgcctgcaaactgctcgtcatactttccgggcatctgctttatgagtgagcctttgccgtgagaaacttcgtcgtgtgaaatcggcagaaggaatttttctgaaaaagcataataaaagctgaaagtaagactgtcatgattgaacggccgccacatcggattgagtgacatatagtgcagcatatcgttcatccagcccatgttccacttgaagtcaaaaccaagaccgccgtcctctattttatgagtaagctttggccacgatgtgttttcctcggcaaacatcataacatcggggtggtacatatgaacagccgtgttgagtctttttacaaaatcaacggcgtcaagattttcttttccgccgaatttgtttggttcccattcgccctcgcttttaccgtaatcgaggtagagcatagaggagagtgcgccgattctcaaaccgtcaatatgatatttgtcgagccagaacattgcgcatgaaacaagaaaacttgtaacctcgaatcttgcatagttgaaaaggcaggttccccatgagtcacgcttgcttgtttttggatcgttgctttcataaagaggcgaaccgtcaaaccttgcaagtccgaaatcgtccgtcggaaaatttgacggaacccagtcaagaatcacaccaatgccttcaccgtgaagcttgtcaacaaaagccataaagtcagatggtgtgccatagcgtgaagtcggggcatagtagccggttgtctgaaaaccccagctgccgtcatagggatactccataatcggcataagctgaacatgggtgtagtgcatctcctttaggtaggggataagctcatcggcaagcttttgatagttaaaaaagttgccgtcaggatattttctccatgagccagcatgtatttcataaatattcatcggtgacgatgaaatgttgttttctttgcgtttattaaaccattcgctgtcattccacgaatagctttctatatcatatacaacagaggcctgaccggggcgggtttgagcatgaaaagcatacggatctgctttcataagcctgtcgccgtattcgctttcaatgcagtatttgtatgtacaaaactcttttacaccctcgacaaacacttcccacacaccgtaaccgatgttatacatatagtttgcctcgttgttccaattattaaaatcgcctgcaaccgaaacgctccttgcggttggcgcccaaacacggaacaccactccgtttttgtcgttacggttcacgaggtgtgcgcccaaaaaatcatatgcacgcactgaatcgccggtgtgaaaaacttcaagagccggtcttgcctcgttaaagctgtaattcataagaattgctccttgtttaatatcttttgattgttgattgtttgctcacacttatataataccaaaattatatgtcaatttcaagcaaattcaaaaaatttaaaactaatttttcgtgtatattttataaactgcgactaaatgttacattttaaagcataattttacgaataaagaaaaataaggataaatatcttccgaaaaggaaaacaaaaagggctgtccaaaaaggacagcccaaagaataatctgtaaattcagattagccaagctcagcgaaatacttaattgttcttaccatctggcttgtgtatgagttctcgttgtcgtaccaagaaacaacctgaacctcataaagatcatcagcaatctttgataccattgtctgtgtagaatcgaagagtgaaccgaatctcataccgattacatctgaagaaacgatcggatcttcgttgtaaccgaatgactcagaagcagcagccttcatagcagcgttgataccttcaactgttacatcagaacccttaacaacagctgtaagaattgttgttgaacctgtcggaacaggaacacgctgtgcagaaccgatgagcttaccgttgagctcaggaattacaagaccgatagcctttgcagcacctgttgagttaggaacgatgttagcagcacctgctcttgctcttctcttgtcgccctttctgtgaggaccgtcaagaatcatctgatcgcctgtgtaagcgtggattgttgacatgataccgctctggatttctgcatacttgttaagtgtgtcagccataggagcgaggcagtttgttgtacatgaagcagctgaaatgattgtatcgtcagctgtaagagtcttttcgtttacgctgtaaacgattgtcttgaggtcgttgcctgcaggagcagaaataacaaccttcttagcgccggcatcaatgtgagcctggctctttgcctttgatgtatagaaacctgtgcactcgagaactacatcaacaccgagttcgccccaaggaagctcagcagcgtttggcttagcgtagattgtgatctctttgccgtcaacgatgattgagccttcgccggcctcaactgtgtgaaggttttcaccgatcttaccgcagtagccgccctgtgctgtatcgtacttgagaaggtttgcgagcatagcaggatctgtaagatcgttgatagctactacttcgtaaccctcagcaccgaacatctgtctgaaagcaagacgaccgatacggccgaaaccgttaattgcaacttttactgacataaaaaaattcctcctaaaattctaaggtgcttctattatattacatttttttcatttcttcaatagcttgacaaaaatttaacgaaaaatttttgacttttttacaaatacggtaaaaaacacggtcgcattttgcttttttaaggcaaatttaagctgtaaccgtcaaaaagctgtaatcttttttatttccgtaataattatctgcaaaattcccgtgcttattcttgacaatttggttattttattataaaattatatcgtccgctgatgcggattttggcaaaagtacagtttttgacttttgcgacttttttaatcagactctttaaaagagccgttatatatagatattttttgtaatttttatggcgtttcgccttttgaaacgttctgtgcaatctgtacggtgttttgcggttgcgtatgtatatataatgtattaaaaatatttacaaagtaaaaatgaaaattgaatatctttttaacggcacctttaaagtctaattgattgggaactgtgaaatattaaaaaatcaaactaaggaggtgtccaaattgccattgtggataagtattatctgcattgtcgccgcagttgttatcggcgcaggtgcaggtattttccttggaattgccatccgcaaaaacactgccgagaaagaaatcggaagtgctgaggaggaggcaaagaagattgtggctgatgcaatcaaaacagccgaagcaaggaaaaaagaagtagtccttgagggtaaagacgaggttcatcgtttcagaaacgagagcgagaaagaaatttccgatcgacgcaaggaagttcagcgtcaggagagaagaatccagcaaaaggaagaaactcttgacaaaaagcttgacaatatggaacgcaaggaagaaaaggtcaacaaaaagcttcgtgatgcagatgcaaaactcgaagaagttgaaactctgaaaaagagccagtttgaaatgcttgaaaaaatttcgggctacacggcagaacaggctaaaagctatttgctttcacagcttgaaaatgagcttgctcacgagaagtcggttaaaattatggaatataccgaacagctcaaagaggaagcagacgacaaggcaagaaacattatttcgcttgcaattcagcgacttgcagctgagcaggtttcagaggcaacgatttcggtcgttcctctgcccaacgacgagatgaagggcagaatcatcggtagggaaggccgtaacatcagagccatcgaaactcttacgggtgtcgatcttattattgatgatacgccggaggctatcacgctctcatgctttgagcctgtaagaagagaaattgcaagaattgcacttgaaaagcttattgcagacggcagaatccatcccgcaagaattgaggagatggttgaaaaggcaagaagagaggttgaatccgaaatcaagcgtacaggtgagagagccgtgcttgacgcaggtgttcataacattcatccggagcttgtcaagcttctcggcagacttcgttaccgtacaagctacggtcagaatgtacttgatcactctcttgaggtttcatacattgcaggtatgatggcgagcgagcttggtcttgatcctacaattgctaagcgtgcgggtcttttgcacgatatcggtaaatccattgaccatgaggttgagggaacacatattcagattggtgtcgatcttgccaaaaagtataaggaaagcgacgctgttattcacgctattcacgctcaccacggtgatgttgaggcgagaacaattgttgcctgtcttgtacaggcggcagatgctatttcagccgcaagaccgggtgcaagaagagaaaatgttgaaaactacattaagcgacttcagaagcttgaagaggttgcgtcttcttttgacggtgttgagcgtacctttgcaattcaggcaggccgtgaggttagagttatggttaagcctgaaattgtaaatgatgagcgtatgattccgcttgcaagagatatctgtaaaaaaatcgaagaagagcttgaatatcccggacagattaaggttaatattatccgtgaaagcagagcgtccgattttgcaaaataaaatatcttgattttaactacggttgacagggctatgttgaccgtagtttttattttgtagggacgatattatacgccagtacggcgagccgccgtacctgattcgtgtagataggttcattaaatgaaaaattgaaaattgaaaatggaaaattgcggtcgggaagatggttcgcaatataaaaaacatattatgcccgagcgtagtatagtagctgtttgcacaatttaatgtagcggcgaacgaggttcgccgctacaaacgctacaaagaatatgctgtaatcaaaaaataatttgcaagaaaattaaataaacttgcaaaaattaaatttgtgccgtagcttagatttttgacctgttattgtaaactgtaatttaaaaaacagcaaaaaactttaaaaaatattcaaaaaagtattgacaatcggttaataaggctttataattcaagacagtaaggcaaagctcttacgaagttttcggaaaactgaatataaaaaggacaaggaagttcactttggtttcttctgattttgcaacaaatattttaaaacttgcaaaatcggataaaacattgtgagctttatttttttgcttcggaaaaaacggtttatgtggaggttaaaaatggattcaggaaatataggctttgtgctgctttgtgcggctttcgtatttgtaatgactccgggtcttgcaatgttctacggcggtcttgtacgaaagaaaaatgttgtaaatacaatgatgacatcaatttttattatcggtgtcggaattgttatgtgggtgcttttcggttattcgctttcgtttgctccttctggaaatgcttttatcggtgatttccgttggctcggtcttgagggtgtttcactcacggagggctacacggatgatgcgtcaattccgaatatggtattctctgcgttccagatgatgtttgccgtaattacccctgctcttattacgggtgcggttgcaggcagaatgaagtttaagtcaattttcgttttcacaattttctggtcgcttatcgtttattatccgctcgctcacatggtgtggggacagggaggacttttaggtgcagacggtatcggtgctctcgactttgcaggcggcgatgttgtacatatcagttcgggtgtttcggcacttgtactctgcatactcctcggcaagcgtcacgattatgaacattcaatttacagaattcacaatatcccgacagttgtactcggtgcgtcgctccttatgttcggttggttcggctttaatgcgggttctgcacttgccgccgacggtcttgcggctcacgcatttatgacaacgggtgtttcagccgcagccgcaatgctctcgtggatgctctgcgatgttatcaagaacaaaaagcctacgcttatcggtgcaagcacgggtatggttgcaggtcttgtaggtatcacgcctggtgccggctttgttccgatgtgggcggcagttattatcggtttgacaacaagccccgtttgctatattatgatttcatacggcaagaaaaaattcggctttgacgatgcgcttgacgcattcagctgtcatggtacaggcggtatctggggcggacttctcacaggtgtgttctcatgcacggcaatcaacagcagtgcaggtaatggccttgtgtacggtgagtttgcacagttcggtgctcaggcggcaggtatcggcatcacaattgtaattgcggttgtcggaacactcatctgctacggcatcacaagacttcttacaggcaaaatcagggttgacctcagagatgagcttatgggacttgatgtttcacagcacggtgaagctgcttatccgtcatttaacggtcttgacaactaacggaggttttaaagtatggaaaacaataacgatattcagcttataaaaatagaggccgttgttcgtgaagaaatgtttgtagatgtcaaaaaggctctcacggatatcggcgtaaacggaattacagcgtatcaggttgtcggttgcggaattcagcgtggtatgtcggagtatgtaagaggacagaaggttgatgttcaggttttgccgaaaatcaagtttgaaattgttgtttcttccgaagaatgggagagaaaaacaattgaggcaatcagaaaaacagcctttacgggcaacccgggtgacggtaaaatatttacctactaccttaaacaggcggttaaaatccgtacgggagaaacaggctacgatgcaattcagactcccaactttgatgactgatattttcctattttcctatatcaaaaaagtgcgtaccgaaatttggtacgcactttttgcttgtttatgaaattattacctttttattgtaacatcttccgtatcgacaatgttgtcacgaagtctgttgtaataatcgggatttgaatgctttatgcttatcggctttagctcgggagttgcaaaacagtgtgttgttctgcctgttgcagaaagttctccgtttttattgttgaagattttatagtcaaaaatcattcttgaccccgtaaaaaatacaaggcttacttcaacggaatactcatcgccgaatttaagcggctttttgtaacgggcatatgcgtcaacatttggaatatacaatccttttgactgcatttcggcaacatcacaaccgatgtcgtgcatatactggattcttgcatcttcaaaatatctgatataatttgagtgatgaacaatgttcatacagtctgtttcatagtatgaaacctttgatttgtataatttctcggtcatattttctccattacatatatacggaaaatccgtaattattttttaagcaacaaaccgtttttaaggtcctctgctgcctgtttttttattacaaaatgctgttttttgcctgtagcggtttgcggaagatcgttgacaaaacggtagtatctcggagcctgatattttgaaatattcggtgagctgtcgcagaagtcaataagctcggcaaccgtaagactttcgtcggccttgattacatatgccgcaacgcactcgcctcttgttgaatcgggaacacctgtaacaatacattcctgaaccttcgggtgtgagttgagaatttcctcaattcttgcaggataaatattttcacccttgctgataatcatatcatcttttctgcctgcaattgtaaaaaactgctcgctgttccaagtgccgatgtcgcctgtgtacatccaacccttgtagaacttgtcttttgtagccttttcgttatttacatagcagtaggtagttttgttcggacatttgatgatgatttctccctctgttttgttatcgcaggggactgtgtcatcgggctctgcttttctgtcgtcataaacatttacaagtcttacctcatcatctgtgcatgatctgcctgccgaacctgccatttcaggaaggtcatacggacgaagaaatgtattccagaaagattccgttgtgccgtagccgttaaaaatgttgggggagagaagttcctgatagcgaatgcaagcggctttttcaagcggactgcccatggtaataatgcccttgagcgaagaaaggtttttctgatgtttttcctgacggtttgcaagcatctcaagagttgacggaacacctgtgatgaatgtaatgccgtatttttcgataaagtccatgcagcttctcgggttgaatgttctcataatcacaagacacgcacctgcataaagggtaggtgtaggaccgcccgaatgaataccgccacggtgaaaccacggcgtcatattcatcgtaatgtcaacgggtgagagcggaaagtgcataattacatcgtgagccgaaagaacttcgttgattgcgttaagcggaacaccctttggagtgcctgttgtacctgaggtctgaagtcttaaaacctcgtcataaatatgcggtgcatagtcaacaggcggattttcgtaactgctgtccttgatgtaatcgtcaaagaaaatatgtccttcgggaagagttacttcctttttggaattattaacgcagagaatcaattttggcttatgctcgcagatttcaagagcctgtacggctgtttgcataatgtctgcatcataaacataaacaacaggcttgttgtgtcccataatttttgcggtttcgcccggtgataggttaaagttagcgggatttgagattgcaccgagtttctgcggcgcaatgtaaccgaacaaaaactgcggtgagttgtaaagctgcataaacacgatgtcgtttttcttgacgccgtcttttttcatagcgtttgcaaatctgtttgcatcggcattaagttctttgtagctccatgttctgccgctctgaggatcaattgcggcaggtttatccgaaaagcgtcttacatttctcataaagccgttaagccatgtaaattcactttcaaatgtttctctgaacatctgtgaatcatatgttaaattcataatatccccctgtcctattatgtatgggtgtacattattttatacacacatatgtgtgttacttgtatgttgttttgtcggcagattatttgccgtatttgcctacgataatacttgagttctgaccgccgaatccgaatgcgtttgacatggcaaagttgatttcggctttctttgcggtatttgcaacaaagtcaatgccggcacattcgggatcaacctcgttgagattgattgtaggcggaactgtgcctgtttcaatagccttgacacaggtaattgtttctgtaataccgcctgcgcccatcatatgacctgttgcgccctttgttgagcttacataagggagagtgttgccgaaaaccttcttgattgaagatgtttcaactgtgtcacccttgtttgttgcagtaccgtgagcattgatgtagccgatgtcggaaggattgattcctgcctctgcaattgcctgtttcatacaagcgattgcacctcgtccttcgggatgcggagcagttacatggtaagcgtcatccgtgttgccgcaacctctgatttctgcataaatctttgcacctcttgcaagagcgtgttcctctgtttcaagaacgagcgcaccgccgccttcacctattacaaaaccgtcacgggtaacatcaaacggacggcttgcagtgcttggcgaatcgtttcttcttgaaagagcttttgcgttggcaagcgaataaattacaagaggacagagaacggactctgctcctactgcgagcataatatcagccttgccgctctgcatacacatacaagctgtgttgattgcgtcaccgcctgacgaacaagctgtgcttaccgtaaagctcggtccctgaatattgtagtcgattgcgatatttgcggcggcaatgtttccgagaattttgggaataaaacgaggacctacctttttgtgtgatgcgcctgtgagtgcctcctgagtatatgcgattgttgcaatacctgccattgcagtacccataacaatacctgttctttcgggttcaatcttgattccgctctgtttcatggcttcctcagccgcaatataagcgtattgcataaacggatctgtttttctgattaaatcctttggaagatagtcggacggattaaagttctttacttcgccggcaatctgaacagcgagttcagacggatcaaaagtcttaattgtgtcaatgcccgatgcacctgccgtgatattattccagtagttttcaacaccgatgccaacaggtgttaccgcacccataccggttacaactattttcttcattcgttaagctccttgttttaaaataagttatttacattttgcatattattatgctatacttgaattgtaccaaatatggaaaaattattcaataccgttgattatgcaaaaatgacgatttggcagtcttaaatttacagttttgcataatattgaaaaaaaccgacaaaatactgcggaaaattgtcaaaacggaggttattatggatataaatcagctcaattgctttataactgtggctcagacgctcaacttttcagaggcggcaaggcggaactatgtttctcagtcaaccgtcagcagatatgtaagcgaccttgaaaaggagtttggggttcagctttttacacgctctcaccgtgatgttatcataacaagcgagggcaaggcacttttgccctatgcgattgaaattgttgaaactttaaagaaagcaaaaaccgttatcaagcagatgcatgacggaggtcagggtaaaattacgctcggctgtgatgttacctcgctttcgttcccgacaaaatgtattgccgactttgcggaaaaatatccgggaattacaattgatgtgcgacagctcgacgaggctgaccgcacgcttgcaatcacaggcggtgaatacgacttctgctttatgccgagagatatggttcccgaaagctcaggtattgaatcaatcattacacataatgaaactttgtccgttgtaacagcgaaaaattcaaaattcagcggaagaaaaagcgttaagctttccgaattggctgacgaaagtattctggtactttcggaatcggttgcaccgattgtatatatggaaattatggatttgttccgtacatttcacataaccccgaaaattgaaaattcatttgacgatcttgtttccatatatgtgtcatcgtcatcgggaatcggcgtgtctgtcataccaacctcggtcgccgcatacacttctgacgaatacaccgattcataccttattgatgatgcggacacaagcatagcctatgttatggcatggggaaagaatatttcaaatcctgctgcaaagctttttatggaggctgttaagaaatatgccaagggcgatgacaacatttacgggctgtaactgagcatatttctcaatataaattccaataaagaactatagtgaaaatttcacaaaataaacacacattattttcaaaaaaggtatttactttataaatcttcggtgttataattacggtagtcaaggagaagttgacaaaatatcctttcaggaggtaattaaaatgtacagatttactttaccgagagatctctatcatggtaaggatgctctctcaagtcttaaaaatttatccggcaaaaaggctgttgtagttgtcggcggcggttcaatgaagcgtttcggttttcttgacaaggctgttgactatcttaaagaagcaggtatggaggttaagcttatcgagggcgtagagcctgacccatctgttgaaacagttatgaagggcgccgctgttatgcgtgaatttgaacccgactggattgttgcaatgggcggcggttctccgattgatgccgcaaaggctatgtgggtattctatgagtatccaaacacaacctttgaggaaatcatcactccgttcagtttcccgacacttcgtacaaaggctaaattctgcgctatcccgtcaacatcgggtactgcaacagaagttacggctttctcagttatcacagactatgcaaagggtatcaaatatccgcttgctgactttaatatcacacctgatgttgctatcgttgatcctgcacttgccgaaacaatgccggctaaacttactgctcacacaggtatggacgctatgactcacgcaattgaagcttatgtttcaactctcaactgtgagtacacagatccgcttgcactccacgcaattgagcttattcacgacaacctcaagaagtcttatgagggcgacatggcttgccgtgataaaatgcacgatgcacagtgccttgcaggtatggcattctcaaatgctctgctcggtatcgttcactcaatggctcacaagacaggtgcggctttcacaggcggtcacattattcacggctgtgcaaacgctatgtaccttcctaaggttatcaagtataactcaaaagatcctgttgcagctgagcgttatgctaagattgctaagttcatcaacctcaagggcgaaacaacagaagaacttgttgacgcactcatcgctgaactccgttcaatgaacgatcagctcaacattccgcagggcattaagaactacggtccgggcggcgttaaggctgacgagagcattatcgacgaaaaagaattcctcgaaaagctccccgaagttgccaagaacgcaattgccgatgcttgcacaggttctaacccacgccagccaaatcaggaagaaatggaaaaacttctcaaggcttgctactacgatacagaaatcgacttctgattcgtttgacaaatctatttgtacttatcacagctctccgttttcggggagctgtttttttaataaaaaatccgcataaaaatgctcttaaaaggcataaaaatcatatggacaatattgctttgttgtgctaaaattgacttgaaattgatgaatttggtgacataaaatgaaaattgcagtaataaacggtcagaaccataaaggctcaacctatcatattggcaagcaggttgccgataaattaggcggcgaggttacggagttttttcttccgagagatttcggcgatttttgcgtaggttgtacgcagtgttttctaaaatccgaaacactttgtccgcattatgagcgactgaaaaagattaccgaggctatggacgaggctgatgtactcatcttcacaacgcccgtgtatgtttatcattgcacaggctcaatgaaagcatttcttgatcattacggttatcgttggatggttcaccgtcccgaacagaaaatgttcacaaagcaggcggttgtaatttcgacagccgcaggttcgggtacaaaatctgccaacaaggatattgctgacagtatgttcttttggggcgttccaaaaacttatcgttacggtgtcaatgttcgtgcaacaaattattcaggcgtcaccgatgaactcaaaaagaaaattgacaaaaagactacctcaattgtcaataaggtaaagaaaaataacggcaaagttaaggcaggtttaaaaacaaaaggctttttctttattatgagaatgattcagaaaagcggctggaatgaagccgataaaaattactgggcagaacgaggttggaacggtaaaaacagaccgtggaaaaatacataaggagatgttttaaatggcaaaaaatactgaaatcagcttgagaaacaaggttatttattcggtttatatccgtaatcacacaaatgacggtacatttaatgccgttgcagaggatcttgaccgaataaagtcactcggtacggacatcatttggtttatgccgattcatccgattggcgtcaagaataaaaaaggctctctcggctgtccttatgcaaacaaggactatcgcacaacaaatcccgaatacggcacaatggacgatttcaagagccttgttgaaaaaattcacgcaaagggcatgaagtgcatcattgatgttgtctataaccacacttcgcccgactcaaatctttctgttgaacatcccgaatttttctacagaaagccggacggcaattttggcaacaaagtcggtgattggagcgacataatcgaccttgattattctaacaaagaattatggcagtatcagattgattcactcgttatgtgggcgaagattgttgacggcttccgttgtgatgttgcatcattcgttcccgttgaattttggaaacaggcgagaaaggctgttgcaaaggtaaatcccgactgcatttggcttgccgaaagcgtacacagctctttcaatgtgttctctcgcaagagcggaatttataccgcaagcgactatgagctttttgacgcttttgatatggaatatgactacgatatccgtgaagttttcgacaaatatttgaagggcgaaaccacactttcaaattatatggatatgttcaattatcaggaggcaatttatccgcagaattacgataaaatgcgttgccttgaaaaccacgatcagccacgaatttgccattatgtaaagaacaggagcgaccttgaaaattacacagcttttctgtatttcttgaagggttcaaccctcatctatgcaggtcaggagttcggttgtgacgaaactccaagcctttttgacaaggatgttttcccacgcaacacaggccttgatttaagcaaactttttgcaaagctcgatacaatcaagaaaaccgttcttgatgatgacgattatttcaaggccgatgcagacgatgaaaacgatattgcaattcttgagcgtgacaacaacaagagcaaaaaagtcggcattttcagccttaaatcaaagtcggctgatgtaaaagttgacctccccgacggcgactataaaaacgaaatcagcggtgagacagttacagtttcaaacggaaaggttcattgcaacggcaatgcaataattatccgcaagtaaaataaaattccatataagaataatacaacctccctgcaaagcatttcagcttacggggaggttgttctttatataaaaatccgtgttgcatggttacaacacggatttcttggttttatttaattgaaccgtcgccacccataagagcggtcatttcttcaatgcgttccaaaggaaacggtggttcgcaaagcagttttttatatgctcacttagctttctttttattactgccgaaaattttagtcggaataatgcttccgaggaatgcggcgagcaaaatccacggaataactcttgcgtcaaagcagagcaaaaggagcattgttacggcaagcggttttttcattgtgacaccgagaagtcctgccgttacgactgccgcacaaaatgccgtgtcaagtccgccgagcattgcaacaccgtagccgatgctcactccgcagaagatgacggggaagaagtgaccgcctttccaacccgactttatgcagatgtttgtgagaataagtttcagcacaccgctgataatgagaatccacggtgcaaattcggcaaagctttccttgacaacggtaatgctttcttcgcccgaaaacattgtgaggggaaggtatgtacccataacaccgaggataattccgccgagagttgtgctgataataatgccgagcttgccctgaatgagtgcgaaaaattttccgaaaatctttgaagatatgataaacagaaaaccgcatacagcacccaaaagtgcgagaggaattccccacaaacgctcaaaatttgtaatgttataaccaccaagtcgtggaagtcccatacttccgccgaaaatcgagttaagcaaaaacagagttcccgccgcaaaaagtacggcaatgatgtttgaaataagctttgttgaacggatatcggtaggcttttcttcgctgtcaagcctttcttcattgaccgatgcaagaccgaaaagcggtgcgtagaataccgcactcaaggttgcgcttatgccgatttgcattagttcgggaattttacttttagcgtctttcatatgacttcctgcccagtagcaaagtccgacgataacacctgtcaagcctgcctcgggaccgagacttccgccgaaaacaaggggcaaaagtgccgagatgcagagcaaaagcaccttgttatacgggtaaaatttatctttttttacctttttcataacctcgtcaagttcatcgggaacagcatttgtcagcttttgccatattccgagaataattccgcctgccgtacagacgataatcggataaaatttgaaatcaaaatttgacggaattgtatcccacacaagaccgattcccaaacccataagttttagaaacagccatactatcagcgaagtaaccgcaccgctgaatccgcaaaaaatgtagtataaaaaattgttggcaacagtccgtttagtcattgtcgcacctccgtgtgtttataattggattataacataaaatacagcaaaaaaacaattattccgcacaaaaagtacgaaataattgctttttattatttttttaattttagagcctcttctaaacaaaaacagctgacaccaatgccgatgtcagccataaaaacctatttgattttaaatttcaaaagcggcgcttacctttttgaattctctttttctgatgatgaagtaggcaatcaaaacggatgtgcctgtgataagccatgaaacggggtaaaccataaggagcatatcataggtgtggaatgccttgaataccgtgaagagccagatgattctgaacacaacagaaccgaagattgtgaggattgcagggaggagtgaatgtccgattcctctgagcgcaccgccgctgatttcgtatgaacctgtcataagctcaaggagcataacaatcgccattctgatgattgcgtacttgataacggtggggtcggttgtgaagaaggtgatgaaaaatccgcttccgagcatgaatataacgctcacacagcctgtgaaaatacagctgaaaagcatacaaagtctaaacacctttttgcatctgtcaaactgaagtgcgccgtagttctgacttgtgaatgtaacggctgtctggctgaacgcacatactatatagtatgtaatgtattcaaagttgagttcagctgatgagcctgcaaccgcctgtgaaccgaagccgtttatggctgtctgaatgaatacatttgaaattgagaaaaccataccctgaatacctgcaggagcaccgattttcaaaatcataatgagatgttctttcttgaatgaaagtttttttggattgactctgattgactcgtcttcgtttctgatgaggaacatcataacaagtccggcgcttatgccgtcggcaattactgttgcaatgccgactcctgcaacgctcatatcgcagacgattacaaagaagaggttcaaaagaacatttacaatacctgaaattacaagacagtagagcggacggcttgtgtcaccgacacttctcaaaattgccgaaccaaagttgtagagcattacaaacggcatacccataaagtaaattctcaggtatgttgccgcaaggtcaattacatcatccggtgtgttcatcagccttaacagcggtgctgcaataacctgaccgagtatcagaagaagaaatccgcatataagtgaaagtgttattaccgtgtgaacagcttccgaaacctttttacggtcattttgacctatatatcgtgcaatcaaaacatttgcgccgaccgaaagtcccgtgaataacagcacgagcatattgatgagcggagcgttgcttccgactgcggcaagtgcctgactgcttgaaaatctgccgaccaccgcaacatcggttgagttgaaaagctgttgaagaatactggatcctgcaagcggaagtgtgaaaagaagaattttttttacgagcggaccttccagcatatttatctggtgtgagcgccgtcgcttttcttttacagtattctgacctttgtttcttttaaacagacttgcaaacgcaagtgatggcatttttttgactttccccattaatttctaacctcttcaatcacataaccgttgtaaacaataccattcttttccattttccacaattattgtaatcctgttgcctgaaataaacaagcaaaataccttataaacataaagtttactttgctcacaattttagttataataactacctcgtcaaaattcttctttttatgcctttataatatggtaaaaactgcttttctgcatattttcagaccgatttttctcaataagcaaggctttgaatttgtatgcaatttgtgcctcttcaacaaaagtaaaattgctctcttgtaagcattgacgaaaaaatttttaacctacaaataaatgattttaaaattgttgtatatgccgattaaattataatgatacaattatgatacaagcttaatataatatatttttaaagggataagcgaaaaggagtgaatgttatgaagaaaaagattgctgtaattgtggttgcagttgttttatgcgttgccgccgcagtatttgccgtgccgaaaatcagtttctatgcgtgtgagcctaccgtgtattttgatgttgagtactgcgacaaggttgatgctaagatgtctgccgaagatgccgaaaccgtgaagaaaatgtttgagggcaaatccgcatattttgattcaccgtcttgtggtttttccgaaaatgcatcaataagaataggctgtaatacatatatgcctgcgtgtgacggtgatgaaactgttaagcacggatttatgtattttagtctttcaaaaagcgaaaataacgaacttcgcaagattatgaaaaagtacggagcagatacgagaaaagctatctaaaaccgttgacagacgcatttccgtgtgttaaacttttctcgaaaaatatacggaggtgtttttatgaaaaactacaactgggcaacactcggttgcggagttatcgcaaatgagcttgcagccgcactcaaaagcagaggacagaaactttattccgttgcaaaccgtacccatgaaaaggcggttgtgtttgccgaaaagtacggcattgaaaaggtttacaacgatattgacgatctgtttaaagacgaaaatgttgacataatttacatttccacaccgcacaacacgcatataaaatatcttcgcaaggctcttgcggcaggaaagcatgttttgtgcgaaaagtcgataacgctcaattcagatgaacttgacgaggcaatctctcttgcagagaaaaaccatgttgtgcttgcagaggcaatgacaattttccatatgccgatttacaaggcacttcttgaaaaggtaaattcaggtgatcttggcgagcttaggcttattcagatgaatttcggcagttacaaagagtacaatatgaacaaccgatttttcaaccgcaatcttgcaggcggtgtaatgcttgacatcggcgtgtatgcactttcatttgttcgtatgtttatgagctcatgcccaaacgatgtgttgtcgcaggttaaatatgctgaaacaggcgttgacgaacaagcgagtattcttttaaagaataaagaggaggaaatggcaactgtcattctttcgcttcacgcaaaacagccaaagcgtggcacaatctcgtttgacaagggttatgttgaaatctttgaatatcccagaggcatggaggcaaagattacatacacggctgacggccattgtgaaacaatctcggcaggtcagacaaaggacgctttgctttatgaggttgaagatatggaaaaggcgatagagggcgacacggctcttatgcaccttgactacacaaaggatgttatgaaaatcatgaccgacatccgcaaaagctggggcatgaaatatcccgaagaagagtaagttttttgaatttaatttgatactaaacacaaaactccaccgtgaaatgcggtggagtttcctttatatatttgattaaatcagaattagtagttttctgcgtggatttcaaaatagctctgtgggtggttgcagacggggcaaacctcgggagcttctttgcctacaacaatgtgaccgcagttacggcattcccaaaccttgatttcgctccttttgaaaacttctgcagtttcaacattgcggagtaatgcacggtatctttcttcgtggtgcttttcaattgcggcaacaaggcggaacttgtgtgcaagctctgtaaagccttcttcctcggcagttttagcgaaatcttcgtacatatctgtccactcgtagttttc

SEQ ID NO: 983 - DNA, 6697 bp, unidentified
  source 1..6697: mol_type = unassigned DNA
atggaactgatttacacaaatgatttatgcaccggatgcaacaaatgcgtgcggggctgtcctgtacttacggcaaatattgcaacgcaggaaggttatgtaacggtagacccggacaaatgtattgcatgtggggaatgctttgatgtctgcccacatgaagcgagagactattatgatgatacggaccgcttctttgaagaccttgcatcgggaaagaaaatttccgtgatactggcaccggcatttctggcaaattatcccaaagaataccagcgtgtgctgggatatttaaagagtaagggagtcaaccatatctgcagtgtatcgttcggtgcggatatcacaacctggggatatctcaaatacattacggaacacaaatttttcgggggcatttcccagccgtgtccggcagtagtcacctatgtggaaaaatatataccggagctgattccgcgtctgatgccggtacacagtccgatgatgtgtactgctatttatatgaaaaaatacatgcaggtcacagatgaaatcgcttttatcagtccgtgtattgccaaaaaattagagattaccgatccaaattgcggcggatatgtttcttataatgtaacttttgaaaagatgatgaagtatatcggaaacgattatgaaggatgtgaaccatataccgatgaactggaatatggactggggtctttgtatccgatgcctggtggattgagggagaatgtagaacattttcttggaaaagagcaggtagtgcgtcaggtagaaggcgagcatgaggcatatgaatatctgcgttcctatgcaaaacgcattcagcagaataaagaacttccgtttatggtagatatcttaaattgcgcgaagggctgtctctacggaactgccacagatccgaaacggggaaccgatgatgtcatgctgacaatcgcaaaactgcggaacagcaaaaccagtgcaaaacaggagaaggcacactttggcaggaagagcaaaagcaggagtccgtgggcagatacactgacaccggaggaacgtctgaaaaacttcatggacgcttttggaaagctggacatcaacgattttatgcgcagctacaccaatcgcgcagtacatattgaggaaccgtccgaacaggagaagaaccgcctgtttgcagaaatgaaaaaagatacctatgaggaacagcacagggactgcgaatcctgtggatattcaagctgcaccaacatggtacgtgccatccacaatggagtcaacgtaaaagaaaactgtgtgcactatgtgcggggcatggcagaggaagagacaaaaaagattgcagaacttcgcgatcaggagcggacggaacaggaaatccgccagcagaagattacagatatcacagaccggtttattaccctgagtgataacattgcagaattgaatacggcaaatgaggagtctgcaaatgaagcaaccaatctggcacagtatattcaggatatttcccgcctgtgcgatgaactgaatgaatccatccgcattatgtcggatttcatcagtgtatataaaaagagcaatgaagatatttctgccattgcaggacagacaaatctgctttcgctcaatgcctccattgaggcggcgcgtgccggtgagaacggaagaggctttgcagtggtagcggaggaaatccgtacactgtctgattccacgaaggatcttctgacacagaacgaccagaaagccgaggcaattcttccaaagattacacagagcatggattcgatcaaagatctggtagaaagcatgaataccatgacgcagaaagtgtcaacgattgccgcaaacacggaagaaatttcttcccagacgacctatgtacagaatatgacagaagaaatgcgggatgaggtgaaagaactgtagatgaaaaaggatgcgtattacacatccggacaatttgcaaaaaaagcacatgtgacacttcgcgcgattcggtattatgataaacagaatattttaaaaccaagtgcacggactgccgcaggagcgcggctgtatacggatgcagatctggcaaaactccagcagatccttttattaaaatatctgggattttcgctggaagatatccgggagatgacacttgcctcggcagatcagcagtatcttcttgaatccatgcggatacagaagaagctgctgcggcagaaaatggacgaaatgcaggcgatggatgaggcaattgaccgcaccatagaagccatccagacggaacaggcgattgactggaacagtatgctggatctgatccatttgacggcagtagaacgaagcctgaaaaaccagtaccagaatgcggcaaatatttccgcccggattcgcctgcacagggagtattccgtcaatccgcaggggtggtttccgtggattatgcagcagtgtaatctgcagccggggatgcggattctggagctcggctgtggaaatggagcattatggactgaaaacagagaacagctgcctgcggatctatgggtcgttctctcggacaaatcagaaggaatgctaaaggatgcccggcgtgcactgggagaggacagccgtttttcctataaaaaatttgactgcgaaaaaattccttacgaggaggaaatgtttgatcttgtgatcgcggatcatgtgctgttttactgtgaagatatcccacaggtgcttgcagaatgtcggagggtcttaaaaaatgggggacggtttctatgcagtacctacggaaagcagcatatgcgggaaattaccgatctggtgcagcagttccataaagaaatcgttttgtcagcggaggtgctgtatgagcggttcgggcttgaaaacggagaaaacctgttagcaccgtatttttcggaaattcagatgcgaagatacgaggatgcgattgaaatagcggaagcagaaccgctgatttcctatattctttcctgtcacggaaatcagaaccagctgcttttgaaccagtacaaagagttccgggaatttgtttctgcccgcgtggcagatggattttatatcacaaaagatgccggaatcttcctgtgcagaaaataattagaaaaatctataaaaaagacttgaaggtgacctagcgtcaccttttataatggaaataaatatagaaatcgtaaatgcacacaggaggaaatgctcatgaccattattgtaacgggcggtgccggtttcatcggcagcaactttattttctatatgttaaaggaacatccgcaggatcgcattgtttgtctggattccctgacctatgcgggcaatctgtccacgcttgcaccggtgatggatcagccgaattttcgtttcgtaaaactcgatatctgcgaccgtccgggagtatataccctttttgaggaagaaaaaccggatgtgatcgtcaattttgcagcggagtcccatgtggaccgctccattgagaatccggaagtctttttgcagaccaatattatcggtacttccgtgctgatggacgcatgcaggaagtatggtatttcacggtatcatcaggtatccacggatgaggtatacggagatctgccactggaccgtccggatctgttcttccatgaggatacaccgatccacacctccagtccttacagcacttccaaggcatctgcggatctgcttgttatggcatatcacagaacgtacggcctgccggtgacgatcagccgctgttccaacaactacggcccataccagttcccggaaaaactcattccgcttatgattgcaaatgcgctggcagataagccgcttccggtatacggagagggactcaatgtgcgcgactggctgtatgtcggggatcactgtaaggcgattgacctgatcctgcgcaacggaaccgtcggagaagtctacaacattggtggacacaatgagatgaaaaatattgatatcgtaaaactcatctgtgaatatcttggcaagccggagagtctgatcgagcatgtgcaggacagaaaaggacacgatatgcgctatgccatcgatccgaccaagattcacaacgagctgggctggctgccggagacgatgtttaaagatggtatccgcctgaccatccagtggtatctggatcataaggaatggtgggagaatatcgtaaacggagagtatcaaaattactataaagaaatgtatgggaaaaaagggatataaagaaaggcatataaatatgaaagtattcgtgacaggcgttgccggacagctgggacatgatgtggtaaacgaactgacaaagcgcggacatcaggcagtcggttcggatattgcaccgacactggaatcctgtgcatcgtatgtgccgctggacatcaccgatgcggcagcagtggaacagacaatcatgcaagtacagccggatgccatcgtgcactgtgcggcatggaccgctgtggatgcagcagaggacgaagaaaatcaggcaaaagtcagagccatcaacgtagatggaacgaaacatattgcggacgcagcgaaaaaagcagatgccaaaatgatctatatcagtaccgactatgtgtttgacggacagggcgagactccgtgggagccggactgcaaagcatacgcaccgcttaacgtatacggacagacgaaacttggtggggaactggcagtggcacagacactggaaaagtatttcatcgttcgtatcgcttgggtatttggattaaatggaaagaattttatcaaaaccatgttgcaggtagcgaaaaatcacccacaggtgtgcgtggtaaatgaccagatcggcacaccaacctatacttacgatctggcaagactgcttgttgacatgatggaaaccgaaaaatatggttattatcatgcgacaaacgaaggtggctacatctcctggtatgattttacaaaagaaatttaccggcaggcaggactcgctaccgaagtgcagcctgtgacaaccgcggaatacggtctgtcaaaggcagcgcgtccgtttaacagcagactggaaaaaaagaaactgaaagaaaatggatttacaccgcttccaacctggcaggacgcactggggcggtatctgcaggaattaaagcgacagggggaactttaagatgaagggaattatattggcaggcggcgcagggacacggctgtatccgctgacgatggtaaccagtaaacaattgcttccggtatatgacaaaccgatgatttattatccgctgtctacactgatgctggcaggcatccgtgatattttagttatttccacgcaggaagataccccgagatttgaagcacttttgggggatggaaatcagttcgggcttcatctgtcctacaaagtgcagccgtccccggacggacttgcacaggcatttttgcttggagaggaatttatcggagaggatgcctgtgccatggtactcggcgacaacattttctacggaaacggattcggaaaaattctgcgcaatgccgcaaaggatgcacaagagggacaggcaaccgtctttggctattatgtcaacgatccggagcgtttcggtgtcgtggatttcgatgcgaacggaaaagccgtatccattgaagaaaaaccggcacagccaaagagcaactatgccgtgaccggactgtatttctatccggcaggcgtgagcaaaatggcaaaacaggtgcagccatccgcccgtggcgaactggagatcaccaccttaaatgacctgtatctgcagcagaaaaacttaaatgtgcagctgctcggacgtgggtttgcatggctggataccggaacgatggacagtctgttggatgcggcagcatttgtgcagatgatcgagcaccgtcagggtgtgaccatttccgcgccggaagaaatcgcatatatcaatcagtggatcacaaaggaaaaactgatggactcggccgcacgctacggaaagagtccgtatggagagcatttgaaagcagtcgcagagggcagagtgaaatattaaaatcagcgtaactattctgagggggttctgaatagatacaaattagcatgaaagaggaaaaaacagtgggacagataacagttgaaaaaaatgtcggcggtatcgaagggctgtgtgtgattacaccggccgtacacggggatgcccgcggatactttatggagacctacaatgaacgggaaatgaaagaagccggattcgatatccagtttgtacaggataaccagtccatgtccgtcaaaggcgtattgcgcggactgcatttccagatcaactatccgcagtgcaaactcgtgcgcgctgtgcgcggcagcgtgtttgatgtggcagtggatctgcgggaaggttccgcaacctatggaaaatggtacggagtggaactttccgaggaaaacaaaaagcagtttttgattccggaaggctttgcgcatggctttctggtcctgtccgatgaggcagagttctgttacaaagtcaatgacttctggcatccgaacgacgagggcggcctggcatggaatgacccaaagatcggtatccggtggccggatgtgacaggtgggtatcgcggaatcccgtcggcggaaggatattgtatggcagatgggacaccgctgacactttcggagaaagaccagaagtggcctggattagaggaaaaataa

SEQ ID NO: 984 - DNA, 8200 bp, unidentified
  source 1..8200: mol_type = unassigned DNA
ctaatggctgatatgtaataattcgtgtgccttgtgtgataatggctcaccaaaataatctttgtagcactgcattactgatggattttcgtgtgaaaatctgagattattcactttatcaagtccataaagcaccttgcttctattggctactttgttatcatcatctttaataggctgtccaccaccattaatacatccaccaggacaagccataacttcaacaaagtcataatgtgccttgcctgttgcaatagcttccataagctttcttgcattagaaagactgcttgcaaccgcaaccttaagtatattgccattaattgtaaacttagcttccttccagccgtcaagacctcttacacactggaaagcatcaggttctggattagtcttattaacaaggtaataagcacttctaagtgcggcttccataactccgcctgtagcaccaaatataacacctgctccgcttcctacacctaatgggtcgtcaaattcttcttcctcaagttcctgaacttttataaagaaagactttaacatacgttccacttctcttgtagtaagaaccgcatcaacatctttaccatcatcccatgtacattcatctttcttggcaagacaaggcataagtgatacacagaatattctttcaggctctatgcccagcttttctgcataatatgacttagtcaccgctccaaacatctgctgtggtgactttgctgttgaaagcctgtccacatactgaggatattccttctttataaagttgacccagcccggacagcacgatgtaaacattggaagtcctgactccttaatctctggaagtctttcaagaagttcgcttccctcctccataatagtaagatctgctgaaaatgttgtatcaaatatgtaatcaaagccaatccttctaagtcctgcaacaagtcttttggctgttgcgaaatctttagaaagtccaaagccttcaccccacgctgttcttacagctggggctatctgaacgactgttataatattctcatcttcaactgcatcaagaacacggcctacatcatctctttcccttaatgcacctactggacagttcacaacgcactgtccacaaagagtacagttagtctcctgaataagtctgttcttagccacattcacagttgttcttgaacctgtattaactacgtcccatacgtgcataccctgaacattatcacatatctgcacacaacgcatacatttaatacatttgttattctctcttataagtggaaatgtcttatcccatttattcttttcaagaatagagtcataaggcatctcagatatattaagttcattggcaagtgactgtaatgtacagttaccgcttcttacacaggaagcacattcataatcgtgctgtgaaagtataaacttaacattagtctttcttgttgtacgtacctttcttgtgttagtacggataaccataccttcctgaacaacattattgcacgccgtaacacatctgtcctgtccctcaacctcaacaacgcacacacggcacgcacctatttcattaacttccttaagatagcagagtgtaggtatctcaacgcctacttttcttgcagcttcaaggatagttgtaccatcttctactgatatagctataccattaattgttgcatttaccattgttcttctctgcctcctctgaatgctccaaatccaaaatggtcacatcttagacagcgtccagcctcctgacacgcttcctcacaagaaaatccatattcgattggctcaaaatcattctttctttctgccgcatctcttaacgcaacctcaactcttccacaggcaaccttatcttcattgcttgcatacggaatttcaatatcacatgtaatctcgtggttaaatcctaaatattcatctatattagccgccgcaactttacctgccgcaatagccttaataactgtcgctggtccagttacacagtcaccacctgcaaatacaccctcagacatttctccgtcctgtggtgtaatattacctgtattaagtgctgatataacacctctctgaaccttaataccgtgttcctcgaagctcttagtctctataccttgtccgatagcaacaactataaggtcactttctaataaaacctcatctttagccgctgccttaggagctggtcgtccgtgtgaaacccttgatatcatctgtggctttacaataagtcctatagcattaccttcttcgtcctgcttaatacgcactggtgacataagttcaagaacatcacagccttccgcctctgcaccctcaacttcttcttcaagggcagtcatatctgctttacgtcttctgtatacaatgcttaccttgctcgcaccaagtcttattgaagaacgtgcaacgtccattgccacgttaccaccaccgataacgataaccttctttcctgtataatccggcatatctccatcaccgatagcacgaagcatctctacagcagatgtaatgccgctcttggcatcctcgccttctataccaatctttttatcagcgtgtgctccaattgatatgtatgtagcatcgtattctttggttatatcatcaaatgatatatcctttcctacgcttatattcttcttaacttctattcctgttgaaagtattgagtcaatttcctcgtcaagcttctttcttggaaatctataattaggaataccatatcttaacattccgccaagctgctttctctgctcaaatatagtaaccttatgtcccataagtgcaagataataagccgcactaagaccacccggtccgccaccgataatagcaaccttcttgcctgtcggtgcttcacattctggaaccggaacaatacctgaattatcaacagccattttcttaagtccacggatattaacaggtgcatctataattgttcttttacatctgttctcacaagggtgctcacatatataagcacaggttgttggcattgggttatcccttcttataagtcttaccgcatcagcatatcttccctgctgtacaagtgctatgtaacctggaatatcaacacctgcaggacatgacttaacacaagcaaccggctggttactgttgcatgaacagaaaccattatgtatatgtgattcaaaatcatctatacagccatcaactgactttaatgcaagctttgcagcttcatatccaattgcacagtctgctgaataatatataccttctgctgtaagcttaatattctctactgtctcctcatttgcctcaccatcaagaacattatcaaaaagtcttgcaagctgtcttaagcctacacggcagggaacacatttaccacacgactgtgcaagacacatttttataaatgaccttgtaaggtcaactgggcaaagcccaggaggactggctacaattcgtctttcaagatcctgatacaaagactccattgtaacctgagccttatctttagttaatatcgttaatctactcactaataaatagacctcgctttctataataatattactgctttcaatctgcaatccgacaccaatatataatctgatatcaatatataattagacatcaatatataatctgatatcaatatataattagacaccaacatataatctgatatcatcattgcagctttcttctatatccaaactattatagtgtaacattaccattaataattgacaacaaaggttatttctttaacaaactaacacaaataccatattttacatacaattcttaatacaatgtgctgtcctgcaaacttttacaactaaacaccttattatccatataatacacgatatcactataaatacaccatacaattaacttaatctaatattataccgccacgcattattatgcaagcggaaacaggtaggcatttcacactactgtgcaggaaaaaagcaggtgcaaaacgaatttcacacctgccaaaataaattatataacatttattattcttaattatccagaataaattgttgctgctaagttttgtaattacttaacaactcttaccttaataacaccatctatagctgaaagcttagctgttacatcttctgtgatagctgaacctgtatcaagaacagagtaagcataatctcctcttgacttgttatccatagattcgatattaatacctgcatcacccataacgcttgtaagcttgcttatgattgctggaacattcttatggcatactgtaactcttcctgctgatgtacatacgccacaatcacagttaggataattaacagaattaacaatattaccgttctctatgtagtttcttaattccttaactgccataacagcacagttatcctctgcttcttcagttgaagcaccaagatgaggaagtacaataacaccttcctgacctgctgttgttgtattaggaaaatctgtaacatacttagcaaccttgccagacttaatagcatcaagaatagctggctcatcaacaagtacatctcttgcacaattaacaacgactgtacccttcttcatcatatcaaatgctgccttattaatcatgcccttagtactatcaagtgctggcacatggattgtgatataatcacattccttgtatatatcctcaacattaacaatatgcttaacttcgcttgaaagattccaggctgcattaactgaaagatatgggtcatatccatatacttccattccaaggcttatagctgcattagcaactagctgtccgatagcaccaagtccgataacaccaagcttcttgcctttgatttccttaccagcaaatgctttcttagccttttctgctgactttgcaatatctgcatcatctttattatcttctacccacttgataccgccaagtaaatctcttgaagctaaaagtaaagctgcaagaacgtgttccttaaccgcattagcattagcacctggtgtattaaatacaacgatacccttatctgcacatttatcaagtggaatattattaacaccagctccagctcttgctatagcaagaagattatctggtaattccatatcgtgcatcttagcacttcttacaagtactgcatctgcttcttcaaatgctgcattagcattataatcgcttgagaaaaggtcaagacctacagaagctatattattaagacaatttacgttaatcattaggcattctccttttcgaacttcttcataaattcaactaacttctcaacgccttcgattggcattgcattatagatagaagctctcataccgccaactgttctgtgacccttaagatttacaaatccagccgcttctgcttctttaacaaatttagcatcaagttctttatcacctgttacgaaaggaacattcataagtgaacggtcttccttaacaactgttcccttaaacatcttagactcatcaaggaaatcataaagaattttagccttcttttcattgtgttctttcatagctgaaagtccacccatcttcttaatccacttaaataccttgccgcagatatagatattgtagcaaggaggtgtattataaagagaatctgcatctgcctgtgtcttccactttaacatagttggtgttccaggaagtacatcatctgttataaggtcttctctgataattgcaataacaacaccagcaggtccgatattcttctgaactccgccgtatactacaccatattttgttacatcaattggttctgataagaaacaagatgaaacatctgatacaagtatatgtcccttagtattagggagtgtcttatactttgttccatatattgtgttgttctcacagatgtatacataatctgcatcctctggaatatcaagatctgaacaatctggtatgtatgaatatgtcttatcctctgaggaagctacagcaacagcctcaccatagattttagcttcattaaatgctttcttagcccactggccagtgataatataagctgcttttttgttcttcataaggttcattggaacttctgcgaagaactgcgatgcaccaccctgaaggaataataccttataattgtcaggtatattcataagctctcttaagtctttttcagcttctttgatgatgttatcgtaaaccttggaacgatggctcatctccataaccgactgaccagaaccctggtaatctaacatctcatctgctgcttcccttaatacttcttcgggtaatactgctggacctgcactaaagttataaactcttgccactttctcttcctcctgattcatttcaataattaatcataaacatttaatcataagtaaatatattcaaaataacttaatatattaaaaatttattaacatttattctattcctgctaaatcgctctgtcaagttaatattttatcataataaagtatttgctgtactttttttaataccaaaaggctgatgcttaattagcactctcctttttattaagatcatctctgtcaaatgcttctgatataggtgctccaggtgcaaccatagggaataccttatcatctttgcatatatcacattcaatgacgcaaggtatattaagctcgatagcttctttaagagccttctcaaagctttctatatctgctacacggtatgccttagctcccataccttctgataccttaacaaaatcaacctgatcgttaagtactgttgcagaataacgctgtccatagaaaagatcctgccactggcgtaccataccaagaacgtgattattaaatataacctcgattattggaatattgtaacgtgtagctgttgcaatctcattcatattcatacggaaacagccatctcctgctatattaataacaaccttatcacgacagccaaccttagcacctatgcttgcaccaagtccatatcccattgtgccaagtccacctgatgtaagaagtgttcttggacttttgaacttataatgctgtgcagcccacatctggtgctgtcctacatctgtagatataattgcatctccgttagtaatctcatatatcttttccataatatatggtccattaagaacatcttttctatacttcatagggaacttttcttcataatttttgatatgttccatccattctgtatgctctgactgctcaagcttggcattaactctctttagtatctcagccgcatcacctattacagaagcatctgtatgtatattcttattaacctcagccgcatctacatcaaactgaagaattttcgcattctttgcaaatttctttgtatttcctgtaaccctgtcagaaaatcttgcaccgattgtaataagaaggtcacattctgacacaccaaagttagatgtcttagttccgtgcataccaagcatacctgtataatgaggatctgaaccatcaaatgcacctttacccataagtgtatcgcatacaggtgcatctatctttttaacgaattttcttaattcatccgaagcttctgatgcaataactccgccgccaacaaatacatatggcttcttagcagctttaatcatagcaactgcattttctacatcttcttctgtgattgtatctgtaactctctcaattggcttaggagtttctttaatgtaatcacactcattagctgttgcatctttagttatatcaacaagaacaggacccggacgtccttccttagctatcttaaaggctcttcttaatgtagcagcaagatcctttacatcttttacaataaagctgtgcttagtaatcggcataactattccagctatatctacttcctgaaaactatctctaccaaggagtggaagtgtaacattacatgtaatggcaacgattggaattgaatccatcatagctgttgcaatacctgttacaagattagtggcaccaggtcctgatgtcgcaaagcatacaccaacctttcctgttgctctcgcatatccgtctgcggcgtgagatgcaccctgttcgtgagatgtaaggatatgtgttatctcatctgagtgcttatataacgcatcatagacgttaagaatggctccacctgggtatccaaatacagtatctacaccctgttcttttaagcattcaactataatctctgaaccatttaatatcat

SEQ ID NO: 985 - DNA, 21879 bp, unidentified
  source 1..21879: mol_type = unassigned DNA
agtagaaaactgcgccacagccttggcaggccatcgcgcagcgattttgttcaataccaatttatctttcaaactcttatccaaataaatccgtagtacagcttcacttgctccgatatcatcatccatttcaacaagcaagccattttctccatccctgattatattcggaatggcatccaccctgcttgccacaattggtttgcccgccatcatatactcaggcagtgccagtccaaatccttcccatcgactcaacaagcatgcagcatcaaaaagttccacatagctcattgggttatcaacccaacctgtaatatgtagactatctgagaaaccgttgtcctccgcatactttctaatctcagcttcttggtttccattgccaacgataatgaagtgtgcattgggaacttcatctttcacctgctttgccatcttaataaagacatctggtgctttttgctgacttattcgcccaaccatgccgacaacaaatgcatcttccggtatgttcaggtcttttctcttaacagcaccattctccacactttcataggcctcgatatccacaccgttaaaaatgacttgcagcttatcctctttgcatattttcttatccagtgctgactgtttttctgcatctgaaatgcagatgattttatcgcagaacggtgctgcaattttttctatcattgtgtatattgcttttttctttgccgagcagcgcatgttgaacgcccagccatgtgggttgtatacacagtagttctttaaaccaatatctgcaatacgagcaatagcccccgccttgctggaatgagcatagacgatatcggggttatatttctttatcagtgctctaacccctctaatcgcttttaagtcattgccaccaacggctcgcgtcatctcgacttgttcaaaagaatcaaccaaacctctgtagtcttcttcatggaaatcctgtgagcaaaccaatatattctcgaacttttctttgtccaaatacttgagaagcattcggatgtagcgatccacgccacctgcggcctgcgctacatgcaaaattcttatttttttcatcatgccaccgcctttgtagtggcataatcgtcattatctaaaataactgtactcatttatttactccttaaatggaatttcccaatgcgatggttttctatattgctccatcactttgcataatacttacaacagtcttaaaaataatcctcaaatcattcttaacactccactccctaatatacttagtatccagcttcaccacttcctcaaagtccgtgatattgctcctaccgctcacctgccatagtccggtcagtccgggtctgaatgacattctggctctatggtgtggttcatacttctcccactcatcgagtgtcggtggtctggtgcctaccaggctcatatctcccactagtatattgaagaattgtgggaattcatccagacttgttttcctgataaactgcccaattccggttttcttctttccgtttggcagcaccttattgcctatgattctaggatcgaagtccatcttgaacatcattccgtcgcccactttattctgtgacgcaagctccttctttcgctcctcggcatccatatacatgctgcggaatttatacatcttgaactttctgccgtttctgccgactctctcctgtgagaagaatatcggtcccggcgatgctatgtatatcaccggtcccacaaatatcatgatgataagtgtgaacaggcagcccaccagtcctccgactatatccatgcccctctttaccagaagtgcgctgggatttgcatagttctcgcttgatgtaactactgtgtagtcgcctatcttttctatctgcttgtagccaccatgggctgtaccgttttttgctattcctgtatgtactgcaattcccatctctaggaatatatctgccattttttcaggatattcatcctcgctgcaaggcggaatgagcacctcatccacccattcatcgcacgcatagtctactatgccatcgtgattcgcaactatcggtatgccgcatatagtctcacccttcatgtctgtatccagtgaagctgctactatctttgtatagcctatacagcttttctccactgtgcgcagtgtatcacgaagtattgtatcaggtgctatgacaaacagtgatttctgagatgctgcaaagtcatttttcttaaggaagctcttgagcgctagtcttgctacatatgttattgccacatagattggaaacatgatataaaatgataatcgcgagtatatatcagccatctgtgtggtgaacagaaatagcgctgtcaccataaatacaagaactgcatgcttgcaggtcgatataaattcatccagatatccgcgtttcatgacattcttgaatgaatctgccattatctccacaaagaaatctatcaaaagaaatgctacacccagtatacggtagtccttgtccacatatgggttattaaagccgaagcgtatcacatatgaaattaaaaacgcaataacaatgcatgcgatatctgtaagcataaagtctatatgctttgtccatcctctgcctttctttctgtacattctttctaaattctccttatagtatctttaactcccctatacccactccgagggaggtaccattgtacccccccccgaatatttttagtctgttttgttttttgtaagtttattcggattagcgtatcttttgttgtatctaattggtttttccaatgacctattttcacctttttttattcattgtcaatgaatattaggttttctttacaatttttgacacattcgccaatctctatagtattatcagctcaatattatacattatttatatgtcattctgcttatttttcctccaaaactacaccatatcgtgtgctaccatatattacgcaatattatcgctttaaattaatcattgctaacccatatacatgagtatatacagtgcattttatacgatttgatgtaaaattgtcaaggtgctccggctactgaaaagtagtcggggatttttctatcatacctaaaaattaagcgcttacgtttatggcactctttctttaataaacgtcgttattatcttttcatatccctctggatcttttttataattctctgcatgtcctgcaccatgaactatataaatttctttactgcttttacaactattataaatttcttttgccatatataatggtgccaagttatccatatcaccatgaataattaaaatcggaatttttgtctgtgataccgccttacaagcatcagcctcttttaaatcaaatcctccccaaagctttattcccacatctgcaaaaattttgaatacctctactggcattcctttaggcaaagagctcttacaatttaactctaacatttttgttgatgttgtaaatccactatcttcaataattccacaaacagaatctggaaaatccaaattactactcattgtgaccactgctccacccattgaaattcccataagaaatatcggtgtttctcttccaaaatgttttgcagcccaattagcccaatctacacaatcataacgttccttcactcccaatgtaaaaatatttccttcactttcatcatgcgcacgcatactaacaagtaaaacattccatttttctttctgcgcaattttataaatcggcacaccatccacgtaactatgacctctaaacccatgaaagaagattactaatggagcattcttctttctctcataataatgaccttccaactttgttccatcagaagccaagataacaattttttcattatttttttgctttattttatatgcttcggtaagccactcatattgctcatcatctgctgttcccaaatctggccatgctgtttctcttcgttcacaaattttttggaacactaatttacttcctacccccaaaattattatcgaaaaaataaacattataataactactgcaacaatctttttctttttcactgatttctcagttattgcaagttgttttactctttgcttcataaacatcactttccttcaatatttatcacatctcagccgaccataagatcgttgcctgctgctcaccacgaagaggtgtgtgattattacgagcagcgcagggagctaccgctcccagtatatcacaagtctgcaaataaatcagccttgtacacgccattctccagcatcttcttgaagctgtcctttacggctgcgacatcttcgtgataggtcatcccgtaccagcctcgattgcatcatggattgagtagtccatgatgatgtgattagaagcatccaccggctgtattttcgtgtgtaaaaaaaacaaaattattttttgatatgaagtatctctaaaactaattttaccgcctgattcttcattattaacagaacaatcatataaataacaaccgaagcagtcactgaaaaaactgtagaaatcagtactgaactaatatatttttctgatatagaacatatagtccatattgccaggcatcctatagcaactgagagaatgtccttttttagaaaactgaccctaaaatattttcttccataccaccatgttataaccattgacagtaactccgcaataacagtagtaaatgccgcagcattctgctggaatgttggaataaggataaaatttaatcctatattaacaagagccgcaacaatcgttgccatcaacaccttattttcgcacctataaggtattagaatgcacgatgtatagaaccaactaaaaatgctaaaaagcaacgcaacagaaagaatcttaagcgatatatttgcatcaacatattcttgtcctgcaataataaaaactatgtttttgcttaatgcaatcaatccaaccattgccggaacgacaataacaacaagtgcattcaaaatctggttggctgttctattaaaatagtctatttttttctctcccagataagcagataatctcggaattgaaacaataataattgcagccagcatttgttttacaatagtgtagattttggtggaaacagaatacaatccaactgctttatttcctgaaaagaaaccaagcattgtagtatctgcattcgtatatattgttgtcgctactgatgttgcaaacagaactaatattggagccaaatgcgttagaatttttgcattaatggtaagtcttatcttacaatattttcttctagaaacagcattaagtatatttgcgccgctgcatgatataactgtgatccatacataagcaaacaaatcactgctattcctaacgagtacaaacataagtattaatgaaataaactgaaacaaaatgcctcgaattgtgatatatttatagtcctcataaatttgaaatatccattcacttccaatcagcgtaaacattatgcttatgcttaacgctaccattattgaactatattggttaaatcttggaactaaaaggatacacactcctaaaattaggtacgaaaaaactgtcgaaataaagttaattgaaaagacctccgaagcaaataatgacatcttttcttcattatctcgatatcttgctccctctctgatagcataggtgctaattcctaaagccgccagcaatgaaaaatacgaaataaccgactgacaaaaattgtaaattcctatattttcaacatgaaggactcgtgatacatacggaaaagtaatcaatggaaaaatcacctgaaatgccgttctaatcatgttgagtcctgcattgacaccaatagatctttgatttctcattttttctcaactccttccacaatttttacataaaccgacattaataaactacgctatgtaattttctttttaaacagctagccagtatactttacatattatcctttttatcagttgctttattgacgaaaaagaatgatactgatttattaacggcttttccttcgtatgaagcccgatgccttatacagaaacggaatgtactgcgccgttttataaagaatagtcatttttattccaaccaatttccaaagaagcccacaagaacatactttcatagaatcaatgtaaaatttgcaatcacttttaaattcttttattttctcataaggaaccgtattcaataaattcgcatatgaaaaaaaagatgccaacccaacatgaattttagcttcatagtgcatcatacttcgcttactacatatttcatatattgttcctgctgcacgaactgaatctttctttttttctgtgtacacatttccaatagcagaattttctcttatcagatagttatacagtgggcagtctagcactataacactttcgcacttgagcaaatactcaaacacaaaaagattatcttcgccaatctttaattttgagtcaaaccttatatctccaattttttctttattatacagtttatcccagcaaaatgatgttagatatccatcccacagtaataaacttctgatagcctcttgactggaaatttttttctccggatgaattacttcctcctttacatttgtgaagtccttaaaatatgaacactctactaaatccgctccattttttatttgtttatagagcgtccaaagcgcatccggctcaagggaatcatccggatcaaaaaaataaatgtattttccctttgcgtagttcagcccctgattacgcgcattggaaacccccgcattttgtatatggtaaacctcaatccgcccatcgtttgctccataataatcacatatttccccactgttgtctgttgagccatcatcaattataataacttgaagctttctgtatgtttgaattaacaatgaagacaaacttttttccaaataatcttccacattatatactggaacaataacgcttattaaatcatccacaatttatcccctcgttatccttgcaatcacactttataagcgcattttttcttgatattgcaactattattaatataaccacagccgaaaacgctccagattcattgctaaatgtagcttcactcaagcttgcagaaaccatataaaatagaatcaataatattgaaaatttacacctgttattcagcattgcgttattcaacaaatctttgcaaatttgtataatcagtatcacataaacaatcattccaatataaccaaattgaacataaattgatggccagtacacgtccgacattgtagcatatccataattcattagatgagaataattcaacgaattataaatattatatagttgtgactgatttttataagagatattcgttccaaatgtcccaaaacctgttccaaaagggaaatgatcatttgcgatttttaatccaacgctatgtacaccaactcttatgctttgactcgctccccatgataaatattgctgaattttgctttttgaaataaaaaagcatacaattccgattggagcaatataaaccggtttgaaaatatctttaaatgatattcttttctttttagcaaaattcaagaggtaatacgctaagataaatgcaatcgtaataaatccctttgttcggaaagttgccgcaattgaaagcagcgacattatcttaaacactgcatttcttttatcctctgttgctagaatactgtataagagcacttcattataaacaaggtacgtataatgagaataaataaacttataacttctaaggccatatcttacttcatctgctattccagtatttacaagcaaattaactattccaaaaacaaaaataacagttattataatttttgctgtacttattatttttttcgagttcaatcgaatattattttttacaataattcttcttccgaccaaatatataataaagaacttaaacgttcctattatatctctcccaattacggaaactgatggcatatatccatacataacatttcccacaattccaataaaaagcactaacagaatgcataatatgctatttttttgttccttattaacagccactttccctttatctttacaaatatatacgatagctatagccataaaaagcaagcatatcagctcatctgtatagttagcatatggaataaatttgtcaaaaaaaatattaaaaaaaataatcaatatatatataaatagtgtcaaccattccatttcatcgtttcctttgcttgttttccctaaatgctactgtactcgtcgaaacaacttctttaacttaaaatatctatcttccccaaaaaaacgaatcagctttctcttccatctctgcttgttacccgcccatgttgctgcgtaatgatgaatcgacactgtttcatcacaaagtaaattctttgtattacccgtcgaaagcggatcaaaaaaacgtggcggatataccgttacttcttttaggtaggtaatatcttcattgctaaccttaccaaatgaacgaatcaccttatcattaagccacggacaagcaaatgtgctttttttctgatctgcaaaagaaatcgaatcatagcattccatcatcttttgtaccactggacttgatttttgggcaccaaaaccaagtccagtgttacatagggattcaggttgctgaatccctatgtaacactgattttctaacagaaaatcaggttttttcagaagttcaacatcagtatctaaatagattccgccgttatcatataccactttcaatcttgcataatccgaaacaaacgcccatgcttttgcttcatacgctgctttcataaacggatggctattcacatcaaaatttgactcatcccatcgtttgatttcgtaatccgggcaatatttttcccatgttttaatacaatctaaaacatctttcggtagtggttttccgccaaaccagcaataatgaatcattttgggtatcattttatttcctctactattttatgttatttaattcttttagctgggacacctgcaacaattgcatgggcttcaatgtcatttactactacagcattcgcaccaataacagcaccagatccaatatgaacaccttttgttatcgttacattggctccacaccaaacgtgatcttcaataattaccggccttgcagtaagttcacctgtcacgccattaccacctatcacatggtcatggtcgatgataacaatattattggcgaacatacaatgatttccaatcgttaccttctctgcacaggttatagagcaattatgattaaaaaacacatcgtcgccaatcgtcagttttccatcatttacagactttagatacaatgggcctcttgacattaaaaaccgtccaattgtaatagatccgttacctataacttcagtcttgaaagctcctctaatcgaattgacccattttacttgaagcttcccatgagcacaaactttggcacagaacatcttccatgcactcactaaaccaatgtaaaacttgtgaagtattttcataatactttcagccttaatccttcatatgttggcatattaatcccctttcataaactatatgtagcttaattgttaatttttttcttaatttttcttttatttcttttttagtaatttacactcataaatattctcaaccaattttgcggattctttaatatcataacgtgcaatttgctttacatgttgcaagcgatattgcttcctctgttcttccgtccttcgctgcattgagatcattgtatccgcccatgcctgtgggtcatcctctattgatttccagacgatatctccaaaatcaacttctcgtgttactttgtccgacacaatgcaaggcaatcctgaaatctgcgcttcgaggagtacaacaggtaatccctcaaacctggagggcaaagcaaagatatccatagcagaatataaactttcaggattcgtagtttctccccaaaagataattcgatctgcacagaccgtacgctgtgcttggccccttatattctccaaatccggcccatttcccgccaaaagcagcattgctttatcatctatatacgacagtttttcaaaggctcgaattagatattcttgatttttctgactgttaaatttgccaatatgtcctattactaaattatcgcccacctctagtttttttctaattaataatctagtctctgaatttaaagcaaatgcttcggtctcaaaggcattcggtataaccttaaatgctccgttgccatacatccactttcctgcaagttcgccacatgctaaataacaatttgacaccactttcaaaaacggttttagcgtctcatgtaacaacggatgtgagcaagttgtattatggctatgagaaattcgtacaggtacacctgctaacatagcggtaaaaagttctacggcgattaatgtactgctaccatgtacatgaacaatatctggtttctttttttttagaaaagaataaatagtcttataatacatgtatgcatttttctgtttttgtggcagcttacacaattctatgttattctcttgacatgctttttcatagccgatgtcataaggctctccagcggcaatcgctacctgaaatttatttttgtccaagtttgtagcataatttattacttgggatgttactccatttctatcaaagtatgaagttatcattactactttaaattttctcataaacaatctcttttcaaataatttctagctttagtaactccgtagagaaatcaatcggatgttctttcaaatactcaacagtctttttcctttgagaaggattgttatataaatactcaattttatctgccagatcttccgcactcagttcagcaacgtatccattgataccatcttgtatctgctctcttgctgaaggaatgtccgaagacagaattggcaaacataatgcacgtgcctctaccaaagtaattacatacccctcatggcgagatggttgaacatataaatcgcagtgcttcatatatgggtatggattttttttacgaccaagaaaaacaaattgattttccagacagtacttctctactaatttctttagctttttttcatctctgccaccaccaatagcataccatgcaaaattgattttcctcttcttcaaaatgcttgctgcttttatagcaatgtcatagcctttctgttctgtcaatcggccaacagttacaatattaaagctttccttgaacggtattatctcatcttgttcagactttcgcttgatttcttcaatatcaattacattataaaatacggcagccttatctttataatgcggatactctctacaaaatgcatcaacaactgcctgggacacgccataaatcttgtcatattcgcataagtatttttgaacgcttttcatccagtatggtttttcatcatgaagccatgttgcctttttctttgcttgtattttcgtcgccaagaaagctgtcacaaatgaaccatatccatagaagtcaatagcaatgtcataagtcttttcaaaaacgttcgtcacacaattcgaaataaaatcataatatgcaataaatgagttaaccgataatttcttcaatacctttgccggaaaagcatacattgaaaccagtgattttgcaaaagaactattaaaagtcaactgaacaatattaacattcttttttagacggtaagcatattcattgtccgaatcaagcaatacaagtgttatattgtaaagttcttcgggaagtgcattaattaattctatcaaagccacttcagatccgccgccacctagtgactttgccattattagtaattctttcatcagttttccccaccaaacaaatcgtctaccagtttttcaagtttctcattaaacttggcattattactactcataccatgtcccatgtcggcaacaatctgatcatagttcgttatgatatctcccagtgtattaatgtcctccactggaataatcgttcccattctctgagccacattccttgcaaactcaacctggtgattatttacatgctcgttgaactggtgctgacgcggcacaacaataggagtcttacctatttgtagtggcatgataaaacttgccggaccaccgtgagtgattacaatacgggcgtcggccacatttttcaccatctgctgatatggaatcaacttactccactgacagtatttcggctcgtatgtactaaatccagtctggataattacatcttcgtttataatgccgtctttctttaattcatctattttctgaatcagccgattaaatggctgctcatgtgttcctaccgtcacaaaaatcattttctcgtcatctacttagaatatacttccaaggttaaccgcctttggataaacctttttctgctcttcccactgcacaacaaacttgtccacaatggggtaaaccatctttcctgtcattgtcggtttatcaattcgatcaaaaacctcgatgtaaaccaactttgcgcccatcattttaccaatataaaaaaacgggaccgcaactgctgcaccgcaggaaataatcaagtctggcttttccttatgtaacacattccatgcaatcttggtattcttaataagagcctttagactccggtttgtcggataataacaaggatacattttttcaccttcgagccggcttcttgcatcctccttatcaaaagtgacccagaaatgatctttgtccttccaaaatggctttaacatatataaatgtgtcaggtgtcctcctgacgaaccaactaaacatactttcatgtcctctgatctccttcatcccaagattttttatgtacacatccgtatggataggatttcccaatgtgatggttttctatattgccccatcactttgcataatacttacaacagtcttaaaaataatcctcaaatcattcttaacactccactccctaatatactgggtatccagcttcaccacttcctcaaagtccgtgatattgcttctgccactcacctgccacaacccggtcagtcccggtctgaatgacattctggctctgtgatgtggttcatacttctcccactcatcgagtgttggtggtcttgtgcccacaaggctcatatctcccactagtatattgaagaaatgaagctcttgagcgctaatcttgctacataaagcataaaatctatatgctttgcccatcctctgcctttctttctgtacattctttccaaattctccttgtggtatcttttatttccctctatacctactacgggggaggtacctttgtcctccctcgaattattttagcctgttttgttttattcggttatttgtatctttttctgtatctaatcagggtttttcagtaatttattttcactcatttttaattctatgtcaatgaatattaggttttctttataatttttgacacattcgctaatcactatggtattacagcaccaatattatacattattatatatcatactgcttattttccctcaaacagcctctgcttcctctctatcatctcatcaatccttgcgatatactgccctacatccttgacattctcgcatctgtcaatgcggtgtgtgccatccggattcggtacgggccagacacgcttggtgcttgctcctgctccgcacgccacgatggtctgcttttcctccattatcaatatgttatatacgccggccttgccctttgccgcatagcctacgttttccatgttacctgccatgcccttctgtctgtagaggtagtatggctcaagccccatctgcttacagtaggctgcgcagagatccatatgctcctgggtgttgaccatctgcatatcactgtagcggtccttgaagatggtgagtcttgcagctcgctttactgcgagtgaatggatggtgacgttgtcaggtgccatctccttcaccagctccattgtgtgccttacatcatcgagtgtctcctcgggaagtcccatgatgagatccatgtttatgttgtcaaagcccagctcacgcgcgagcttgaagctttgtatcgtatcgtctaccgtgtggtgtcttcctattatatcaagtgtctgctgcttcatggtctgcggatttactgatatacggctgatgccgtttttctttagtgccatgagcttttctctcgtgatggaatccggtctgcctgcctccacggtaaattccagacagtcctttaaatcaaagctgcatttaatttttctgataagcctgtcaagctgggcagggcttagtgtggtcggtgtgccgcctcctatgtagatggagtttagctttttgtggtagaacttctgcgccgtgtagtctatctccttctcgagtgcgtcgaggtaatcgtccacgcggtttttccacacacccagcgggtatgaggtaaacgagcagtatgcgcaggtgctcgggcagaagggtatgcctatgtacaggctgtagccgttgtcatagtccaccttgtcgagcaatgccttctcacgctttgctatgcctattgagaggtcgattttctcatcgcttgcgaggtaggttttcttcagatagtcgtaggtttccttatcgctcatgccgtcctctatgcatttcatggctatcttggtcggtctgatgcctgagagtgtgccccacggaaggctctttcctgtgcccttttctatcatggaatacagggcgagcttgaggcggtttttggtttccttgcggtctgcactgtctacggatatttttgtgcagattctttttccggctctattcagcgtccactccactgcaatttcatcgcccacatagtctatcttaaatacctgtgaggcatccgcaaattcctttactccatcgtctgtcatctcgtggtgcgtgcaggctaagtttttcccctccacctcatcaggtgagcagctatagtacatctgcacatcctcctgcgggaagaactccttgagcagtgagtgcacatcatattcaaaatccggtttattaaatactactactatcataagtaagggttatacatcctctcgttttctatggttgttgtgtcgttgtggccagggtacacctctgtatgctcaggcagtgtcatgattttttccttcactgtgcgcacaaggtctgacatgctgccgcccttgaaatccgtacgtccgattgagccgcaaaacagcgagtctcctgtaaagatcacgtcctcatacgggaaataatagcagcagccgcccggtgtatgccccggtgtgtgaagcactactatgtgaaagcccgcaatatcaatttcctgcttatccttcaaaaatacatctgcataaaaggtctttgactggcccatcatgtagctgacattgagctgcgggtcatcgagtgtggctttgtctgcctcatggatatatatcttgatgccgtagcggtctgcgagcggctttgcatcagtggcatggtcaaagtgtccgtgtgtaagcagtattgctacaggctttgcgcctgattcgtccacttttttggcgagctgattagcacacgcgcccgggtctattattatcatttcctttgtctttatattggtgacaaagtagcagttggtctgcaccggtcccactacgaagtggtctatcttcatatttaccatatgagtgtactccttgtctgttatatgttatgcttcacgcaagaaccaccgggatttagccggtggtcctctctacgtctattacactttctatctgtcttagcttctccactagaacctttatctggtccctgcctctgatattgaaaaatacctcgattgtagcgatgccctgcttgctggtcttggactggataccactgatatttatttccttctcggtaaatatctttgtgatatctacgagcagtcccggcctgtcatgacagaatatctttaggtctgcctgatactcggcaccgttgtccatgagggctgtatcctgccactctgcttctatgagcctgtccttttctattttggacagattgatgatattcacgcagtctgtcctgtggatggagatgcctcggcctcttgtgacaaagcccacgatttcatctcccggaacaggattgcagcacttcgagaagtgcacagccacgtcatagagtccgtgtaccacaataccgctctttgacttgtgctcgggctgtgtgcctgctgccgtctgctgcttttctgcgatgctgccaagcacatctgcatctgtcaccggcaccacatgatccttcttgtactcgtcgtacatcctgttgactatctggctctccttgagtccgccgtggccaacggttgcaaggcatgagttccagtcgtggaagccgtatttgcggcgtattttctcctgatactcaggcttgtttatctcagcaaagttgatgccctttgccttggcataggctgctatcagctccttgccgtgctgtatattctcctccttgagctcacttctgaaccactggttgatcttgttcttggcctgtgtgctctttacgaccttgagccagtcacggcttggtcccttggagttctgtgaggtgattatctctatctggtcaccgtttttgatgacatagtctatcggcaccagcttgccgtttaccttggcaccgaccatcttgttgccgaccgcagagtgtatgctgtaggcaaagtctataggtgtggagccctttggcaggttctttacatcgccggacggtgtgaatgcaaatacattgtcggagaataaatttaaatcactctttaataaagtcataaactccttattatccgacatatcctgctgccactcgagtatctggcgcagccagctgagcttctcctcctctgtgacagtggtggtagtggcattgccgttgtttgcttccttgtacttccagtgcgctgcgataccgtactcagctgtacgatgcatctcataggtacgtatctgtatctcaaacggctgtccgctcggtcctatgagtgtcgtgtgaagcgactggtacatgttctgcttcggcatggcaatatagtccttgaaacggcccggtataggcttatacttctcatgtatgataccaagcactgcatagcagtccggtatcgtatccaccagaatcctgatggcaaagaggtcatatatctggtctatggtcttgtcctgattgaccatcttcttatatatactgaagaaatgctttgccctgccgtatatctcagccttgatgccggcatccgaaacatacttcttgacatcgtttaccaggccctgtatgtaagtgtcgcgctctgtctttcttagtgctaccttctctaccagatcgtaatatgcatccggatagaggtacttcatacaaagatcctcgagctctatctttatcttgctgataccaagtcgctgtgcgatagggcagtagatatcctgtgtctctctggcgatacgctgctgtgcctccttggactggtacttgagtgtacgcatattgtgcagtctgtctgccagctttatgagaatgaccctgatatccttcgccatggcgagaaacatcttgcgcagattctcagcctgcatctcaagcctgtccgcattcttatccttcggatccttggtgctgtctgtcagatgcaggtgctttaacttcgtgacaccatccaccagatgtgcgacatcgtctccaaactccgcacgcatctcatccatggtcatgatggtgtcctccagcacatcatggagcagtcctgctgcaattgtttccttatccagctcgagctcggcgagtactatggcaacacacagcggatgtatgatataaggctctcctgacttacgcgcctgccccttatgggcatcataagctaccctgtaggctttgtccacaaggctcgtgtcatccgacggatgatactttttgatttcctttttcagctcatcataaagctcctcagggctcgtaaaatcctttgttccccttataccgctggtatctgagcgaaatttgtccgctattttttctaattcttctgttgagtaatctgccaatagtctcacctcgattgtagtgtatctttagtagccattatattttatttctttaaaaattgcaatcttatgttgttagccgataaccatctttactccgccatacatgcctgctgagttgccgagtgtggcgagcttgatctctgtctcgcggcttgcatggaaagcatactctttatagtactttgctgctgtatcgatgatgatgctgcccgcctttgagaggcctccgcctacaacaaatacctcagggtccataacgcatgctactgctgccattgccttgccgagaagcttcatagactgctctactgccgcaatgcccgctgcatctcctgcctttgccgcatcgcatacatccttggctgtgaatcctgcatttaaatcaagctttgttgccacatccctgtgtgctgcaatgtatctctctgccactcttacgagaccgtttgctgatgcatactgctctaagcagcccttcttgccgcagccgcagcactctgactcatcatctaccataggcatatgtcctatctctccacctgctccgtttactccggctacgattctgccctcgcggatgattcctccgcctacacctgtgccgagtgtgatcatgactacatcctgatgaccctttccgccaccctgccacatctcaccgagtgcagctacgttggcatcgtttccggcctttaccttgatgccgccgcacagtactgagagtgactgtgccacgttgaacacgccccagccgaggttgacacatcttaatactgttccgtcatcctttacaggtcccggcactcccatacctacgccctcgatgtcacccatctcgataccatgcttctcgttattctccttgatggatgctgcgatatcaggcaggatgagctcgccggaattctctgtgcgtgtaggaatctcccatgtatcgacaagctttcctgttgtctcgaaaaagcccatctttacagttgttccacctatatctactccatatgcatatttcttcattttttcgtcctccaaatcgttaaactatgtttatattttattgcctaattgcatatttttcaatgtttttcattgttttttatgttttttctatatatagaagcgtttatatcatcatccatatgcccgctatttgtaaatccaagctttttggcaaggcgcaccgatgccgtatttttctcgtctatccgacagtaaagctcttcaaagtctgtgttttcgcgcgcgtagtctatgatgaagcggcatacctccgtggcatagccttggttccataattccggtgctatcatatagcccagttcatcatgctcaagccctgccctgcctatcagcttccctgtttccttggaaaatacaagccacatgccatactcgtaaaagccatacatgttctctatatatgctttctggtattcaagctctgtctcgtagtcgtaaagcggctctacaaagtctgtcatgccgggcttgtcatagagctcatagagcgcaggaaggtctgacagggacaactcacgtatcagacacctgtctgtctcgccgatgtcccacgggatgtgattataccgcctgcgtacccgctcaagatactcaatatcaagctccgcaaggctctcgactgcatagcgcgtgccgcactgcggttctcctactgatgctattccgagtgagtcggctatttgcttctgctgcctgtttgatactatccagatgtagttggcgggagctttcggtattcttagatttcccgtattagctttcgcggtgttatctgcatattcttgtatcgttgttttttggaagtcattaattgattcatcagccggtagcgcaacatacagtttttcttgcagctcttctgacatagatgccttgcctaccacatttctccactgcagcttgaatatctcgtcatgatagtaaaaagaggcaagttttgcgcttgcctcatcaataattattatcattaaactgtctccggctccggatagtccactccgaaggtctcaactgtaactgtcttcatgacctgagcctcaagtggtttgtccatgtagtctgtgcgcacctctgcgatcttgtttaccacatccatgccctcgattaccttaccgaatgccgcatactcgccgtcgagatgtggtgcatcctgatgcatgatgaagaactggctgcctgctgaatcaggtatcatggtacgtgccattgaaagtacaccggctgtgtgctttaagtcatttttgaagccgttgtgtgtgaactcgcccttgatttcatagcctgggccgcctgtgccgtttccgtcaggatctccgccctggagcatgaagcccttgattacacggtggaagcatactccgtcatagaagttgtgattgattaagctgataaagttgtttactgtgtttggtgcgatttccggataaagctccgccttgattacatcgccgttttccattgtgattgttacgattggattctgtgccattatttttctctctttcttttataatattatgaggcttggagaatatccatttttacttactcagagcctcgactaccttcggaaactccatgaagtgcgatgccttcaccagtatggtgtcgccctccttcacatatgaaagaagctcctgtgtcatggtttccctatcctcgaaatagtggatgtctacatcggatgatttctccgctgctccggctgcatattcctttgcaagctctcctgcggcaaaaagtgtatggatatgattctctccaactgcttcgcctacctcatggtgcagctttttctcatcgcttccaagctcacccatgtcgccaagcactgctattgtccttccctttgcatgtgaaagcacctcgatagaggatttcatggatacaggatttgcattgtagcagtcatctatcactgtcatgccgtgtgttttgataaaattggtacgccctgcgattgtctctgctttctcgattcctgactttatctcagctattgtgaggccaagctgcaatccgacagctgctgccgccatggcattgtatacattgtgctcacccgggatgtggatgtgtgcatcaaactcacccttcggagtgacaaaatgagccttcatgccgtcgaagcccaggttttcaatatttgtggtatatactgatttatgaacgcccgaagctgattccttgccatagtatatggcaggctttccatttaccgtctgcactgtggccagcttatcgtcatctgcattcagcactgcgaccgcatccggcatcatatgctcaaagcactctgtctttgctttaagcacaccatccctgtcgcccaaaaactccagatggcagtagccgatattagtgatgaccatgacatccgggcaagacatagtagaaagtctgtgcatctcgccaaaatcagatattcccatctcaagcaccgctacctgatggctttccctgattccgaaaatggtgagtggcaggcctatctcgttgttgaaattgcctgcggtcttgtggacgctgtatttctgctcaagaactgacgatatcatctccttggtgctggtcttgccgacacttccggtgatacccaccaccttgatatcaaggctttttctgtaaaatgccgcgagctttttcatggcatcggtggttgattcaacaagcacatatgggcctgccggatccttaagctcatgctcagagagcacaattgccgcc

SEQ ID NO: 986 - DNA, 24688 bp, unidentified
  source 1..24688: mol_type = unassigned DNA
ttatacaaccgtcacaacacctatttcaacttgattattgattctggggatgaatacggtgttgctcagacctgcgcagacaatcatttttgtgccgtcaaggtcaaattcgcctttgtcatatttcggaaaaagtccctgattcggagcgattactccgccgatgaacggcaattgaatctgtcctccgtgagtgtgaccgcagacgattaagtctatgtcggttttctttgcgtcctcggcaatgtattcgggctggtggtgcagaagaattgtgaaattgttctttgctttttcggcaaattcttcccacagcgttcttgacggaacatcgtcatcgggagtgtagaactcataataagggtagtcgctcattccgccgataagcacactcttgccgtttttggtgaattttatgtattcattatcgagcaatacagcgcctgttgaatttgtttcgcttttaaaatccgttccgaatttggcggcattgtcacgctcatggttgccgagacagcagtatgtgggtgcaatttttgaaagcttttcaagcacatctttcatcttcgttgtgtcgggatcgccacggttgaccatatctccgcaaactgcaataaaatcgggattttgttcctttacaagctctgcaaggtctgcgttcttttctccgtattccttgttgtgcaaatccgtgatgacaacaaatttcagctttgcatcgttcttagtattgtttacacagtaatttgtgattgcaattgtgttgtcacagtaaacgccccatattacgagagtcacaaacagcacaagtattattgctccgaggattatcgaaaattttttcattcaattcaccgctcatattaagtatggtattattttaggctcgttttgtgcggttgtcaacaaatgtgtgtcgaacaagtctgattattactgttccttgtgctttgattgtcggattttaagttgatttaggaattgctttgtttgacattccttttgcactgttgtataataaatcgtaattgtatttatatgttactcgggaaatttacacaaagttaaacagaagaggtatgggttatgaagaagattaatttgcgtaagatgtttctggctctcgcagatgtgtttattatcgttgtcagcggtattcttgcaaattatattctcttgcttgtcggttacataggtactgcttcaagcaaaggcttgttgagctatattgttattgatcttgtcatgtgtctgtttacgctttatataagcggaacatattcaaaattgtggcgatactttaacgcaaaggactatatggtgtgcggaactgccgtcttttcggggtttacgctcggctttgtaatctcgttgtttttgcagattccgcagagaaagattttttgtatagtacattttgcaatagcccttgtcggaattcttgcattccgttttgttttcagaagggcttttcttgaccttaccgaggcaggaagggcagagggcggagagcgcacccttattgtgggcgcaggcaatgccggcagaatgattgttcgtgaaattcacaatgcgaatgagcagaatgatgttaataacccttcaaaaagtatcattccggtatgctttgtcgatgatgatttgaaaaagctgaatcagaaaatcgaaggaatccccgttgtcggaacctgtcccgaaattgttaaaatatgtgatgaatatcgcatagacaatattattgttgcagttccgtcatgtgaggaagatgagaagaggaagattcttgactactgttccgcaacagagtgcaaaatcaagattatcccttatctcggtgagcttttgtttgatgacgggcatacacagcttatttcacaggcaaaggaaatcaagattgaggatcttctcggcagaaaaccaattgagtttgaccgaaaggagattcatgaccttatcaacggaaagatttgtcttgttacaggcggcggcggttcaatcggcagtgagcttgtaagacagattgcaaagaatgatccaaaacaaatcatcattgttgatatctacgaaaacaacgcatatgacattcagcaggaacttgtgcttgaatacggcacaaagcttaaccttgtaacgcttatttcatcggttcgtgattacgataaaatggagcttatcttcaagacatatcgccccgaactcgtattccacgctgccgctcacaagcatgttccgcttatggaaaccgttcccgaggaggctgtaaagaacaacatcttcggcacattcaatgttgcaacccttgcagaaaagtacaaggcaaagaagtttgttatgatttcaaccgacaaggctgttaatccgacaaatgttatgggcgcaacaaagcgtgcgtgtgagatgattattcagtacaaggcgcagcacagcaccgatactgaatttgtaacaacaagattcggtaatgttctcggctcaaacggctcggttattccgctgtttcgccgtgagattgaaaacggtgcgcccgttaccgtaacacatcccgatattatcagatattttatgactattcccgaggctgtttcgcttgttcttgaggcaggtgcaatggcaaagggcggtgagatttttgttcttgatatgggtgctcccgtcaagattacaacccttgccgagaatcttatcagaatgtacggtaaggttccgtacaaagatgttccgattattttcacgggacttcgtccgggtgaaaagctttttgaggagcttcttatggacgaagaaggtcttaagtcaacacagaacaagaaaattttcataggaaatcaaattaaaatagacgaaacagatatgctgtcaaagcttgaggttctcaaaaagaccgcagaaaacaatgacagtgaaaagacagttgaacttttggcagaacttgtacctactttttgccacaaggtcaatgattaaccgaaaaggagaaattttatgtgcggtattgtaggttatgtaggacctaaggattgcagtgaggtgcttgttaatgctctcacaaagcttgaatacagaggctatgactcggcaggtattgcggtttttgataacggggaaatcaagaccgtaaagaccaagggtaagcttcaggacttaaaggataagcttgcagaggtcggcactccgaaaggtcatgtcggcataggtcacacccgttgggcaacccacggcgagccttcggatgtaaactcacatccacacagcggtacaagggttacaatcgttcacaacggtattattgaaaactatatggaacttaaagacttcctcatctcaaagggaagaacttttttaagcgacacagatacagaggttgttgctcagctcctcgactataaatacaacggaaatcctcttgaaacaattgacagtgtaatggctgagcttaagggttcgtttgcactcggaattatgttcaaggatttccccgacagagtttttgcggttcgccgtgaaagtcctcttatcgtaggcgttgcagagggcgagtgctttattgcgtccgatgttcctgcaattcttcagtacacaagggattattatcttcttgaccatgatgaaatcgtaacactttcacctgacggtgtttcgttcgttgacgaacaccttgatccgattgaaaaggaacttcagacagctgactgggatatggaggctgccgaaaagagcggttatccgcactttatgattaaggaaatcaacgaacagcccgaggctatcagaacaacgattatgccgagaatcaaagagggacttccgttccttgaggaatgcggcatcacaacggaaacaatcaagaatttcaaaaatatcacaatcgttgcctgcggtactgccatgcatgcaggtatggtcggcaagtatgttattgaggatatcgcaagagttcccgtaaatgttgacattgcgtccgagttccgttacagaaatccgattgtaggcgagggcgaccttgtaatcatcatttcacagtcgggcgaaacagccgacagccttgccgcaatgcgtcttgcaaagcagaagggtgcaaaaactcttgcaattgtaaacgcaaagggcagttcaattgcccgtgaggcggatatgctcatctacacactcgcaggtcccgaaatttccgttccgtcaacaaaggcatacatcacacagctttccgttatgtatctctttgcctttgagcttgctcttgcaaaggaaacaatcagcacagccgagtgcaagcgacttgtttcggctcttacaaaaatgcccgaggcagttcagtatgtaattgacaactgcgaggaaatctgcaagttcgttgccacaaagcttgttgcaaccgacagcttgctttacataggcagaggtcttgactatgccctttcaatggagggttcgctcaagctcaaagaggtttcgtacattcactcagaaagctacgccgcaggcgagttaaagcacggcacaatttcgcttattgacgaggatgttccggttattgccgttgcaactcagacaggtattatccccaagacaatcagcaatgttgttgaggttaagtcaagaggagcgaaggttattcttgtttgtacagacgcctgtgcaagagaactcaaggacggtgttgcggattatgttatcgaaattccgcatacagacgagcttcttatgccgattacagcggttgttccgctccagattcttgcttattacacatcaatcaacagaggtattgatcccgataagccaaagaaccttgctaagtcggttactgtagaataaacggcggtcttgtatttaattgaaaattgaaaattgaaaatgtaaaatttcggttggcggtgtgccaccgcagtcaattcgagaagatagttagataaagaaattgcattgatgcccgatacggcattgatgcaatttttgttttatatgaaagtgaatgtttatttatataattttaatttgtacaaatctttgcgtggttatctgcaggcggataatatccgtacatacagttttgcaacaacttccgtatataccaaaatatacaaaaacagtcgggcgacaattttttgtattcttgcgaattgtcttctcgaccataattttccattttccattttcaattttcaattttatgcacgctcgggcgtaatatgttctttaatatcatactgtattcacgaatagggtgctcttgttttcaaatttcagcggtaaaaaccttgtatttttttgacagattatgtataattaattagatatacattctaaaaagcagtattgatgaatctaatttagtttcgggggaatatacggacatgatgaaaactgtttttaaaagagctgtaacgcttgcaatttgtgccgtaacggtattttgcggtatttttgcctgttcgggcgcaacaaaagattacgagattccgcagattgacgatatgacgctttcaatgcctgacggtatgagcgctgttacaagggacagtaaaagcacagataaatatttttctgttttcggtcttgattatgacacaacaatgaaaacctttcagaacggaaatatctatcttcagggtatggataatatgtcatcggttattctgaccgtgacaatgacaaaaaatgagagcagcgagaatgtcggcaactatgctcagctttcttcaagcgagctttcaaatatacgcaacaattttcttaattccgacgagtatcggagctgtactcccgaccaaaaagaaaaagctgtgtggcttgtgtttgacgcaactgctcagagcagtaagggcgatgtgaaaacctttgttgccaacacggtttatgacggtatgaacattaatatcacaatgcagagaacagagggtgatgttacaaccgttgactacgatactttttccaaaattgtatcttcgataaaattcagcgacctgccgttttcaaagggatttattccgtacataatcatcggcggcggtgttgttatccttattttgattgttctcatcataatttttgccgtgagaatcagaaagcataaaaaggctaagaagaataacgctattcttgaggagcttgcagtcaagtataaactcggtgaaaagggtacggactacgacattgacaattttgacgattctcccgaaaagcccgataaacgctcaaagaaaaagcagaaatatgcggaagaggttgaagaagaaccggctttgcagggcagaagatatgctcccgagccgataatcgaaaatatggaagaaccggaagaaattacaagtgagtattcaaactttggttatgacacggatgatgccaaggaaaaagaaattgacgagataatcaactccgcaaaggcttacaagagtgagcttgagcgtgaggcatataaaaacaactacggttacgaggaaaacagcacggaggacgaaaaaaaaaaggagcctaccgcagcagatacctcagagactgaacccgaaaaaattgacgaaaacgaaaaagataacgcagaaacacctgaaaaacacgaggacataagctcttcgtcaggtcctacactcgttatccccgaacccgaacacgatctttttgaaacaagcgagcctgacgatatcgaccgtgaggacgatgccgatgttgaagaaaccgaggaggtttccgaacaaaagcatccgcttgaaaaaaaggttgacaagtacgcaaacatcattttcggcagtgacgatcccgaggagaaaaccggggaagaggttgatgacgaggagcttgtaagggcaaaggctaagaaaaacaagtttgacagcggttatgacttttttgacgaagctcccaaaaagtcaatgggggttatcaaaagctcagatctcagagatgccgaggactttgatgttatcggcgaggttgaaaaaaaagcagaaaccgtaaagcagaacgctcttgaaaaagagaataataaagaaaccgagggtgaaccgaccgataaacggtcaacggaagaggttcttgccaatgtaggcaaaaacatcggtaacgctctcaggggctttgcaggcggagttaagaattttggcattcactgcggatatttctgcaagaatgtttcaataatgataaagcgtaagcgtgcgattgccaaacgcaaaaaggcagaggaagagagaagagagagagaaagacaaaaggcagagcgtgcaagaaagcgtgccgaaagaggcgaaagtgacggacttgttcaggttcacagcagaaccgaccgccgcccacagcagaatcaccgccctgcaaacagaaacaagagaagataatttcttttcttaacggaggaaaaacatggaaatgctaattaaaaacgcagtggttgtttcccctgccgacaagcttaatgaaaaaacagatattctcataaagaacggtgtgattgccgaaatcggcagcggcattacatcagacggagagattattgacgcagacggtctttgtgccgttccgggatttgttgatatgcatgtgcatcttcgtgatcccggtcagactcacaaagaggatattatcacgggatgcaaggcagctgccgcaggcggtgttacaagcctgcttgcaatgcctaacaccaatcccacaaccgacagccccgaaattgtaaagtatattcttgacaaggctaaagacgccgatagccgtgtttatgttgcggcaagcgttaccaaggggcttaaaagcgaagaacccacagacattgacgctgtgaaaagtgcaggtgcaatagcacttaccgatgacggcagacctgttgaaaacacaaagtatttgagtgacgcaatgaaaaaagctccaaagctcggcatgacaattgtcgcacattgcgaggacttgtttcttgccgacggcggtaaaattaacgagggcgaggtttcggaaaagctcggagtcaagggaatccctgccggtgccgaggactgcggaactgcaagagaaattgcacttgccgccgctcttaacgagcctattcatatctgccatgtcagcaccaaaacaagcgttgcacttatccgtgatgccaaaaggagaggtgttaaggtgaccgccgaaaccgctccgcattatgtttcgctcacggacagggagcttttaagaggtgacgctgattacagaatgaatccgcctctcagaactcaggctgatgttgacgagattatcagcgggctttgtgacggtacgcttgatgccatagcaaccgaccacgcaccgcacacacccgaggaaaaggctgattttgtaaaagcccccaacggctcaatcggcatggaaacctcgtttgcggtctgcaacacatacctggttaagacaggcagaatgacgctttcacagcttgttgagaagatgagcgttaatcctgcaaggattttgaaaatcaatgcaggcacactttcagtcggtgcaaatgccgatgttgttcttataaatcccgatgaagaatggacagttgatgctggtaaacttcacggcaaaagcaaaaacaccccgtttaaaggcagaaccctcacaggtaaagtcaaaaagacaatcctcggcggtaaggtagtttttgaggattgagcaaataaaacccgtaggggcggatattatccgcccgcaagtaatagtgcgaaattgttgttaaaacaaattatataaatgaaacaaagataatgatatactgtagcggcgaaccgtgttcgccaatcggttaaaatagcagtcaatgactgtcggtaaataaacagaaaatttatttaacataaaggagtaaaattatggcacagaaaggcgacctcctgtcggtaagacaggatatcagagtagtagacgcaacaatccgtgacggcggtctttgtaacgatttcagatttgacgacaaatttatcaaggctctttacaatgcaaatgttaaagccggtgttgattatatggaattcggctacaaggcatcaaaggaaatctttaacgaagaagatttcggtaagtggaaattctgtaacgatgcagatatcagaaaaattgtaggcgacaacaagacttctcttaaaatcgctgttatggctgatgtcggcagaacagattttaagaaggatattatcgcaaagaaggacagtccgattgacctcatcagaattgcaacatacatcaacgcaattcctgcggctgttgaaatgattgaggacgctgcaaagaagggctacgaaacaacaatcaatattatggctgtttcaaaggcaagaaccgaggatattacagcggctcttgaaactctcggcaaaactcccgtaaacgctttctacattgttgacagctacggcgcactctatcccgaggagtcaagacgacttgcagacctttactgctcaattgccgacaagtacggcaagtcggtaggtattcacgctcacaacaatcagcagcttgcttttgccaacacaattgaggctatgacccagggcgtcagctaccttgacgcaaccgttgacggcatgggcagaggcgcaggcaactgtgcgcttgaacttcttctcggttttctcaagaacccgaagtatcaggttgcgcctattctcaaaatcattgaggagtacacccacaagtttaaggctgagggcgttaagtggggttacgatattccgtaccttctcacaggtcagtacaacacacatccccgtcctgcaattcagttcgtaaaagaggacagacaggattattacaagttctcaaatgaactttatgatattatcaacagctaattaaatttgtagcggcgttcattgaacgccaatcgaaccgattgcaaaatcggttcgaccatacaaacgatttgaattaaagtaattaaccacgatataacaatacatttgttgtttattcgttttggtttcacaaccaaaacgattggcggtcattgaccgccgctacggttaagcaataacattgtttaaatcaaaatatgaacgaacaaattgtttttacattataaaaaatgaggagaatcactatggcatttgacagacttatcgaaaatattgtaaaaatgcagaatcctacggttgcaggtcttgaccctaagctcgactatgttcccgaatcaatcaaaacaaaatgctttgaaaagtatggcaagacgcttgagggtgcggctgctgcactttttgaattcaacaaggcgcttattgacgcactttatgatattgttcctgccgtaaagccacaggctgcatattatgaaatgtacggctggcagggtgttaaggctctttgtgacacaatcgcttatgcaaagtcaaagggtatgttcgttatcacagacggcaagcgtaacgatatcggcacaactatggaggcatatgctacggcacacctcggtcatacagatgttgcaggcgaaagtattgacgcattcggtgcagacgcactcacggtaaacggttacctcggaacagacggtatcaagccgcttgcaaaaatttgcgattcggacgacaagggcatttttgttcttgtaaaaacttcaaacccaagctcgggcgaacttcaggatatgaagcttgaaacaaatgagagcgtttatgagcatatgggcaagatgtgcgaaggctggggcgaagaccttatgggtaagcacggctattcggcagtaggtgcagttgtgggtgcaacatatcccgaacagctcggtgaaatgagagcaaaacttccgcacacattcttccttgttcccggttacggtgctcagggcggcggtgccgatgatgttaaaaacgcatttgacgaaaacggtcttggtgcaatcatcaactcaagccgcggcattatgtgcgcatggaaaaagcaggggcttacagaagatgactttgccgttgccgctcgtaaagaggctgagcgtatgagggatgaaatcgttggctgtatcggcaaaattaagcttggctgattcatttgcacaacagaatcacgaaatttttcgatttctatgctttagtgctatgaatttattgactttagcgtgctaaaagcgtataatttgaatgtatttatttttacaactatatttttaaattttctttaaaaagggagatatcagaaatggcaagagtatataatttttcggcaggtccttcaatgctgcctgagtctgtgcttaaaaaagcagcggcagaaatgctcgactacgaaggcagtggtcagagcgttatggaaatgtcacaccgctcaaaaatttacggtacaatcatcgagggtgcagaggctcttttgagagaggttatgaacattcctgacaactacaaggttcttttccttcagggcggtgcgtcaacacagtttgcggctatccctatgaaccttatgacaaagagcggtaaggctgattatgttattacaggtcagtgggctaaaaaggctcatgcagaggctgcccgttacggtcaggctaatgttgttgcttcatcggctgacaagaccttcacatacattccaaagcttgatccttcaacattcacaaaggatgctgactatttctacatttgcatgaacaacacaatttacggtactgtttatcacgagcttcccgacacaggtgatgttccgctcgttgcagatatttcttcctgtattctttcaagaccgattgatgtttcaaaattcggcgttctctatgcaggcgcacagaagaacatggctccggcaggtcttacggttgttatcgttcgtgaggatcttatcggcaacgctatggatatcactcctacaatgcttaactggaaaactcacgctgacaacggttcaatgttcaacacaccgccttgctacacaatctacattgcaaagcttgttcttgagtggattaagaacgaggttggcggtcttgataagatgtatgaaatcaacaagaagaaggctgaccttctctacggtttcctcgattcttcagagcttttcaagggtactgttgttcccgaggatcgttcgcttatgaatgttccgttcgttacaggtgacgctgaccttgacgctaaattcgttaaagaggctactgaaaacggtcttgttaatatcaagggtcatcgcacagtcggcggtatgagagcttcaatctacaacgctatgccttatgagggcgttgaaaaactcgttgagtttatgaagaagttcgaggctgaaaacaagtaattattgaatattatgatataacgggcgaacgctgttcgcctgttattgtaaattcttaaaataaaaaattaaaaaggattgattttgatgtataacattcttacattaaacaaaatcgccgctatcggcacaagccgtctcggtgataactataaatacggtgacgatgttcaaaaccctgacgcagttcttgtaagaagtgccgcaatgcacgatatggaatttgccgataaccttcttgcaattgcaagagcaggcgcaggcacaaacaacattccgaaggataagtgcagtgagcagggcattgttgttttcaatacaccgggtgctaacgcaaacgctgttaaggagcttgttatcgcaggacttcttatttcaaatcgtaaggttattgagggttatgaatgggcaaagactctcaagggcaacggtgcagctgtcggtaagatggttgaaaagggcaagagtcagttcgtcggccccgaaatcaagggtaagactctcggtgttatcggtcttggagcaatcggtattcttgttgcaaatgccgctgttgctctcggtatgaatgtaatcggctttgacccgtttatgtctgttggcaacgctctcaagcttgctcctacagttaagcttcaaaagagcgcagaagatgttatggtaaattgcgactacctcacaatccatgttccgcttactgacgacacaagagatatggttgatgccgatatgattgccaagatgaaagacggtgttcgtattctcaacttcagccgtgacggtcttgttaattcaacagcagttcttgaggctgttaagagcggcaaggttgccaagtatgttacagacttcggaacagacgatatcctcggtgaagagaatattatctgcctcccacacctcggcgcatcaactcccgaaagtgaagaaaattgtgctgttatggcttgtgatcaggttaaggagtacctcgagaatggtaacatcatcaactccgtaaactatcctgcaatttcacttgcaagaacaaatgctgacgatacccgtttctgcgttgctcacaagaatgttcccgagcttctcaagaaggttctcacacagatcagcggcaatgttgaaaatatgctttcaaagagccgtggcgactatgcttacacaattattgatgttgcaggcgccggtgcagatgaccttgcaaaaatcgcagcagttgacggcgtaatcagagttcgtgcaatctgatttcgattaaaatttaatcgttgaaaatttaatctatgaaaaaagtccgaacacgcaaaatgttcggactttttgtttgtgtgaatctaaatatgtagcggcgttcagtgaacgccaatcgaaacgattgcaaaatcggttcgatcgtatttcaaaatattggtgtatggttgatttggctttgcagccaaatcaaatggcgatcactgatcgccgctacgtatcgctatatattaaacttttaccagatggtatttttttgcattggcaattataaatgttacggaaattgcaacggcacacaattctgcaacgggcaatgccgaccatacaccgtttatgcctataaacatcggcaaaatcagcattgcggcacactcgaaaacaagcgttcttgcaactgaaattacggctgaaatcttgccgttgttgagtgcggtgaaaagtcccgatgcgaaaatattcattccgcacaacagataatttattgcaaaaattctgaatccgctgagtgcaatctgctgaattttttcgtcgcctgccgagaaaattccgacaagcggttctgcaaaaaattcagatgccgtaatcattgcaaccgaaattatcagcgtgatttttatgcataatttgaacagcttttgcagtttttcgtgattttgtgcgccgtagttaaagctgatgacgggtgaaactcccgaagtgaatccaaacgaaaccgcagtgaaaataaagtgaatgtacaaaatagcacttatagccgcaacgccttttgcgcctgcaaagtgcatcatctgaatgttgaacagcgctgttgtcacggctgttgaaagatttgtcacagcctctgacgagccgtttgccattgcaaagaggatttcactgaccttgaattcaggcttgccaaagtgcagagtctgctttttgttgaaaaagagcaaaagcggaattgcacccacagccattccgataatggtgccgagtcctgcaccgattattccaaaatcccacactgccataaaaagaatgtcaagcacaatgtttgtgcaacccgacagtatcgagaaaagaagcatgatatgtggcttgtccgctgttacaaggtacgattggttgagcatctgccagcacattacaaagccatacggaatcataacgctgccgtagtcaatgcagtaggggagaatcttttcgtttgagccgaacatcatatacataggttcggcaaaaattgtgaacagcacagcaatgataatagaaatggccgttgccgtgattgcaacaccggacataagtcggtttgcttcctcctgtttgccttctcccattttctttgcgattatggcatttgagcctgttgaaaacattaagcccacagccataaatacgagcgtgaacggatatacaatattgattgcggacaatgcgtcacttccgacacagttcgcaacaacgattccgtcaacaaccgtgtaaagtgacataaaaaccatcataagaacggttggcaaagtgaatttcagaatcgtttttgctttgataggttttgcataaattgatgttgccataaaacttccttaccctcaaatttatatttttcacagaccattcaaacgattgtatcataactttgtcgcaattacaactgatttgtctttttttgtaaaatatgctattatatacagacttaaaagcgaaaaaaggggcggttttatgtttaagggcgcagtttttgatatggacgggcttatgattgacagcgaaaggcttgtttattcaatctggcaggaaatgcttgatgaggacggcaaagagtttaatctcgacattttcaaaaagacaatcggacttcgcagtgaggattcctacgaatattacaagtcggtttacggcgatgattttgactatcctgcttacaaggcggagtcgagaatccgctattttaagcgtatcgaaaagaacggcgtgcctgtaaaaaaaggcttgtacgaaatttttgattatttaaaatcagtcggttgtaaaatttcgcttgcaacttcaacctcgtcacaaacggctttgaagattatgaagaaaatcaatctctatgataaatttgacgcattcgtgtgcggtgatgatgttaaaaacggcaaacccgatcccgaggtttttttgattgccgcaaagaagctcggacttgagccggtggactgcgttgcgtttgaggacagcattaacggcataaaatctgcacatgccgcaggtatgaccacagttatggtacccgatttgtcagagccgacagacgaaattaaaccgatgatagattttttgtgtacggatttaagcgaagcgatagaacgaatttcaaattgaaaatggaaaattgaaaattaatgtcgggcagacagtttgtaatgtaaaaaacatattatgcccgagcgtagcattgtaattgttcgcacaaatctgtatgggcggatattatccgccacaggcggcggtcgcaaggctacccctacgagtttacggttccggcatattgttggctcaattatccgagaaaattacaaataattacaaatggttacaatttacaaaaatacaattgagcagggctgattattatacacattttccacatggttttcaacaattgttgaaaaagaacggcaatgcctgttgagcgttgccacggttactgcggaaaagggaaaaatgaaaaaataatcattgaataacagcacgataatatgttatactttggtaaacaacaatttttacggaggacaaaatgaagaaaattataaataaaaagtcactcaagggtacgcttgctgttatgttgtgtgccgttatggcattttctgtctgtgcctgtgactttaactctgacacagaaccaaccaaaacggatgcacaaattcagtttgataaatattgtgacgatttgttttcggaagaacttgaggacgacgctcttaccgcacattttgacatttcaaatccgtcggactacggcttgaaatatgacgaggaggactataccctcggtcatgtgtccgatgaagatacaaaagaatcctttgatgaactgaaagaggcaaaaacggatttggaggagtttgaccgttcgggacttacttcttctcaaaagcagacatatgacacccttgaaagctactttgaaattcagctttcatatgatggtacaacagaattgcagagtatatttgcaccgcagtcgggaattgttgcaaacctctttaccaccctgtccgagtttactttctatgaaaaggatgataccgacctttaccttgctgttttgaaggacacaaaacgctatatggacgagtgcattgagttcacaaagaaacaggctgaggacggttactttatggctgaagatattgcacagcagtcaattgacgagtgcgaaaagcatattaagaatgacaagtccgtgcttgttgacgagtttgagtcgagaataaagtcacttggtcttagcgattccgagaaaaagactgttgtcgaaaccaacaaaaagtattttgaagaatactacattcctgctttgaaatcagcaaattcagcacttgaaagtctcaaaaaatcaggcaaaaacgaagaaggtctttgcggttacggcaaaatcggcaaaaagtattattcggcaattgtcaaagacaaaacaagcagcagcatgactcccgaggagcttaagtcataccttacaaacagctttacaaaggttggaatgagtatgagcaatgtttcgcaggatgacttgagcaaatttcaggactacaaacccgactttaaggacgccgatgaggtgcttgaatttttgattgagaatatcgaggaggactttccgactcccgttacaacctcttacacggcagattatatgagcgattccgcaaagagcgacaatgtgggagcgtactatgttcagggacgaattgacgatacaagcgttaatatcatcaaaatcaaccccgactttgcaaataagggtatgactcagatgtacacaactcttgcccacgaaggctatccgggtcatctttatcagtttaccgcatcaaatgcaaacaaggatatcccgaatgtacgcaagattttaagctttatcggcgctaccgagggttgggcgcagtatgcctcgaaatgtacgcttgattaccttgatacaagcgatggcattaagaagcttatctacgcaaatgatattctcggctacattctctattccatggtcgatgtcggtgtgaactataacggctgggattatgaaaaagtcaaggagtatatgtcaacggcactcggttcggctgacagcgagagcgttacagccgcaacaaaagaggcgtatgaccttgcccgttcaaatccgggttactttctcccctataccgtaggctacctcaagatgattgatatgcgtgaaacagccgaaagcgagcttggctcaagctttgacgcaaaggaatatcacacattcattatgaatctcggaatcacaagcattgatgtctacgaaaaagcccttgatatgtggcttgaaagcaagaagtaaatttttggtgattatcttgaatattttttacaggtatgatataattaactcattgatatgataaatctaaattggtatggatttttctaagatgtgattcttattttcgccatacactcattatgggtgtatggcgatttttattttacgcaaaggggtgttaatatgggcgttaaaacggaaaacaaaatggcttatgaacctgtcaacaaacttataattcaaatgtcggcaccgccgctgatttcaatgttctttcagtattcatacaaccttgttgacagtatgtttgttgcggggataaatgaacaggcacttgcggcagtatcgcttgcattcccgattacaacgcttatgaatgcgttgtccgtgtggataggtgtgggtgttaatgttttgattgcaggctatttgggacagaaaaatcagcaaaaggcaaattctgcagcggctctcggagtggtaatttcggtagttgtcggagtgctgataaatttcctttcgcttttcataataaatccctattattcggcttttacgcaaaacaaagagatttttgaatacggaattgcgtatatgagtgtctgcgtttttatgcagataccaaatatggtgcatattgtaattcaaaaaatacttcaggcaacaggcaatatgattgctccgatgtggtttcaaattgcaggtgttgtattcaattttgtgtttgaccctttgctaattttcggcataggtccgtttccgaaaatgggtgtggtcggagctgcagttgccacggttttaggctatgttgtttcaacaatcattgcgttgatacagctgtttcttacaaaacaaaaggttaagccggtgtttaaaaactgccttgaaccgaagatgataaagctgatattttcctacggattgccctcgtttgttatgaatgcgttgggagcattcaccgtgaattttgcaaatatgtttttggtgcgatattcggacacggcggttgcatttttcggagcatatttcaaggttcagcagttgatttttatgacggtgaacggactaattcaaggctgtttgcctataatgcggtttaattacagagcaaaagagtacggtcgccttaaacaagcaaataagagcggaacaattatcgcgactgttatgatgattgtcggtatgttcttggtgctgattttcccaaaagagatattgtttttgttttcggcatcggaagaaatgtgtgcttttggagtgccggcaatgagaattatgtcactcggatttgtgttcagcggcttttctgcaatgattgcaacctatgaacaggcaacagacagtattatgcccggcgttgtagttcaactgttgcgacagggcgtgctgttagtccccgtaatttggcttttaaacagcgctgttcaaatgacaggcatatggattgcgttcccaattacagaatttgtcacatttcttgttgctgttgtatttgcaaaaattaaaaatcattgaataaataaaaataacaaccgccaaaacccgatataatggattttggcggttgtttgttatttaaaatatgtttaattttaaattgtttttgcaaaaacattatcagatgattttgctctgaaaattgtttttacgagcaggaatgttatataaacataaagtgcggtgtagatgattgccgtaaatttaaggctaataagctcgtaggagaacagatagtagcaatagcctctcaggcttataagcgttgacacaatcggaatccacaaatgctttgcacttaccgccgcatagacaattaaaataatgtcaagcagataaccgtagcgttcgtgcattgacgaaaggaacatgatacaggtgaacacagtccacgctgttgtcaaaagaaaagtttcaaggtttttcaaatcaacctttttatagatgataatgcacatcataattccgagtacggcaattgtcagaaagaccgaaaactgcttgaacagataataatatgttatatcgtttccgtcacatatgagtgcgtaaaagttcggacagttcatctgaataagcttgccgtagtcggtctgttccgcatatattgtgatgatatcgataaacggtctacccataataattgcaggcaggcacattatcacatcaagtgcagggattataaagaaatgcagaatcgaaattttctttgtcgaaatccagtaataaagcagaacaggaatgatgaatacggtttgcagcttgaatgcaaacgcaatgccgatgaacacaaacgatgcaatcggcttgtctttgtgcaaaaacaggattgcaaggattataaacgaggtgtaaattgaatcgcactgtgcccaaaacgatgagttaaaaatcaccgttgccgaaagaagtacggctgagtaggtgagtatcgctttgagccgtcggttattctttgcaaacgaataaacaagcattgcggttgaaattgcaagtacaaagtcaaagattattgatacgattttgtacgcatacagagcatttagcggcaaaagagtcataagatagattatgacttgatacggaatgttgtagttacccacctgagttgcaagccccgtaaaatcattcagcttgattatgctccaccacgaatttaaaaagctgttgaaatcatcgctttgaaaatccattccgcaggctctgaggaaaattgcaataatcgttaccgcaacgagtaaaaataaaataatgtgtttttttataaagtcaatgactttgctttctgcttttgtcatagagaaaattcctgttcgggtttaaataaaaccgattttcttcataaccttgcccattgtgcggctgctgattttaagggcaatttcatcggcttttctgtaacagctttcaagatatgccttgtctgcaacaagcttttcgtagcgttcacgaatcggacgaagttcttcaacaactgcctcgcctacagctgtcttgaagtcgccgtagcccttgccgtcaaaatccttttcaatctgttcatatgaaagacctgtaactgcgctgtaaattgccataaggttatttacgccgtctttgccctctgcatagcgaacctttgcctcgctgtccgtaacggctctcttgaacttcttcattataacctcgggtgcatcaagaagatgtacacagccgttgacattttcatcggacttgctcatctttcttgtcgggtcctgaagactcataacccttgcaccgttttttggaatgaaaccgtccggaatcttgaacacattgccgtaaataccgttaaaacgctctgcaatgtttcttgtaatttcaatgtgctgtttctggtctgcaccgacaggcaccttgtcagcctgatagagaagaatgtcggcagccatgagtacgggatatgtgaaaagacctgcgttgatgttgtcggcgtgctttgcagacttgtccttgaactgcgtcattcttgaaagctcgccgaactgtgtgtaacagctgagcgcccatgcaagctctgcgtgagtgtgaacatgactctgaatgaagaaaaggcttttttcaacatcaataccgcaagccataattgaagcataagcgtcaattatattcttacgcataacggcaggagtctgtcttaccgtgattgtgtgcaaatctgcaagagcgtaaatgcagtcgtattcgttctgcattgtaacccagttgcgaaccgcaccgagatagtttccgagtgtaattgttccgctgggctgtattgcgctgaatacaacctctttttttgtctgattttccattattcccctccgtgattaaagactgtttgcatactcgccgaggattttgattcctctttcaagctgttcgtcagtcggtgttgaaaagtttattctgaaactgtgacaggtttcgttttcgtcagttaaaaatgcgttgcccggaactacgcaaacctttttgagaacgagttctttgcagaaattcggcatatcaatatcctcgggcaagtcacaccagatgaaaagaccgccgtcaattttatgatatgtgattttcggtgcgcagtatttgtcaagaagctccatgcagaagttcgctttctttgtgtagatttcacgaagctttgcaaggtgagcgttaaagtcgtactttgtgatgaattcatcgcatacatattgtgaccagatgtttgtatgtacatcgttgccctgtttgcacacaacaagcttttgaaaaatcggctttggtgcaatcgtgtaagcaacacgcatacccggtgaaattacctttgagaatgaaccggcatagattacaattccgtccgtatcaaagctttttatgttcggaacatattcaccgctgtaacgcaggtcgccgtacgggttgtcctcaatgatgagaacaccgtattttttggcaagctcataaactttcttacgcttttcaaggctcattgtaacacccgaaggattttgaaaattcggaattgtgtaaatgagctttgcgttcggattggcttttaaagcctcttcaagcttttctgtgctcataccgtcaggctcaacgggaacacctgcaagctttgcgttgtagcttctgaatgtgtttagcgaaccgatgaatgacggtgcctcgcagattacaacatcaccctcgtttacaagagcctttgagcataaatccataatctgttgtgcgcctgttgtgatgagaatgtcgtcattgtcggagcctgtgttatgctcctttttcatatattccgtaaggtgctttctcagcggagtgtaaccctccgaaacgctgtactgtaaaaccgaaataggatcttctgcaagaacctttgccgagatttccgcaatctcctttgagggaaatgcatcgggcgacgggtttcctgccgaaagcgacacaacgctcggatcggcggcatatttgaaaatttctctgatagcactcggcttcaggcttgaaaccctgtcggaaaacctgtattccataaaaatatctccttttaagatgataaggattttttaaaattccataccctgtaattctatcacgaattgcatatatgttcaagaaatttgactgtttttactgcgattttattcaaaaaatgtgtaatttattattttgcatttgtaaatgttaattcacggaaattgtattttttgtgctttttgtattgtttttgatgagtttctgttgtataatctaagtgataatgtccttacggtcagagcaaggcttgctttgattcaaacaggagtacactgcgagtaattaatacacttatataattcattgaattcaaattgaatttaaaaatcttcagtttgggagaataacactatgagcagaagaaacgattacgattattttgatcttgataatttcgatgacagcattgattcccgtgaatatcgtcgcagacagcaacagcgccgttctgcaagctatgccgcaagaccgtcatcacagcgtcccgccagaagacctgtaaaaagaagaaacaaaagaagaaccagaaacagaattattatcgttgtgagcgcattggtaattctgtttgttattatttttattataacttcaatttttaagggttgttcaaaggaagatgcccttgcaagcgttcccacgggaacagtgggcacaacggcgtctcccgacgaaaccgcaaaatcttcgaaagctaacaaagcagacgagctttctcctacatactttatgacaccgagcataaaggacgacaatacaaaaggaactctttcatacggcatttatgtgtggaacaaaataggctacgaattgttcagcagtgatgatgcaagagcgcagaactatgctcagacaatcaacggctttgcagacaagttcggcagttccgtaaaggtttatgatatgattgttcctaaccataccgaaatgggacttccgcaaagactcaaagacagcgacgctccgtcaacctcacaggctgacaacatcaaggcagcttatgcggctctttccgacaaggtaactccgattaactgctacaaccgtcttgcggaacataatacagattacatctactttaagagcgaccaccattggacaggccttggtgcttactatgcttacacagcatttgccgatacaaacgatttgcccgttctttcgcttgatgattgcaaggaacagaaaattgacggctttacaggctcgtttaccaactcggcagacggtcttgacagcgatacggtaagttattggaaattcccttataatgtaacaatggatatcacacaggcagacggttcttccgcaagctatgacagtccctactatgaagccgcagagggcggttcaaacacctacggtgtgtttattatgggtgataatgccctcacggttctgaaatcagcttcgaaaaatgcggcggcaggcaagaagattgccgttgtaaaggaaagctacggcaacgcttttgttccgtatctcaccaataactacgaagaagttcatgttatcgatttcagatatttcaaacataatcttgttgattactgcaaaaccaacgaaattaacgaggtgctttttatgaacggtgtaatgagtgccaacactcaggttcagcttgacagtatgagcggactttttaactga

SEQ ID NO: 987 - DNA, 22991 bp, unidentified
  source 1..22991: mol_type = unassigned DNA
  misc_difference 2783: note = a, c, g, or t
  misc_difference 2784: note = a, c, g, or t
  misc_difference 2785: note = a, c, g, or t
  misc_difference 2786: note = a, c, g, or t
  misc_difference 2787: note = a, c, g, or t
  misc_difference 2788: note = a, c, g, or t
  misc_difference 2789: note = a, c, g, or t
  misc_difference 2790: note = a, c, g, or t
  misc_difference 2791: note = a, c, g, or t
  misc_difference 2792: note = a, c, g, or t
gttgtatcctccgtaaaaacttatccccggtatggggtctgatgtggtcccagattggggacaggcttgcaattcaacagtatatcgcatagtatggcgttctgtcaagcatttttttcgctttccttcaaacttttttgtgaaaagattttcaactttttcaccattctgccgtggaaaactcttttgccacaagatattgtggccctgttttgcccatgccacaacggccgtgcaggggcttttcttatgtattataaattacattatagaaatatggacgcacagcgttttttgtggtatactaacctagtatcagcagcattgttgaaaactttaacggagtggatgttttatggattcttttaaggacgttttagaggccgcccaggcgtactgcaaaacgcagatggccgagccgacctataatctctatatcgatggactggagccgatcagctttgaggattccagccacatcaccctttcggtgcgcaacgacttcatctgcaagatcgtgacggaccgctaccttggcctgctcaaggaagccttcaagaccgtgctgggcttcgacgtggacatcacgctggtggtgcccagcacgccgccgcacgaggtggtgctggcccagcagtacgaggcgaaccccgcctccccgcagggcaactacgagttcacatttgaaaacttcatcaaaggcccttccaaccagtttgcgtttgctgctgcacaggcggttgcggccaatccctccggcgcatacaacccgctgttcatctacggcggctccggccttggcaagacccatctgctcacggccatccagaccgagatcaagcgcacccaccccgatttcgtcatcatgtacgttacctgcgagcagttcaccaatgagctgatcgccgccatccgcgccggcagcaccgaggacttccgcatgaagtaccgcgtggcagacctgctgctggtggacgatatccagttcatcgccggcaaggagtccacgcaggaggagttcttccacaccttcaactccctgcacgatgcccacaagcagatcgtcattgcctccgaccgcccggccaaggagatcaaaagtctggaagaacgtctgcgcacccgctttgagtggggcctgaccgccgatgtgcagccgccggattttgagacccgcgtggccatcgtcaagcgcaaggcagagcttttgcatctggacctgcccgaggatgtggccgagttcattgccaaccacctgaagaacaacatccgccagctggaaggcgctgtaaaaaaactgaacgcctactacatgctggagggcatccagccggtcatcagtgtggcccagaatgccatcaaggacatcctcaacgagacccagccggtgcccgtgaccatcgagaagatcatcggcgaggtgtcccgcaccttcaacgtctcccctgccgacatccgcggcaccaagcgcaacgccaacgttgcctctgcccgccgtgtggccatctacatcctgcgcgaggtcaccggcatgagcatggaagagatcggccgtgaattctccggccgtgaccactccaccatcgtctactccctcaagaccatggagcgtgacatgaagaacgaccagcacctgcgcgagaccgtgagcgacatcatcaagaacgtgaaggcctgaccgcagaaatcgtgcaaaagtcgtactcatttatgggtgaaaccccaaaatatggggagaaaacggaacaaaacggggaaaaagaacctatatcttgtggtaaaaacgcaaacctttccacactttccacagagttttcaacattcaacctccgttctccacatggtctgtggaaagaaagacctatcccaacctttccacgatccattcacaacacattcacaaccccgtggaaaccaaaacccccgcattccgacaaggcttttcggggttttccacaagttccccaccccctactacggttactacaacaagttcaataagatagaccggttctgaaactgttttcaaacacaaaacaacatcagaaacgaaaaaacaaaggagagaattcagtttgaacatcgtatgtgacaaagttctgctgagcgcagccatcgatggtgtgtccaaagccgtcaccatgcgttctgccatccctgtgctggaaggtatcctgctgaaagccgaaggcttccagctcaacctcactggttacgatctggaaatgggcatcgtgaccaccatcgaagccaatgtcaaggaagccggcgaggtggtgctgaatgcaaagctgctcagcagcatgatcagccggatgcccgccggtcaggtcagcatcctctctgccgagaacggcaagaccaccatccagagcggcgtagtccagttcgagatccagtccatgccggccaacgatttccccgagctgcccaataccggagcggaagagaccctgaccatcaagaccggcgtactgaaagatatgatcgatcgtacgttatatgctgtcagtcaggacgagaaaaagcccgctcacaccggtgagctgttcgagatcctgcccgacaagctgactgtagtggcactggacggctaccgtctggccatcgtggaacgcccggtgacggcggtaaaggatatccgcatcatcgtgcccagcaagaccatgaccgaggtcgcccacctgctgcccaacgacgacgaagagccggtgcacatcagcgccaaccgccgctatgtggtctagatcggaagagcggttcagcaggaatgccgagaccgnnnnnnnnnncccacccgccgctatgtggtctttatggccggcggctacaccatcatgagccgtctgatcgagggcgagttcctcaactaccgcaatgtgatccccgccgacagccgcacccgcgtgaccatcgataccaaggaattcatcgagaccatcgagcgtgcttcgctgattattacagagcgtttaaaaaatcctctccgcatctcctttacagagggtagagtcgtggtgcgctgccagaccaaccttggccgcgtggtggacgagttcaacgccgactgcgagggcgacgaagtggagatcggcttcaacaaccgctatctgctggatgcgctgcgcaacgcccgcaccgagaaggtccgcatggagatcagcggccctctgagcccggtcaaggtgctgcctgccgagggcaacgactttttgtatctggtgctgccggtgcgcttcaagaacgattaagagggcgaaattatgcagaaaattctcatccatacggaatttatcaagctggatgccctgctgaaatatgcaggcctgtgtgagaccggcggcgaagccaaggagctggtgcagggcggtgccgtgaaggtgaacggcgaggtgtgcaccatgcgcggcaagaagtgccgtgccggtgatgtgatcgagctggacggccagaccgtggaagtgggtcagggccagtaatgcgtctgctttcactggaagttgcgaattaccgcaatattgcggcagcgcagctggaaccgggccgggagctgaccgtgatctgcggcaacaacggtcagggcaaaacgaacctgctggaggccatttggctgctgaccggcggcaaaagcttccggggcggcaaggatgccgagcttgtgcgccgcggagaaacattcgcggtactggaggccgtcacccagcgcacccggcaggaggatcaggaaccggacgaaccggcaaatgtgcgcattacggtgggcacgccggatgcacagcgccccggccggtatgcatcggtcaacggctctccgcccaagcgggcggcgggccttgcgggcagctttccggctgtggtgttcgaccccgggcacctgagccttgtaaaaggtgcaccggaaggacggcggcggtttctggacgcggcgctgtgccagctgtaccccggataccttgccacctaccgtcgctatgtgcgggcattgcagcagaaaaacgcgcttctgcgtcattccgcaggcggcacggagcgcccgtgggcagaaaaatgcgccctgctggaagtgctgaacgtggagcttgccgcacagggcgaggccatccagaagcggcggcgggagtatctggccctgctcacaccgctggcctgcgccaactatgccgagctttcccacggggcagagcgcatggcggtgcggtatgccgcccagtttgagccgggcgggctttccgcacttttgaagcagcgccagaacgacgagctgcgcgccgggcagagcctgtgcggcatccaccgcgaggacgttgagctgctgctggacgaccagcccgcaaaggtgtttgcaagtcagggacagcagcgcagcgtggtgctgagcctgaaaatggccgaagcggctgccgctgcccggatcaccggagagcacccggtgctcctgctggacgatgtgctcagcgagctggacgagggccgcaagcagtatctgctcacccgcatgaaggaaaagcagaccttcgtgaccagctgcgatgataccgcgttcctgaaaacggacggcgaagtgtaccgcatgaacggcggtgtgctgagcaaagcatgaagaaatgatgcaaaagtacatgcagctgccggtgaataaacggcgctttatgcatgaactgccagaatgaggaaaatactgtatgtatattcatctgggccgtgactacgtgctgaatgaccgggacattatcggcatcttcaatctggaaaccaccaccatcaccccccggggccgggagtttctgaactacgcccagaagaacggcgcggtggtgagcctttcggacgagctgccccagagctatgttctggcagacggggccgtggtggacacggtgtatctttcggagctgtcgcctgctgccatgcggcgcagagccgaaaaaatgatcgagtaaaccagccaacaggcggagaatatgctctgcttttacgatagatcgaacaaaaatgcaaacattgaacaaaagggagaaaggaaatggcagaagaaatcattaccagcacaaatgccgaaaccgctaccgaccatgagtataatgccagcgagatccaggtcctgaagggtctggaggcggtgcgcaagcgcccgggcatgtatatcggctccaccggcgagcgcggcctgcatcatctggtctacgagatcgtggacaacgccatcgatgaagcactggccggctactgcgaccacatcgaggtcaagatcctgaaagacaacatcattcaggtcacggataacggccgcggcatccctgtggacattcaggccgacaccggcctgcccgccgtcaccgtcgtctacactatcctgcacgccggcggcaagttcggcggcgagaactccggctacaaggtggccggcggcctgcacggcgtgggcgcttcggtggtcaacgcctgctccgagtggctcaccgtcaacgtgcgccgcgacggccacgagtacgagcagaccttccgccgcggcgacccggacggcccgctcaagtgcatcggcaccgtagccgatggcgtcaccggcacccgggtcaccttcaagccggacccggagatgttccgggataccaccgtgtacgacttcgacacgctggaaaagcgcctgcgggaggaaagcttcctgaacgccggtgtcaagatcactctgaccgacgagcgtgagatgtatacccccgtgctggaggacggcaaggagggtgaaccctgctaccgcaccgaggtcatgtgctacgagggcggcatcaagagctttgtcacctatctgggtgaaaagcgcaagctggacgtgctgcaccccaacgtcatctacctcaagggccagaccgaccgcggcatggcagagatcgcactgcagtacaattccagctacaacgagctgctgctgagctttgccaacaacgtcaacaccccggacggcggcacccacgaggagggcttcaagaacagcctgacccgcgtgttcaacgattacggccgcagccacggcctgctgaaggataaggacgagaacctgtccggtgcggacgtgcgcgagggcctgatctgcgtgatctctgtcaagctgcaggaggcggagtttgagggccagaccaaggcaaagctgggtaataccgagatccgcacccttgtttccaacatggtctactccaagctgatggaattctttgaggagaaccccggcgtggcaaaggccatctttgaaaaggccacccaggccgcccgcgcccgtgccgctgccaaaaaggcccgcgaactggtgcgccgcaagagcgcattggagaccagccggatgcccggcaagctggcagactgccgcgaaaaagaccccagccgcaccgaaatcttcatcgtcgagggcgattctgcaggcggttccgcaaaaatgggccgtgattctgccattcaggccatcctgccgctgtggggcaagatgctgaacgtggaaaaggcccgcgccgataaaatttacggcaacgacaagctgatgcccgttgtgctggcactgggctgcggcattggtgacgagttcgatatctccaagctgcgctacgataaagtgttcatcatggccgatgccgatgtggatggctcccacatctgcaccctgatgctcaccttcttcttccgctatatgcgcccgctcatcgagcagggccatgtgtatgtggcccagccgcctctgttcaaggtgcagaagggcaacaccatcaagtacgcctacaacgacgccgaaatggccgtgctttcgcaggaaatgcccggcgcaaaggtgaaccgctataagggccttggtgagatgaaccccgaacagctgtgggagaccactatgaaccccgataaccgcgtgatcgtgcagatcaccattgacgatgcagaaaaggccgacgaagcctttaccatcctgatgggcgatcaggtggagccgcgccgccgctttatcgagaccaacgcccagtacgcaaagctggacgtgtaagcgtgctcgccctctccgtctttgcttcgcaaatccacctctcccaaagggagaggccttggcaaagagatgacgtttgcgtggactgccaagggctcccactttgaggaaagacttcccccgcgccgggggaagatgtcgcgcagcgacaaaagggggaatctggcgcgtaagcgcctgagagggcgaggctgttttccgagaaaaaaatccctttcctgtacaaaagagagggtcaaaccctacggaggaaacaatggaagaagattatgtgatgataccgggcagcggaaccaaaaagatcatccgcgatgtgaaaaaggaaatcgagaccgcattcctggactactccatgtcggtcatcgtgtcccgcgccctgcccgatgtgcgcgacggtttgaagcctgttcaccgccgcattctgtacaccatgcacgagcgcggcaacgaccccagccatccctaccgcaaatccgccgacaccgttggtgcggtgctgggctcctaccatccccacggcgacgcatcggtctacgatgccatggtccgtctggcacaggacttctctctgcgctatccgctggtggatggtcagggtaactttggttctgtggatggcgaccccccggctgcctaccgttacaccgaggcccgcatgagccgcatggcggtggagatgctgaccgatatcgagaaggacaccatcgactgggaccccaactttgacgagaccaagaaggaacccagcgtgctgccctgccgcttccccaacctgctggtcaacggcagtcagggcattgcagtcggcatggccaccaacatcccgccccacaacctgagcgaggtcattgacggctgcatcgcctatatcgacgatccggacatcgacctgcccggcctgatggaatacatcaagggcccggatttccccactgccggcatcatcatgggccgcagcggcatccgcgccgcctacgccaccggccggggcaagatcaccctgcggggccgcgccaccatcgaggagaccaagaacggccgcacccagatcatcattaccgagatcccgtatatggtcaacaaggcccgcctcatcgagaacatggccgaccttgtcaaggagaaacgcattgagggcatcaccggcctgaacgatgagaccaaccgcaagggcatgcgcatcgtggtggacatccgcaaggatgccaacgcacaggtcatcctgaaccagctgtaccagtacacccagctgcaggataccgtgggcgttatcatgctggccatcgaccacaaggtgccgaaagtcctcaccctgaagcagatgcttcagaaatacgtggaatttcaggacgaggtggtgcgccgccgcacccagtacgacctgaaaaaggccaaggagcgcgcccacattctggaaggcctgaagaaggccaccgacatcgtggacgagctgatcgccaccatccgcgcctgcaagggcggcatggcagaggccaaggctgccatcatggagcagttcggctttgacgacccgcaggcagatgccatcgtcaagctgcagctgggccgtctggcaggccttgagatcctgaagattgaggaagagcttgccagcctgcaggccaagatcgagaactgggaagccattctggccgacgatgcccgggtgcttgccatcgtcaaggaagagctgctggaaatgaagaagcgcttcggcgacgagcgccgcaccgagatccagtccgtgaccggtgaggtggatatcgaggatctgatcgccgaggagcagtgtgtctacaccctgaccgaggccggttatatcaagcgtcagctcaaggccacctatcaggcacagcgccgcggcggacgcggcatctccggcatgacccgcaaggaagaggacatcgtgcaggagatgttcgtaggctccacccacgactatgtgctctttgttaccgaccggggccgtctgttccgcatcaagggctacaccattgccgagggcagccgcaccagcaagggcagcaacatcgtcaacctgctgcagctggccgagggcgaaaaggtcaccaacatgatctgccagtcgaaggaagccgacactgagggcggctttgtgaccatggtcacgaagcagggcctcatcaagcgcaccccgctggaacagtatgctaacatccgtaagtccggcctgatcggcattgccctgaacgagggcgatgcactggcatggacccgcctgacctccggccacgatatgctcatcgttgccacccgcaacggtcaggccatccgcttcaacgaagccgatgcacgtcccatgggccgcagcggccacggcgtgcgcgccatccgtctggccgagggcgatgaagttgtgggcgtgtgcatctgccgcgagggcggcacggtgctcaccgtcaccgagaacggcaagggccgccggtcggacatcgacacctaccgcatcaccgcccgcggcggcaagggcatccgcaactacgatgccgccaaggataaggtggctgcggtcaagatcgtggacgatgtggatgatgtgctgctgagcagtcaggagggcatcatcatccgtctgcacgccaacgagatcccgctgcagagccgctacggctccggcgtgcgggtgatgcgcttgggtgagaacgataaggtgatggtacttgcccgcaccgaccacgacgacgaggcccagaccgagcagatcgacacctccgatgccgatgcagagccgactgccgagcagcttgcagccatggaagctgcagatgctgccgccgctgcagaagccccggaagcagacgataagggcgaagagtaaaccttgaaaacacaataagatttgaaagaagccgccgcgcagagatttctgcacggcggcttcttttcaaatccatccaaaccatgtataatagaaatagcgtgtgaggaataaaaataaacacagaaagtggtttaaggaacatgacagagcaaaaaaaatccccggagatcagcatcatcgtgccggtgtataaggtggaaaaatacctgaacgaatgcattgattccattctggcacagacctttacggattttgagctgatcctggtggacgatggctccccggacaactgccctgccctgtgtgatgcagcggcggaaaaagacagccgcgtgcgggtgatccataaaatcaacggaggtgtaagcacagctcgcaatgcgggtttggcagctgcacagggaaattggatcggctttgtggacccggatgactttgtagacaagacttactacgaaaaaatgctgcgggcagcaaagcaggcaggtgctgaacttgcagtctgcaacgaagtttttatggaagaggatggaagtctttgtgattatcaggaacagcctttacgtacagaagtgctttcccgtgaggaagcaatacaccgcatccgccttacgccgttgattcaggcagcaacaagactgcatcggagagatgtgctggaaggaatcgtttttcctgtgggcaaaaactatgaagatgcatttaccacaccggaaatcattgaacatgcaacagctgtggcttgtataaaggaaaaactgtaccattaccggctgcatccggcaagcatcatgcatggaaaggtcaccttgaaaaatctggatgagatcgatgcaaactacggccttcttgcttgtgcactcaagtatggaaaaaaagacacagcattcctgcagtatgtactgatgaaacgcatgctccgaaacacaaaaaaaaatctgccacccaaacagagaaacagtgaacgggttcagcaggcggaagcgtgcttgaaaaaagcaggcagagaggttcgtcaacagggggcctgtaccctgcgcaacgcagcagaaaccgcactctgcattgcaaacccgcagttctacttcaacttcaagtaccggaaataaaactgaattccgaatgggagaaatactgtgagtgaaagaacagaaagtggaaaaccggagattagcatcatcgtgccagtgtatcaggtggaaaaatatctgagtgagtgtattgattccatcctcgctcagacctttacagattttgaactgatccttgtggacgatggctcaccggacaactgccctgccctgtgcgatgcagcagcaaaaagggacagccgcgtgcgggtgatccataagcaaaacggcggtgtaagcacagcccgcaatgcgggtctggatgcagcacagggaaattggatcgcatttgtggattcggatgatacggtggaaccggagtatctggaaaaaatgcataaggcagtgctggaaacgggtgcagattttgcaatctgcagcagtcagtgtattgatgaaacgggcaaaacgcttgcaggcggggaacaccgacttttgaacgagtttttgccgcaggaggaagttctgcgccggatggtggtgtcggattttcaggttccgtggaataagctttatcgccgaaaactgctggaaaatctgcgctatccagaaaacaaggcgtttgaagatacctgtctcatgccggtcatttacgcaagagcggcttctgcctgcggtgtatgggattttttatacaattaccgcatcgttaccggcagtgccatgcaccgcaagactaccttgaaaacactggactgggtggaagcatggtaccgcctgtttgatgtgctgtaccaaaacggcatccgagatgctttgtgtgcagcctatcgcccgattttgactgccgtgtgggacatctggctgcacctgacaccggaagagcgcaaaagcccccggatgaaggaagcctttgcgtatgagcgcacagcccgccatcggctgatgcaagcccgcggcgtaacactaaaaaatttgtgggcggcagtggtctgcgctgcatcggcctgcagttatctggatctatgccgcaaaagggcggaaagacggcagaaaacgacctgaagcaatgaggagtttattgtgcaggaacaacataaaaaacagccggagatcagcatcatcgtgccggtatataagacagagcgtttcctgagcgcctgcatctcttccatccttgcccagaccttcacggattttgagctgatcctggtggacgatggctctccggacagctgccctgctttgtgcgatgccgcagcagcaaaggacagccgcatccgggtcatccaccagaagaatcgtggcctgagcggagcacgcaatgccgggctggacgcggcagagggcgaatggatcgcctttgtggattcagacgacaccatcatgccggacttctgcgcaaagctttaccatgcggcgcaggaggccggtgcacagatggccgtgtgcaattaccggcaggtggacgaagccctgacccccattcgggagcagtatctgcatgtgcggcgggaggtgctgaccccggagcaggcgttggagcacagcacccttctgccctacatggtggtgtggaacaagctgtaccaccgcagcatttttgcgcagctgcgctttgcagagggcaagctgaacgaggacaccctgctgatcgcctacgcctacgaaaaagcggacagaatcgcaaatatcccggatgcgctgtacctttaccgcaaggtggcgggcagcattgtcaacagcaaagtcaccctgcgcaatctcgaccgtgtggaagcaaactataccgtgtttgagtgcgtccgccgccatggcatcacgggttcgctgtgtgagctgtactgggcactgctgcactccctgatcgatgtgggaatgcacctgaccgccgaagagcgccggagtgcccggatgcagcaggcgcgggagtacgagcgctgcgcccgccgggccttgcgtcaggaacatgctgttaccctgagagcactgggcaacaccctgtgttttattatttcacaggactggtattttgcccgccgatggaaaaataccgtgtaaccgcgcaggtttgtctggacttccctgcaaagatatgctacaatggcaaaacaatcacaaatacccgtgggggagtagcaggcgcttttgcagggcgcagcaagtcaacataatgaccgttggttccggtctggcttgctttcatttgcgagactcatgtgtttttggcgcatagaacagcgcccgtgcacatggagttggtttcaaaaaaatcacccggtcccggacgtacatgtgcgcccgggaccgggttttgtattgcccgatattctggtcagattcaggaggcagacaatatggaatggagttttgtatttttcctcaacagtgccctgctgggcgtgggccttgcaatggatgcgttctcggtgtccatggcaaacggcctgcacgacccccgcatgagcaggggaaccatgtgcaggatcgcgggcacctttgccctttttcaggccatgatgcccatgacaggctgggtgtgcgtgcacaccattgtggagctgttctcttcgtttgaaaagttcatcccgtggatcgcactggcactgctgggctatattggcggcaaaatgcttgtggatggcatcaagggcgaagaggccgaagaagcagcagagctgagtgctggtgcactgctcatgcagggcgtggctaccagcattgatgcgctttcggtgggcttcaccatttcggaatacggctggctgatggcacttgcggcatcactcatcattgcggtggtcaccttctttatctgcatggcgggcctgcgcatcggcaaaaagtttggcaccaagctctccggcaaggcatccattctgggcggcatcatcctcattggcattggtctggaaatttttatttccggggtgttctgaaattcagacagcataaaacaaaagggcacggcgctgcaatgcgctgtgcccttttgttttataaaatgttccacatagaacaattacttttccggctcaaaataatcggcatattcctcggtcatcttggagccaagccgccggatgccgccgtacaggtgccgttccaccaacggttcaaaggcggcaaggtcgcaccgctcgatggcgttcatcaggttgcggtggtctgcaatcacctcggcaaggccgccggtggtcatggtgtccagcatccggaagcggctgtagtcggcgtgggcgttctgcagggtgctccacaggtacattttatccatggcggcaaaccatgtcccgtgcagggcacggtcggcttcgtacagcttgttgtaatccgggctctccatggccgcaagggcctcgtaggcttccacccgcctgcggatcaacgcccgctgctccggggtgcaccggggcgaaaaatcccgcaatacgcgggcttccacggcggtgcgctcgtagatcagctcgtccacgatgcggcggttcagccgggtaacggtggtgcccttgtaaggcacgatctttaccagcccgttttcctgcagcttctgcagcaccacccggatcagggtgcgcggtgcgccaaagcgggcacagagcggattttcgctcagcgaagagccggggcggatggtcaggtcaatgatttcccgctccagcacagcatagatctcagcatcagttttgtattgttccatacctctcacctaatgaaaatgatgtattcctttagcgggctcgccctctcagtcaaagcctgtcggcttcgccagctctcccaaagggagagcctttggcagtgcacgcggactgtatctctatgccaaggcctctccctttgggagaggtgtcaccgcaggtgacggagagggctaggatgctgaccgtatacaacaatcttattctaaaaactctttccacagtgcggcgtccggcagcggcagcataaatgccatgggctttccggtctccgggtgcaaaaactgcaggccgcagctctgcagggcaatgctgccttttacgcggcttccgtatttgccgtctccggccagcggatgcttccgggatgcaaactgcacccggatctgatgggtgcggccggtgtgcagcgtgatctcagcaaggctcatgtctcctgccgttttcacgatgcggtatttcagcacggcttcccgcacgcccttgcgggggcggctgaccgggaacacccggccccggcggctgtccttgaacagccagtcccgcagggtgccttcggcgggcagtgcttcgtccggcccgcctgcaatgacggcgcggtactgcttgatgaactgcggctcttctgccctgccctcggcccggccgtcctgcacagcgtaggcgttctggctctgggtgatctgacggctgagtgcggccgcagccccgggcgttctggcaaacaccatcaggccggaaacgccggtgtccaaccggtgcaccacgcctacaaaggcatccggctggccccacagctgccgcagggctgcgggcacgccctcttcgctggaaagtccggcgggcttgtccagcaccacaagggcggcatcttcgtacaggatgttcacagcctgccctcggcgatcagggccttgagcttcaggataccggcaatggtcttgccgtcccggatctcgccgctcatgaccatctcataagctttatccagcggcacacggtcaggggtcaggaattcatcggcatccagatgcatctgggtcttgtgcaggccggtggcgacccatgtatagatcacttcggtgtcatagcctacggtggggaaaaactggcccagagagatataattgtccgcggtcaggccgcactcctcgcccagctccctcttggcggcttcaaaggggtcctcacccttttccagcttgccggcaggcagctcccacagctcctgctgcatggcgtagcggaactggcgcaccatgcagatggtgccgtcctcaaaatagggcaggatgcacgcaccgccgtggtgatgcaccacttcgcgttcggcggtcttgccgttttccagcagagcagtgtcttttgtcagggtgatcacccggccctcgaagagcacctcactggtgagtgttttttcgtaatgcacggtcttctccattttattaccctctttgcccggcacagcgccggttttctatggcttcagtttacggcaaaatgaggtttgttgtcaataaagatgtgataaatacaagggagagtgaaccctctcaggctcactgcgttcgccagctcccccgaaagggggagctttttgtatcttccggtcagcacaaataaagctccccctttgggggagctggcacggcgcaagccgtgactgagagggttccctcccctttttgcgaaaaaaattacaggatctggcaaagcaggcaggccaaaaccggaaaatccgcgccagtgctcactttaacgaactaaagacgtacaaaagcgctaaaaaaatttctttatttttggtgcgtttgttgagcggtttgcgtttactttatgggcggaatttgctattatagtatacaagcaatagtgcctttatggggttctccggtcccatgtggggcatattgccccgcgcaaaaggtaccaaattctgaataatggaggaagaaaaatgcctagagcaaagcaaactatggatggcaataccgctgccgcccatgtagcgtatgcctacacggacgtggctgccatctaccccattaccccgtcttctccgatggctgactctgtggaccagtggtccgcagctggccagaagaacatcttcggcaatcaggtcaaggtcgtcgagatggaatctgaggccggcgctgctggcgctgtgcacggctctctgggtgcaggtgctgttaccaccaccttcaccgcttctcagggcctgctgctgatgatccccaacatgtacaagatcgctgctgagcagctgccctgcgtgttcgatgtttctgcacgtaccgttgctacccagtccctgaacatcttcggtgatcacagcgacgtcatggcatgccgccagaccggctttgcaatgctggtcgagagcagcgtgcaggaagtcatggatctgtcccctgtcgcacatctgtgcgccatcgagggcaaggttcccttcctgaacttcttcgatggcttccgtacttctcatgagtaccagaagatcgagaagtgggattacgccgatctgaaggaaatgtgcaacatggaggctgtggaggagttccgtaagaaggctctgaaccccgaacaccccaagatgcgcggctcccacgagaacggcgacgtgttcttccagcatcgtgaggcatgcaacagcgtttacaacgctctgcctgctgttgttgagaagtacatggccaagatcaacgcaaagctgggcaccaactacgatctgttcaactactacggcgcacccgatgctgaccgtgtgatcgtggctatgggctccatctgcgatgttgctgatgaggtcatcgactacctgaacgccaagggcgagaaggtcggtatcgtcaaggtccgcctgtaccgtccctgggtctccgcttccctgctgaaggtcctgcccaagaccgccaagaaggtggctgtgctggatcgcaccaaggagcccggctctctgggcgagcccctgtacctggatgttgccgctaccctgcgtgaggctggcctgaacgatgtcgttctgaccggcggccgttacggtctgggcagcaaggataccccgccgtcctccatctttgctctgttcaaggagctggagaaggatcagcccaaggagcgcttcactctgggtatcaccgatgacgtcaccttcctgtctctgccggaagtcaagcccgctcccatcaccgcagctgctggcaccaaggagtgcaagttctggggtctgggcggcgacggtactgtcggtgctaacaagaactccgtcaagatcatcggcgaccataccgacaagtatgttcaggcatacttccagtatgactccaagaagaccggcggcgtgaccatcagccatctgcgtttcggcgacaagcccatccgcagcccctactacatcaaccaggctgacttcgtggcctgccacaaccccgcttacatccacatgggcatgaagatggtccaggatgtcaagcccggcggcgtgttcatgatcaactgccagtggtccgatgaggagctgggccagcacctgaacgccgaggcaaagaagtatatcgctgacaacaacatccagctgtataccatcaatgcaatcgataaggctatcgagatcggcatgggcaagcgcaccaacaccatcctgcagtctgcattcttcaagctggctgacgtcatgcccatcgaggatgccgtcaacttcatgaagcaggcagctcagaagagctacggcaagaagggccaggacgtcgttgagatgaactggaaggctatcgatgcaggcgttgacgccatccacaaggtggacgtgcccgcatcctggtccaaccccgaggctgatcccgcacccaaggctctcaccggccgtccggagctggtcaagcagatccgcgatgtcatggagcccattgcccgtatggacggcgacagcctgcctgtctcttccttcgtggcaaatgcaaacggcgagtgggagcagggcgcttctgcatacgagaagcgcggcaccgctgtcaacgtccccgaatgggatgctgcaaagtgcgttggctgtaaccagtgtgcattcgtctgctctcatgctaccatccgtcccttccagctgaccgccgacgagctggcagctgctcctgcacagaccaagagccgcgacaacaagcccgcaaacgagtacaagtttgttatggctgtgtctcctctggactgcatgggctgcggcgagtgcgtcaccgtctgccccaccaaggctatcaccatggttcctcaggacagccaggccgatcagcaggcagtctttgactactgcgtggccaacatctccaagaaggctaccaagatggccgatgacaccgttatgggctctcagttcaaccagcccctgctggagttctctggctcctgcgcaggctgtgccgagacctcttacgctcgcctgatcactcagctgttcggcgagaagatgtacatctccaacgctaccggctgctcctccatctggggcggcaccgcttccatctctccgtacaccgtcaacaaggacagcggccatggtcctgcatggtgcaactccctgttcgaggataacgcagagcatggtctgggcctgtacatcggccagaagaccgtccgcgagaacctgatcaaggagatcgcagaggttgctggttccgacaaggcttctgctgagctgaaggctgcctttgagaagttcctggagaccaagaacaacaccaaggccaacgacgagcccgcaaaggccctgatcgctgagctggagaaggctgctgctgccggctgcgagaagtctgcagagatcctgaagagcaagcagttcatcgccaagaagtccgtctggatcttcggcggcgacggctgggcatacgacatcggcttcggtggtctggaccacgttctggcttccggcgaggatgtcaacgtgatggtcttcgatactgagatgtactccaacaccggtggacaggcatccaaggcttccaacattggtgaagtctgccagttcgctgctgctggtaaggaaatcagcaagaagagcctgtccgagatcgctatgacctacggttacatctatgttgctcagatcgcactgggtgctaacccggctcaggctgtcaaggccatcgctgaggctgaggcttaccccggcccgtctctgatcatcggctacgctccctgcgagctgcacggtgtcaagggcggcatgaccaactgccagaacgagatgaagaaggcagttgaggccggttactggaacctgttcaccttcaacccggcaaacaaggctcagggcaagaatccgttcaccctgacctccaaggctgtggataacgagaagtatcaggcactgctggctaacgagacccgttacagccgcctgactcgtgcattccccgaccgtgctaaggagctgttcgcacgcaaccaggaagttgcaaacgaccgctacgagcacctgacccgtctggtcgacctgtacaagtaagcattcttctgcgctttggatgcagatatttgcggcaccttagccccacaatgcaagagggcggctgccccgtaccggcggttactgcgcaatgcagcggtacgaagcggagaaacgcatccatccatgcaggtgatgtgctgaagtacagcattcgccatacgagttctatctgatttcacttcccgggcggtgttttgttccgtgcgaagcaccgcagcgggatatgagataccaaagcgcccgcgagggtccttgaaagcacaccccgcgtgtgtcaggagcataaggtctgcttgcagataccttgctccgcctgctgcataagacctgctttgcagggatcttgccgcagtaaaaaacgtatatcgtttttagcgccccgttcaccgcaaggtgatcggggcgtatttttgtgcacggaaatcgaacgtcaaacgaaaagtttatcacaaaatcttccaaaagataccattccctttttacagtttcttcatagcttcttaacgaattcaattgtgaaagctgttatacttttgccatgggaagcggggccgcaaccgcttacccaagtaacatgattcctcctcacaccaaggcaatatccaagcaaaacaccctttttcgtgtgccgcaacacggaagagggtgttttgttttgcaaaattctggtaaatcggtggtttagggttgaccccgtttttttgcggcgctataataaaaatgaatatgaaaacttggaggtgaacgcaggaaaatggacccggatcatagtcgaagtagaaccaccggcgcggtggatcagaaaacaaaaacaactgcgttttccccaaccgttcgcctccttcgctgagccttgcggaaaagcaccgcttcaacggtgcatctttccgcaaaacagagcagaggaaggcgcggctttgtgtgcgcagaatgcggcgtttgcggcattccggcaggcaaggcggcgcgttttttgtttcccgatctgctgcgtcctccggatacaggagctgctcctgttccgtaaaaactgaggaggtacgcccaatggatatggaagaaaaaaagctgacggctgatgctgcggagcaggccctgccggtgcaggagctgcctgctgatatccccgccgaggtccgccagaagctggctgaagatctgaatgaggaagctactgaagacctcaagcaggacatgcgcgaggccgaaaaagaggaagccaacgacgaagaggtcaaggccaaccctgagatgctcaccaagagccgcctgctcaagctgctcatcaagaagcagtacgtcaagctgcgcgaagtgaccgaggaagagcagcctgccgaccttgctgagctgctggaagagctggacgaaaacaaccgccttgtggtgttccgcctgctcaaaaaggaagtggccaccgaggcctttgcctatatgtccgacgaagcccgcgacgatctggtgaacgccttctcagatgtggagcttgtgggcgccattgaagagatgagtctggacgatgccgccgatctgctggaggatatgccggcaggcgtggtgaagcgggtgctggagaaatcctccaagcagacccgtgagagcctgaacaagctgctgaactaccccgaaagctctgccggcagcctgatgacccccgaatatgtccgtctgcgcgaggatatgaccgtggcgcaggcttttgaagccatccgcaagcagggcgaaaacgcagagaccgtgtacacctgctacgtggtggagcgcaaccgcctgaagggcgttgtttctgcccgaagcctgctgctgtcagagccgcatactcccatcaacgagatcatggatgataacgtggtcactgtgaaagtgaccgacgatcaggagtacgtggcccgtgagatgcagcgctacgactttaccgccatgcctgttctggacaacgagggcatgttcgtgggtatcatcaccatcgacgatgcaatcgacgttctgaccgacgagagcaccgaggatatgcagaagatggctgctattctgccggacgacgatgccaccacctacttcggcaccagcgtctggacccacgcaaagcagcgcatcccatggctgttgatcctgatgctgtccgccacctttaccggcatggtcaccacccactatgaggaggcctttgtcagcctgccgctgctggtctccttcatgcccatgctgatggataccgccggcaactgcggcaaccagatcagcaccctgatggtgcgtggtctggctctgggcgaggtagagcccagcgactttttgcaggtgctgggcaaggagctgcgggtgtctgccatcgtgggcgcggtgctgggcatcgtgaacggcctgcgcatctacctgatgtacaccttcctgttccccggccagtacgccaacgtgatgggctatgccatcgtggtcagcgtttcgctgttcttcagcgtcattctggcaaagctggtgggcggtatgctgccgctggcagccaagaagctgggtgccgacccggccatcatggcaacgccgttcatcaccaccatcgtggatgcctgcagcctgatcctgtatttccagatcgcacagctggtgttccacaatatgatgtaaagaatagagcaatgtcggacagtcttgaagtgactgcccggcattgcttttttcggtgtggaaaactgcatgtttccccgccttttccacacagaaaaacggcagcggcccggtgttgaaaacttgtgaccggttcattccagattggagaaaaataaatcgccgctcaggaacggtttgtagaatgcaaagaaaatccttcgactttcttttttataaaaggcagaat

SEQ ID NO: 988 - DNA, 34907 bp, unidentified
  source 1..34907: mol_type = unassigned DNA
gaccgatatataagttgaaagtagctattcaggctctattcgtatagctctgaatagttcctatatacgtgatgaaaacatggaggtgaataacatgtatgtagaaccagtacgagggatgtctgctgcacagacaaagcagacagtacaaatgacaacagatacagacaatacgattcatgctcagtccacggagggagaagcagaatatacatcatatgactcaacaacacccaaaacatctgcctcacagacaatgacagcagaggaaatgcagtcagctgagaatgagaagttaaagaaagcaattgagagaatgaacgaacagcttcctaattcggaagccaaattcggtatccacgaagctaccaacagagttatgatcaagctggtagacaaggatactcaggaggtcatcaaagagataccacctgaaaagacattggatatgttagcaaagagcatggaaattgcaggagttctcttagaccagaaattataagacttgcgttcacatgggagggaaatacatatgtcagatttattaagaatgaccggtatgtactcaggaatggatacagagagcatcgtatcccagttagtcaagaccaagagtaccaaggtaaccaatttaaagaacgaacagaagaagctggagtggaagcagaccgcatggcaggacttaaactccaagatttacaatatgtacagtaagactctgtcaaacctgcgtctgaccagtgcatacagtaagaaatcaactgtaagctctgattctaccaaggcaacagtagttgccagcgaaggtgcagtaaatggaacacagacattacaggtaaacaagcttgctaaatcaggttacctgaccggggctaagctggctggtaagacaacaactacaacaggcacagatggaaaagacgtaactaaagtagtaaactgggaaactacggataaattatcagaaattgatagcaatcttacaggtaagaccatcagtcttacaacaggaacaggtacagatgctaagactacagacatcgaaattacagcagatatgacaatcaatgacctggttgccaaattcaaagacgcaggagtgaatgccagctttgatacaaccaatcagagattttttatcaattcaacaggaacaggttctgctaagaacttcaccttgagttcggatgatagtacagcactggcttctttgggattagatccaaatgctacttatacagatatcaatggttctaagaattcctgtgttaagattgaaggacaggatgcagaaatcgtattgaatggtgcaacttttacatcagattccaatacattctcaattaacggtctgacaatcaatacattaggtgttacagatgaagagatttctattgttacatctacagattatgatggtatctataatacgatcaaagacttcctgacagagtataatgatctgatcaatgagatggataagctctacaatgctgattctgccagaaagtacgatatgctgacagatgatcagaaggaaagcatgacagatgatgaagtagaacagtgggaagataagatcaagagtgctcttcttcgtaaagataacagcctgtataatgtcatgaatacactgacttccactatgatggaaggctactatgaaaataatctttcagataaagaaaagaaaaatatgacttccagtgaaattgctgcatggtataaagagaatggaggtaagaagcactatctgtccgattatggtattggtacactgagctattttgaagcacaggataatgagcatcatgcttatcatattaatggtgatgcagatgatgaatttacttctaccaaagaagacaagttaaaggctgccattgcagatgaccctgaaggaactgctaatttctttgctacattatgtaagtcactgtatagcaaactggatgagacgatgagtgagtccacagattacagcagtatttataaggtatataacgataagcagttgaagaaggactataatgattatacaaagaagattagtgacgcagaagacgagctgaatgattatgaagacagatggtataataagttcagtaagatggaagtagctttgtccaagttacagtctcagacgagttctatttccagtatgttaggaagtaactaatcaatagatcataagggagttgttcggacagacagcacagaaagagggaaaagcgcatgctgaaacaaaatggttatgcacagtatcagaacagcagaattatgacagcttcaccggcagagttgacacttatgttatatgaaggagctatcaaattcggtaacatcgcaattatggcaatgcagaataacgatccttccaaggcgcatgaaaatgtggtaaaggttgagaaaattattcagaatttcagagatacactggataagaaatatccgatctgggaagatttcgagaaggtgtatgcatatttactgagaagatgccacgaagcgaatattgccaaagatccggagattatggaagaggtagtgggacatttacggtctatgcgtgataactggaaggaagttatgaagaaagttgcatcagacagagataatcccagtgcacagagcagaattgccggaggtcagcataatacgatcggctatgcgccaactatggcaagaagaacaggaacctgacaggaagaccagagtgtaaaacagggggaaaggcatgacagaaggatatttgcagattttaatagaaagccttgaaaagaagattattgtattggatcagattattgaactggacaaacagcaggcagagatcagtgcacaccagccaatggatatggaagcatatgatgaagttgtggaagcaaaagataagcttgttgatgagatcaataaactggatgatggatttagttctacttatgaactgataggagatgaagtaaagaatcatccacagcagtatcgtgaacaggtgcagaaattacaggaactcatcagagatgcggtggataaaggtgttacgatagaagctcaggagaagcgcaataaagcagctctggaagcggtctttcgtatgaaacgccaggaaatcagacaaatgaaagtctctacatcagctgctacgaagtattacaagagtatgagtagaatcaataatatagatccacagttgatggataagaagaaataaaaatatatgagtaacaaaagccggacagtaaaaatgtctggcttttgtatttttttatggtatcatttatatatcatgatattaagggagagaggtctctatggacgaattgaagaaattaccgatagggatagaagattttgaacagattcgaaaagaaggtttttactatatagataagacaaaattaatagagcagattttgaataaatggggaaaagctaatcttttcacaagaccgagacgttttggtaagtcattaaatatgagcatgcttcgaaatttctttgaaataggaatggatagttcattatttgatggtttatatatttctcaaaatagagaattatgcgacagatacatggggaaatatccggtcatttctattagtttaaaaggaatcaatgctgcaacttatcaggatgccagagctcagcttattaaggtaataaacagagaagccagaagatatcaatacttacttgatagtgacagaatatcagatatagataaagaattattcagggaactcatggggagaatggaagaagatactctttcttacagcctgcaggaaatgtcagaagtactggagaaacattataaacagaaagtaatcatattaattgatgaatatgatgtacctcttgcaaaagcaaatgaacaaggctattatgatcagatggttctgcttattcgaaacttatttgaaaatgttctgaaaacaaatgacagtctgaaatttgctgtattgacgggctgcttacgtgtggcaaaagaaagcattttcactgggctgaataattttaaagtatattctattacagacgttgattttgatgagtattttggttttactgatgcagaagtaagagatatgcttcattattataatcaggataatcattacgagacagtaaaggaatggtatgacggatatcgatttggaaatacggatgtatattgcccgtgggatgtgatcaattattgtgactgtcatattagtgcatcagaacttccaccaaagaattattggttaaacaccagtggaaacgatgtgatcaatcattttattgacagtgtgggagaacagtataagcttaccaaatcagaattggagatgcttgtaaatggagaagttgtacagaaagagatcagtcaggaactgacatataaggatctgtatgcatctatagataatctgtggagtgcactctttatgaccggatatctcacacaaaaaggaattccggatggcaatcgttataatcttgctatccctaatagggaaatcagaaacattattacagaacatattttgagtatgtttaaggacaaagtgaagaacgatggcgagatggcaaatgcattctgtaatgctctcatcgaaggaaataaagaaatcgcggagaaaatcttttctgaatttatgaaaaaaacaattagcgttagagatacttttgtaaccaaacctacgaaagaaaacttctatcatggaattttactggggatactaagttacaaagcagggtggtctgttaaatcaaacaaagaatctggagatggatatagtgatatattagtacagatagatgattcagacacagggattgtgatagaagtaaaatatgcattggatggtcaggaaagagatatatgcaaaaaagcaattgaccagataaatgaaaaacaatatgcaatagaacttaaagaagaaggtattcataaaatactaaaatatggaatagcatgtaatcgcaagagttgttacatagagttagaaaaggaaaatagtaagatataaagttacagcaaaagagccgcttcgtcaagcggctctttgctcttatggtagcatgaacgcgaatgtatatcattcagatgtttctgctatgcctcacaattagcttaataaggaaagtacaccctgattagcctgattagcctgagctaacatggactgaccagcctgctgtaagatattgttcttggagtacttaaccatttcttcagccatatctgtatcacggatctggctttcagcagctgtagtattctcaacaacgttatccaggttgttgattgtatgctctaatctgttctggatagcaccaagagaagatctctgtgcagatactttagcaattgcatcagcgatagaatcaatagcgtaggttgcagatataccagtcttatctttaacatttaagcctgcaataccaagacctgttgtatccaatgaagctatcttgacagatatcttattggtcatatctgcatcagcacctacatgaaggctgaaattaaggtcttcctttgttgtggcttcggctctgttaaagacaaactgaactgtgtccttacccttgattagttccttattatttgctacattaatagaaatctgagttttgttagcccctacattgttagctaaagcaagctcttttgccatatattcatatgccttatcagctgtaatgatagatgattcattatcatcaacaccatctgcagcaccacctgcgttatcggtaatgacattgtaggtcttaccattgaatttaacggatgtaagtttaccaccattgatacgtttctcaatagtgtcctttgtgataagattcttagcttcatcttcttcatctgctgtatctacaatagtatattgaacaccatttaatgtaacctggcttccggtcgccatagtaagagcagcaacagagtcagctacattcttgggtgttgcatcaccaattgtataggttttacctccaatacttacggaatcaccaagttttaatgtactgattgtaaatgttgcactgtttgcaccagttactaatttaccatcaagacctgcatcctttgcagacaattttacagtcttatcgcttgtgtcaccctttaacatatacagttcgttgaactttgtagtttcagcaactctgtcgatttcagttaataactgttcgacttcatcctgtacagtctgtctgtcgtctgtagacattgtaccgttagctgcttttactgctaattcattcattctctgtaacatatcgtgaacttctgtcagagcaccttcagcagtctgcacggcactgataccatcttctgcattagcagaagcttgatccagaccacggatctgctttctcatcttctcagaaatagcaagaccagctgcatcatctgcggcgcggtttaccttgtaaccggaagagagcttctctgtggacttagccagagaacctgttgtgatacctaacattctgtttgcgttcattgctgataaattgtgctgtactaccataataaatacctccttgtatttgacatggacaaatccttttgcccgttaattgtttgcgaattaaattgaattaattatttcgcatcccctatgaaattgtgtataataacaggaactgccatatatacgacagttggccacctgtttacaggcagtccctggtattaccaatgctggtagtataaattgatgaaattcttaacacagaattgtatcaattacacatactatatcgacaactctacataaatagttaatatcaattataaaaataaattgcaaataattttcaaaaaaggtattgaatattctgaaaatttagtttatgatataaacagattcaaggaaagaatctcggaaactaaaggagtggtttctgatatcggaaaggattcgccatatagtgattagtgtatggtatgtcatcggatttccgaaggcttacctttttttactaaaaatcaaaaaatgctataaagtttataaaagacctgccgatatataaagtgtaagggagttaaacaaataatttgaaaattaaataaggatgttgtactcgacatagtcaaggaagataaataatggattatgcagtatattttgaaggaaccttttttctggtaataacctgaaacagcctgtatcaagcaggcgcgccaaaacaggctgtggatggatattatatataatgaaggaatttggaatactcaccaaattctgataagaaaattgaataagggaactaagaaagtgattgaaaggattcagtcacacaaagtacaaggaggtatttattatggtagtacaacacaatatttcagcgatgaacgcaaacagaatgttaggtatcacacagggttctttatctaagtcaactgagaagttatcttccggttataaggtaaaccgtgcagcagatgatgcagcaggactttccatcagtgagaaaatgcgtaagcagatcagaggtctggatcaggcatctgcaaatgctgaggatggtatcagtgcagtacagactgctgaaggtgctttaacagaagttcatgatatgcttcagagaatgaacgagctggcagttaaggcttctaatggtacaatgtcatctgatgatagacagacagtacaggatgaagtagatcagctgttaacagaaattgaccgtgttgctgagacaacaaagttcaacgagacatacctgttaaagggtgatacatctgataagaaaatcaagctttctgctaaggatgcaggtcttgatggaaaattagtagatggatcaacaacagcgacattcaccgtttcaacattaaaagtaggtgatactgttagtattggtggaaaagattatactataggagatacacaggctaaagtaaaggcttctttagataccttaaagacatctatgactacaggaagtcagattacattaaatggaactcagtatactatttcagatgcaacagatgaatctaaaaaccagataacatcagacgatgcaattaagaaagtagaagccggtaaaataacatcagttaaattcggtggtaagacatataatgtaatgtcagcagcagatgcagcagcaaataagggcgttgacagcaatgatacatctattattactgcagataaagcttatgaatatatgaagaatgagcttgtattagctaatagtgtcggtgcaaatgatacatctgctaaagttgcatttacaaaaggaaatggggatacacagagttttcagattacaaagggtattgccaaaactaaggaagatttaaactttagtttgcatgtaggtgctgatgcagatatgaccaacaaaattaatgtagctatttcttctctggatacaactggtcttggtattgcagggttaaatgttaaagatagtacaggtacagctgctacatatgctattgattctattgctgacgcagttgctaaggtatctgctcagagatctgctcttggtgctgttcagaacagattagagcataccatcaacaatctggataacgttgttgagaatacaacatctgcagaaagccagatccgtgatacagatatggctgaagagatggttaagtactctaagaacaatatccttcagcaggcaggtcagtctatgttagcacaggctaatcagtccaatcagggtgttctttcactcttaggctaatcttaatcggataaacggtcataggaataatgtaggtaatgctacatggattccctaccataacaaattgagggctacccaatcgggtagccctttctatgccattataaagcaatgataaaaacacttaaacaattcataaaacatattgatttaaccccatgttcccagtatagtaaagcgaatgttgttgcgcagcatattcggagatattataatgaggaaaggcgatgaacacaatgggaatggcagatgcagtcaccaaacagtatatgaaagagaatactgtttttgcagatgcctttaattttttactgtataatggagaaaatgtgattctgccacagacgctgagagaactggacacagcggaggtagtgataccttttacagtagatgataaaggaaagaaacaggcacaggcggtacagaaatacagggatatattgaaaatgactacagtaatgacagatgataaggcggcatatgtgctgtttggcgtagaggctcagacggatattcactatgccatgccggtcaggaatgtcatttatgatgccctgcaatatggcagacaggtaacagaaatcagcaaaaggaacaggaaaaatagcggtcagactatggcagtaacagataaggggctgttgcagcatatcccggactacagaattaaattgatagatcctgctgggattgattctgacgaaatggataagttccatacaagtctcagggaagtgctgagctatatcaagtattcaaaggatgctgataaattagcagaatatatgaagcataatcagaggatggagcatctggaagtcggtgcagcgcaggtgattaaagaagttaccaatacgaaatttcaaataccgaaaggaatggaggaagtcaatatgtgtgaagcaatagaagtgctgatgaagcgaagagagactgaaggtatcacccaaggcaagcttagtctgctcaaagagttggtagatgatggaacacttactatggaagctgctgctggtaaggtgaatatgtcggtagaggaatttaaagaatatacgaaaaaagaattataaatcaggatattcaggggactgttacactatagtgtgtcagtccctgttatttatgactttttattaaaagaaaatagtttggagttgtaagaatcttctgttcgatgaaataatgatagaatattcagataatttatgctatgatattatatataatagataacttgatggtgtaaaaaatagaaaaaggggaatgggagtttatcatgtcaaaggtgccaatcagtgtatgcatcatagcgaagaatgaagagaaatacatagaagaatgtctgagaaaattaaaaccgtatggttttgagatagtggttgcagatactggctctacagatgcaacgaaggagatagcatccagatatgcggacaaagtagtggattttacatggattaatgactttagtgcagccagaaatttttgtgctaagcaggcatccaacaactggatactggcactggattgcgatgagtatatagagagtgtagacatcaggattcttcgagtgttattacagcagaaacccaagcaggtcggcgtggtacgcatgaaaaatatccagcttcgggaaaatgatgagcttggatacagtgtagatgatttgcccagattatataataggaactattacagatatgataagccgattcatgagcagattattccaatcaaaggggattcagattcactggagggctttttgatgccgatggaggtcattcatcatggctatgcgattaagggtgaggacatggtgaagaagcaggagcgtaatttggaaatattatatgctggattaaaggatgaaccggataatccatactattatttccagatagggtgctcgttgcaggtactcaagagatatgaagaagcagcacaggcttatgagaaggggctgtcttttgaaccatccacagacagaacttatgtaattgagatgatcacatcactggcaaatgtgtattctgatatgggaagaaaagcagatgcactggcattaatggatcgttatgcagagagctgcaattatgcgaacttcgtcttttgccatgccaatatactcttagagaatgaccagccgatcaaggcagtcatgaattatctcaaggccacgatgatgaaggattccaatacattgggtgagagacttctgacctgctatgaacgggtaattgccatttatcaaaagacaggaaatgaggatctggcaaagccttttgaacagaaatatctggaatgcagggctgaaagagaacgaattgtaaataagtaacagaagaataaatcgagcatggatgcgagaggaataatatatggtaatacagcacaatctgtccgcagggaacacggaacgtcaaatggggatagtaaaaggtgataaggcgaaaagtacagagcgcctgtcgagtggatatcggatcaactgtgcagcagatgatgctgcaggtttgtcgatatctgagaagatgagaaaacaaatacgaggattaacacaagggatagccaatgcagaagatggtatatccctatgtcaggttgcggatggtgcaatgacagaggttcatgacatgctgcagcgcatgaatgagctggcagtgaaagcagctaacggaacgaattcgtccggtgatagagaagcgattgatatggaagtgtcggcgctgattaaggagatagacagaattggggagactacgaagtttaacgatctgtatattttaaaggatgaaggtaatacgaagactgtcatcggtggaagcacgggcaataaaccttctacttcgggaagattttttgaattattggggaatagtgtgtccaaaaccggatatatggaagaacacttatccatgggcattgtaaaaaataattctacacttgatacgctcacattggctcatttactggatgctgacaatgattttgtaagtgtacatgcagatttcagcgctatagagagtcatttgcaggacttagtcggtacgcagtttttcgtgaactgttgtacagatgactgtccaaagactgtgaagtttacagatgcaactggcatttcattcaaaaagtcagcggatatgacacatgactatttcagccagatagaaataggtatgaagaaggctgatggcagttactttaataatgcggcagagttctgtaaatatatggttgatggaattaaacaggaaatgactaatctgcagaaggataattatctggatggcgattattacaccagagagcatgtacagttcgcctatagcggaactactttatatgtatttgatattgataataacccttggggacagatagataaggagacagcatatttttgtgattctgaagatatttttggcaaagattccaatagcgcagacagtgtcagcaacaaatctatctggattcaatccggagctgagacaggagatggactgaccttacagttaggtgccatttcatctcagagtattggcatcaagggaatgaatgtcctttccgaagataatgcaacggatgtaattgacagaatcgcagatgcaataggctatgtatctgcacagcgcagtcgaatcggtgcccagcagaaccgccttgagcatacggttaagaatgagcagaacattgtcgagaatacaacagcggcggagtcgcagattagagatactgaaatggctcaggagatggtgcgtttttccggcttaaatatattagagcaggcagttacctccatgttggcgcaggccaatcaaagtaaccagagcgtgctgacgctgttgaacgcatagataatgcaatgataaaaaacacttaaacaattcataaaacatatagcataatcagagaatggaatatctgggagtcagtgcagcacaggtgattaaagaagttaccaatacgaaatttcaaatcccaaaaggaatggaggaagtcaatatgtgtgaagcaatagaagtgttgatgaatcgaagagagaatgaaggaatccgacaagggcttgaacagggaatatctcaaggaatggcacagggaataacacagggtaagctcagtcttctgaaagatttggtggaggacggaacacttaccatggaagcggcagcagggaaggtgaatatgtcagtaaaggaatttgaggaatatatgaaaaaagaattataaatccggatacttagggactgatacactatgtagtgtggcagtccctattataatcagatgacataattgtatatacaatttcacaaattatgttgacaaattctgtaaatgagagtattctgaatacatcgtaacagagaaatgcaaggttgaatcagggattcaatcagctttgaaaaaggggaggtcagtatgctcgtaacaaatcacatggaagtcaacaagaagccggaacagaattacaagacagcattatccaaggaggaacccggcacaaaggttcaggagcagactactgcacaggcagcagacaaagaagttgaagtctcaatatcagatgtaaacagcagaaaatcagtattatcagacgatgaactgaatgttgcattggagaatgtgcttgcatcacagagcaatattctggatgtagataaggcagatgatatgattcgtgcagcaaatcgcagaattttggaaaatgccaacgattctgtattggcacaggctaatcagtcttcagatgtagtaaaagaattgtgtaagtaatgtgtaagtaaatagaaacgaatatacagaggtctatggagtcaattccatagaccttttttatgtaaattttttattttaaacaaattatttaaaaattatatgttaatctataaaatttctgacaattcaatccgatatatttactgaaaacgctattgacataaaccgatagcataattagtttacagtaatcattcagagaaacctataagttaagggaacagagtaaaaattgtgtctgaaggaagacacggttaatcatgaaagaaaaggggagtataagagaatggtagtacaacacaatcttcaggctatgaacgctaacagaatgcttggcattacgaccaaggaggcatcaggttccactgagaaattgtcaagcggttatcgcatcaacagagcagcggatgacgcagcaggacttgcaatttccgagaaaatgagaaaacagatcagaggtctttcacaggcttcttccaatgcagaggatggtatctcctgtgtacagacagcggaaggagcgctggctgaagtacaggatatgctgcagagaatgaatgaactggctgtacaggctgccaacggtactaactccgcaacagaccgtcagtacattcaggatgagttcgaccagcttatcgaggaaattgaccgtgttgcagagaccacgaagttcaatgagacctatttgttaaaaggcgataatacaaagccgaccaagaatatgtatatcacgaattattccgtaacttatacaaagaatgatttgccgaataatatcaaaggaattgactataagaccaactatgtaggtactaacaatatttatatcgtatcctcatctatttacagtacaagctctaacatttctctgacaggtaataagattcagaacggtgatgatattacaaagtatatggagaaagtaaaggcaggtaacactaaggatacaaacaaggcaggagctactttaaatacaacatcctatgttgcttttgtaaatgttgagctggattcagatgtacaaaaaggctcaaacggaaatgtaaatggacatggtcaaaccaatgtaacaaaggatctttctactgatggaaccacttctacagtaagagcgaacagagatctgttcatctataatactgcgaacagcacagttaccaggattacagaaggaacagatatgacagaatatctgaatactgacaatacaatgaaggataaatatcgtttggtagatgttctgtatggtgatgaaaagaaggtagatagtaaagcagcaacctctacaagagtgcaaacttcaatcacaaacaatcagccatttgcatggacagataattacctggagagggatgtttcttccaagcagctctatgatgcagatggtcagattgtatcaggtgtagctttgaacaagttctttgatgaaaatggtaactataagggtggtctgtatacaagcgcacaggcaagagcgattgatgaagtctttgcaaatgcaaatgatccaagagcaaaacagcttaaagatattggtggtaatgtaactgccgctaccatcaatgcctacatcacccagtcttccactcaggtggcagcagctcttgacgtagagcttcatgcaggttctgattctgatagaaataacaaagttcaggtagagctctctaccctgacagcagcaggtcttggtattgacaagcttgcaagctacaacattggtatcgtagattccacaggtaacaatgcaacagatgctattgatgtcattgcagatgcacttaatatggtatccagacagcgttctgcattaggtgctgttcagaaccgattagagcacactatcaagaatctggataatgttgtagagaacaccacatctgctgagtccgctatccgtgatacagatatggcagaggaaatggtaaaatattccaattccaatatcttacagcaggcaggtcagtccatgctggcacaggctaatcaggctaatcagggagtacttagtctgttacagtaatacagatcgtaagaaggttatatataggggagatagtttttatacgcgccagtcaccgcatcagcgtggctggcgtcttttcataacagggggagaaatttatggtagtacagcataaccttatggcaatgaatgccaatagaatgttgggtatcactacaaagacagtatcaggctctacggagaagctttcgagtggttatcagatcaaccgcgcggcagatgatgcggcagggcttgctatttcagagaaaatgcgtaagcaggtgcgaggcctgactcagtcggcttccaatgcagaagatggtatctcctgtgtgcagacagcggaaggagcgctggctgaagtacaggatatgctgcagagaatgaacgaattgtgtgtacaggcggcaaatggcactaattccacatctgaccgtcagtacattcaggatgagctggatcagctggtttcagagattgaccgtatcgcggagaccacgaagttcaatgagacctttttgttaaaaggcgatcagacaggaccagccacaagtgtatatattacaaattattctacgacttttacgaagaatacgattccgaatctgaagaatcctactacatactgcatgaattatgttggaaccaataatatttatgtagtagataataaggtacttaactccggtccaagtattgcacttggcgctgataagctaagcaagggagacgatatgacgaagtatctctccaagagcactgctgctgataataagggaaaaggtgtactgaatacgagcagttatgtggcatttatcaatgccgagctggattccaatacaacaggaggcagtgacctttatgtagatggttctacctctgtgataaaagccaaacaggatctgtatatttacaatacagccaacagtaccgtgactcatatcacaaaggacacggatatgacgcagtatctgagtgataacaatacaatgcttgatcagtatcgtctggtggatatcctggatggtaagcctggtacaagcaccagagtaaggcaacagctgcttggtggtgatccgttcaagtggacagatgaatatctggagcgtgatgagagcatgcagaagctctataatgcggatggacaggagatatcaggaattgccctgaatcaatattttgataaaaacggcaactatacaggaggtctttacacgaccgcacaggcgagagtatcagatgaggtattcagcagtacgtctactactgtttataaaaatgcattagcctatgcgcagaccaagggtatggaagcgccatctacgatagctaagtatattacacagtcgtcacagcaggtcgcagaaggtcttaccttcaatcttcatgtaggagcacagagtgaccgcagaaataagatatcagcaacgatagataccctgacggcagcaggcatcggcattgataaactggcaagctacaatattggtattgtagatgagacaggaaataatgcaaccgatgcgatagacgtggtgggagatgcactacagcagatatccagacaacgttccgctctcggagctgtgcagaaccgtctggagcataccgtgaacaacctggataatattgtggagaataccacagcagcagagtcagcaatccgtgatacagatatggcagaagaaatggtacgaaatgccaatgccaatattctgcagcaggcaggacaggcaatgcttgcgcaggcaaaccaggccaatcagggagtgttatcacttctacaaggataacgaagaaaatgacagggcttaccctcatttgggtagccctgtttttacttataagtaatataattatttagaaccccatgcgcaaaagcgcatcttcgatgctttacgggataacaagtttacttgttatctgcttattgtggttatttcgccatataaatcgagtcaaagatgcttgagaacaaacatattctgcctcaatttgcatgcccctaaatagttgcaaataatttacataaaatgtttatataatatagaaaataaattaaaattgtgctacaatttatccataaaataaaaaagcataattgtaaaatgttttatcacggatacagaatgatacatcattcgtcctattctggatactcactttgcaattaccaaatagctgtgttcataaaggggattatatatgtctaaggtgccgatttccgtgtgcctcattgcaaaagatgaggagaagaatatcgaagaatgtttgaagagactaaagccatacggctttgaaattattgttacagatacaggttctacggacagaacaaaggagcttgcgtcccggtatgcggacaaagtactggattttgcctggattgatgatttcagcgcagccaggaatttctgtgcgcagcatgcgtctaataactggatactgtccttggactgtgatgaatatgtaaacagcatagacgtgaagactatgcgtatcctgatgcagaagtttccaagatatacaggagtgatcaggctcaagaatcttgttctggatgaagacgggcagacaggatatggaacagacgacgtgacccgcttctataataagaacttttatacatttgattatccaattcatgagcaggtgtgctcaaaggatatggcgaagagagaagaaatgatgcagtgtttcctgcttcctatggaggttgtgcatcatggttacgcattgacaccggaagaaatgcaggataagcagcgccgcaatctgggcttattatataagaatctggaacgtaattctgacgattcctacacccttttccagattggtcagtcagaatttatccttggcaaccatgaaaaagccgttaccttctatgaaagaggacttgccggtgatccttcaccggaatttatctatgtgcaggttatgattatttcccttgccaaagcgtatgtaaaagtaggcagggagaaggaggctctcgcattgatggatcgttatgcaggacgatgcaagacagcgaagttccagttcacctatgcaggtgtttgcctggataatggacagccgcttaaagcactgctttattatgtaaaaacaacaaccatggcagatgcagatacgttgggcgagaatctgctgcactgctatgagcatattatcgaactgtatcgtgatatgggcgatgagaaaatggcagaggtttttcaggggaaatatgaggcatgcatgcgtgagaaagaacgtgtagtaaacagttaaggtggagaacgaaaatgacaaaacttcctatttcagtatgcatcattgcaaagaatgaacaaaaatatattgagaactgtctcaaggcactgcgccgatattcctgggagattattgtagtggataccggttcgacagatgataccagacagattgccacccgctatacagataaagtctatgatttcgcatggattgaagatttcagcgcagcccgcaattttgcagcagcacaggcgtccaataactggattctggtgttggactgcgatgaatatctgacgcagcttgatgaaaaggctctgcgtatctgtatgcagcagcatcttcgccatgttggaatgatggggttgacgaatgtatacacgcagccggatggagaacatgcctataaggcagaagaggttccacgcttctataatcgtaatttctttgagtacagatttcgtattcatgagcagatcacgccgaagaaccaggtgaacttggaggaggtatgcctgagtacttatcgtctgcctgtagaggtcgaacaccatggatatgatatcacaccggaggagatggagcgtaaacaggcgagaaacctgacgatgctgcagtctgcactgggtgagacaccttttgatgattatctgtatttccagatgggacagtcctattacatattgaagagatatgatgatgccgctaaggcttatgcagagtgcttcgccagaaatgataacccggaaaaaggctttatgaaggtggcagttccagcctatgccagacttttactggagttggataagggacaggaagccagggagcatctgatgaaatatgcagaccgttttaaaggtgcagaatatggatatctgcttgggtgtgcacatcaggcatgtggtgacaacctgctggcgctgttgacttttgtaaaagtgacacagatgtcagatattgatgcgctgggagaacaggcatatgataccttcgtaaggattatgcttctgcataatcttgcaggcaatacagagggtgtggagcatttcaggcagcgtctggaggaatacggaagagcacacggcagacagattgtatttgaataaagtataaattcgtttataaactacgggggaatattttttatatataataaaaagccagataggctgtgaatccttggatttgcaagcatatttggcttttttgtttatggaaaaagacgtcagtttatgatttgtttatgtttttatgaattttatgttttgcaataaccttaaaagaatcataacatctattgcaaatgagactaaagtactataacataccgccttgttacgtgacacacataatgaatgtgaaataaggagtagttcaatgaaagcaatatggatgaagaaaggaattatgacattgatggcggcggctgtgacaatgagtcctgaacagacagcaagtgagcctgaccactgggaatatgaagccagtcaggattttacagtgacgagtgacggcgtctatcaatttgaattatatggtgcgcagggcggttcttatcaggataatacaggtgggttaggcggcatggtcaatatgcaggtcagccttcaccgaaatgaccgggtagagcttcgtattggtggaagtaatgacagccagggaggaggtcagggaaccttgaccgccggaggtggagccacgaccgtagtgatcaacggagttacagcagcagttgccggcggtggaggaggagcaacagatattttaaatggagaaagtggtggttgtggatttagtggaatatccacaggaaatggagaatccagttcagagccgaattcagccggtggcggcggtggttatcagggtggacagagtggctataccagataccatgagcacacaggcagtgaagaatcaggcggcggctgttacacaggagaaatcagacatactcatgacggcagctgttttgtacagtgtggaacatttgagaatttcagagtcagtgatgatcagccgggctatatagaagccaattgcagtgtgtgcggagaatggggaagcaatgaaggcgatatggattcggacttcattacggatggttcgtggacacataccaagagggattgtgggaaggacagtaacagcatagataaatatcaactgtcatgtggcaaatcggagactatgattgaagaaaataagcaggcatatggtggaacgaattattataactcagatgtgtgtaaaaacgtttcagtagcagcaggcgtaagacggggaagtgggaaaatagccataacccaacttacccaagagcaactgaccataaattattataattacaatatgactttactgggcagcgtcaccgcatcaaagggaagtatagctgattacccagtgaagacagaacctgccagaaaggcagattcacagtacagttatacttttaccggttgggacgatatggagacaggacgtaaagagaacctgacaggggcagacaccgtgcaatcccctgttacagagaacaaaaactatattgcagtataccgcaatattcccagagaatatacagtaattttggaagatgcctatggcaatgtggtagagattattacagcggcatatgggaagcagatgcccaatattatgcttccagtcagagaggatggattatttgcaggctattacctgcaaaaagatggcaggggaacctgttattatagtacgtcaggtgaaccggcgcgaaaatcagatattgttcaggatgagacattctatgcgtactgggtaaatccggtgtctattacaaaacagccaacctccgtagaagtggagtctgactatacagaaagctatatggaagttgcttatgagcagagtatgaaacagggttataccattacaccacagtggtatatgcaacagaatggaaaaaagaccaaagtagtgaatggcaatacagtcaagtgtaaaattccttccggctataaagcaggaaaatacactttctggtgcgaactgacggtagtcagcgaacagaacgggcagcagatcaaggtaagctccaaccaggcagccttacaggttaatcaggcagcagagccgcccaagaaggaagataccaaaccaactaccccagaccaggataaggataattccacaggcaatccgggtgacaccaataatggaagcacaccacccccggataaatccgataatggaagcaccacactcccggataattccgataatggctcaactggaaaaacagacggcgcagataatgaagccacaagtaaacccaatatccctaacaatctgataaacggagcgctaagcaagaatgacattaccaacataaatgatgcagcatttacattggcagtgaatccatcacaattaccagtgaatggcagcaaacaggaaaatacagaaaatacaatgcctgcattgacaatggtgcctgaccctgtagctttgacaaccatccccgatgatactccatgggagagtcatgccagtacagctgacagcccatggataaaccatacaggggcagataacacagattacaatcaggcatcaccagatcaggatgccatttcaccgcagagccatgccacgtatgagacagagctggtgaaagccaattattcctttattgtaggcttaagcatactggggctgatagcaattctgctgcttatcctttttctgagcaataatcgcgcagaccgttgtgcagaggaataagactgtcataatagctcataatgccatcgaaaaatgcattcagaagtgtaatatcgtattttccactgattgcttcattatgcagataatccaataactcagccataagcataggcgtagaatcagaagacgtatgctgtgtattttccagataagcgcataaggaattggcaatggagacgagcctgacatgaggtgggatatcctctgcccggtatccatttggatagcctgttccattgagatattcgtgatgcatggatacaatatccagaacaacagggtcatccgtatgatgcttgacctgttcgagaccggcactgatatgttcatcaaaagccagctgttccatataagacatagactggggatttttgccacaggcagagcagcatccccttccaatataaccaatatcatggagaaaagcacctaacacaagagaaatcggagagatcccctgttcattgagcatttggcgattgccaaagagtgccatatgggcagcgatagaggcgacatttacgcaatgtatgtatagatccatactggttgcttgcagcatctgtcccattgtgatgacccattgattataggtaagggcttccaggacaaggagctgaggttcgagtgcacgaatttttttcataagaagttcctcctttgcgaggtgacaggactgcgggcagccccattaacaattgtagtacggacatataatacaacacaagacaagtataccatacataggacaaaaatacattaaataataattatattcagacaatatgctaaaataggttaaaaagaaaattaattttcaaccagatatgaggaaggagaacccatatgagaaacttactgtcagtatcggatgatatttccgcaaaggtcctgttcattattgaagaagatggcagagacgcaggctacctgaaagcctgtaccatgtggaatatggatgcaaccatagaacacgtgccttttcagggatatcgtaaggctacacaggaacaatatgatgtggtagttgtagatgactatatggcaaacaaatcaggatatacactggcaatggagattctggacagaaaagacgatgtcacaatgtttatgatgggcaaggatatggacgatatcagcgtggtaggtgcgtatcgtatggggattgcagactatatgcccattgcaacgcctccggttcaattaatggcaaaatgtattgccagtgtgaaccatcgtcgtaagagtgttaagccggtacaatatcaggaagacggcagaattgcagtttcagatgtaattctggatacgaagaattcaatcctggaaatggatggtgagaagattgtgcttatgaagatggaagcactggtattgcaggtactgatggagagtgcagatgtattagtcagcagaaaagatatctatgagaaagcctggggactgccttatgtgaatgttcgtgagaatacagtagccatgcatatttccaagctgcgcaggaagatgaaagatgatggtgaaagttcaagatacattgagacgaaatggggagagggataccgcttcctgagtcatccaaggaatggtatctatcattaagaaaatatgtgcaggccgtcattttgtgctataatctgttataaggtaattatgcagacccacataggcaaaaacaaagcattgaagctgcgattttgcacatgggttctgaggcatcagaggtataggataacaggaaggcatggatattatgtatacagagacagatattcgcaaggatacatcacaacaggtatttcaaagaggtaaatggctgtatcagagtggtaatgtgcagcatattcagattcaggatgtatatatagaagaaacaccgtgtaagaagataaaagcatatgtacagggaagcagctggagatgctataacacggaagtggtggtagacgaagaagcaaaagagctgcattcttatcgttgcgaatgtcctgcccatgtagaatatgccggtctttgtaagcattgtgtagcgacactgcttcgttattttcaggtgagagaggacatacggtgtaagcaggaagccccggcgaagaagctcaaggtagaattcccggagaagatagcacagctggaagcaacgcccggtattgtaaaaggcagtaccttatatggcaaaacaccggagcgggagcaccttaccagacaacgctccatgccgcagacggacagaggtatgtatcgaatcctgatgaatcaggggctggaacagcagcttccttttaaacagcctacagtacggggcaaagtacagcttataccctgctgccatgactaccatggtaagctttctgtggaatttcgcattggaattacgaagctttatgtattaaaagacataggagaattcgcaagacttatggcggattctgagtataagtcttatggtgcgaagctggcattttaccatcatatatcggcttttgacaaggaaagtgcaccatttgcggctttccttgtggatatcatgaaggattttcagacccgtggtggacagaatatctatcagtattacacaagaaatgatgtcaggagagagattccactggcaggagtgcagctggacagattcatggagatcatggaagagtctcagatgccttttgaaatggagacggtttttacaaatccagtacagtacacggtgcaggaaggggagccaccgattcctttgagtgttataggtgttccctctggcatccggctgattgcgcgttccatgcctatgacagaaggtgcggtatattcctatgcctatgacagcgatgcgggtatcatatatcggacaagcctggatacaatacgcagagttcggggttttcgcacatatatgaatgagcaaggcggtaacagcgtatttattgcagagcgggagctgccgcttttttgcagggatttattaccggaacttgagaaacattatgatgtgcagattcaggaatttcgcccggagaattatctccctgaccaggcgcagtttgccatttatctggatatgccagaatatgatgagattacatgtagattatgtgcggtttatggagaagagagttatgatgtcttttccgtagagaatgatgcggcacgttttattgatatgccgtccggttctatatcgcagaagagagatgtgcagcgggagatggagatggatgccgcagtcagtgcctttttcccggaatatgatggcaaaagccaacgcagggtgctgcgtgaggatgtggatgcgatttatgaatttctgcaaagcggcatacatgcactggaagagctgggagaggtctatatatcagagaagatgaaaaatgtgcagattctgaatacgcctgccttttccatggggatttcactaaaaagcggtctgctggatctgactctggattccagcgagttgtcaatggatgaactggctgaagtgctaacaaagtacaatcggcgcaagaaatattatcgtcttcgttcaggtgcatttctgaatatgcaggatacaaggctggagaatctggtagagctggtggatggcctgcaattgacggcaagacagatcagaagcggagagatacagattccacggtatcgcgcactgtttctggatagtctggctcatgaggagggcgcagagtatatccgccgggatacggatttcaggcagctggtcagaaatatgcgtgtcatggaagacagcgaatatgaagtcccaaaagagcttgagcagatcatgagagaatatcaaaagagcggatttcgctggctcaaagctttacaggcaaatggctttggcggtattctggcggatgatatgggacttggtaagaccttgcaggtcattgcttttttgatgacggagagacacaggacattgatcgtctgcccggcttcgctggtgtataactggcaaagtgagatagaacgttttgctccaggcctgcaccctgtcatggttacaggagatgcagcttccagaaaaagactggtagaagagagcacagacatggatattctgatcacttcctatgacctgctcaagagggatattgagaactatgaaaatatagaattcttctgtgaaatactggacgaagcacagttcattaagaaccagagcacgcaggctgccagggcggtgaagatgattcatgcgggaaccaggtttgcattgacaggtacgcctatggagaacagattgagcgagttgtggagtatctttgactatctgatgccgggatttctctatggatataagcagtttaaagaagagatagaagcgcccattgtggaacagcaggatcaggatgccatgatgcgtcttcgcagaatgattacgccttttattctgagacgccttaaaaaagaggtgctggcagacttgcctgataagctggaagaagcagtgtatgccagaatggaagaggagcagcaacagctctatacggcaaatgtacagaatctcaaacgtctgcttaatggtcagacagatgcacagtttcgtgagaaaaagctgcaattgcttgcagagcttaccaggctgcgacagatctgttgtaacccgctgcttgtatacgagaattataagggtggtgcggcgaagctggaaatgtgtatggaattactgcataacgccatagaaggaggacataagattctggtattttcccagttcacttccatgctggatctgctggcaaaacgcagtgatgcagagcagatttcctattataaactgaccggtcagacgccaaaggaacagcggattgaaatggtagaagcatttaaccgggatgaagtgtcggtattctttatatcattaaaagccggtggaacaggacttaatctgacgagtgcagatattgtgatacattttgatccgtggtggaatctggcagcgcagaaccaggcaacggacagaacacacagaattggacagaagaatgtcgttacggtatataagctgatagccaaagataccatagaggagaagattctgaagctccaggagatgaaacaggaactggcggatcaggttcttggcggagagaatatggataatccgacattctccagagaagaacttctggagcttctgggctgattatttatttggatatacgtagaagatatggcgtttctctcttggaacttcctgaatgcgtatatccatttccagcctctcctgatattctgacaactgactggtgattaacggattgcttgcatcctccttatgaagtaccagcttcatacgttcactgatcgcagcatgaagaagatccattttcagatacagtggatgtgaagtgacctcgttgcacaaagaagcaatactgctaagctgtgacacatattgttcttcatcagcgctggcgttctccaactgctcgatcaggcgatcttttttgagcgtaattgcctgtagagtgactggattgggacaagtctgcagggacaactctaataacatatcatcacactggcttatgtgagccagtaattgcagaattctcttgtcattttcacaaatcgtctttaacagtatttcataagtctgtctgtaatccatataaatccccttttctttacacgtatcccctgttactttaataccaacagattgttttgcactggtattataaaatcgctggttttattttaacacaaaactttacataataacagaaaataatgaataattgttgagtaaatttatttaatacggtataattatcatacaaagcagaaaatagtcagacaattattggaatatagatataaagtgattggaataaagcatgagcaagcagcagcgcttaaaggacataatgaatcaggaaaggcagggttagaactatggaagatgtaagattcagcttgtgtatgattgttaagaatgaagaggcagttctgaaagactgtctggattctctacaggcgttaatggatgaaatcattattgtggataccggctctacagatcgtacgaaagagatagctgcgcagtatacagataaaatatatgatttccagtggtgcaatgatttctcagcagccagaaattttgccttttccaaggcaacaggggattatatctattctgcggatgcagatgaatacatagatgcagagaacagaaagaagttccagctgctgaagcaggcaattcttcccgaagtagagattgtgcagatgatttatgttacagaacagattaaccatcctacggagaattttgccagagatttaagacccaagctttttaaaagactacggcagtttacgtggattgagcctattcatgagaccataaatacgaatccggtcgtatatgacagtgagattgaagtacgtcacagaccacagggagaccacagcggcagagatttcggtgtcttttccagaatcatagaggaaaagggcacactttcagacagattattgactatgtatctgcgtgagctgtataaagcgggagacgaagatacgctggtccgggcaagaactttcctggaaaagatgctggaagaagcggcagccagaaacaaagaactgttgaccagacagatcattgcagtacttttaaagatctatcggttaagcgatgatgcagcagctatgttaaaaaccgggcttcgcagtgagattacagttccttctgcggaagtatgcatggaatttggatactttttcctgaagaaggaggattatccggaggcggcgcactggttctacacagcggcttttgaaagtgaaagtgagattgacattgccagcagcggtacatcacctttgatggcgctggcgttgagctatcgaagatatgccaagtcaccgcatatcagggcactgccacaggaagagtatgagctggagaagcttcggcttacacagaaggcagcagaatacgaacagatggcgcgggactggaaaccacaggagaatggtttttgagttgacttaacacggtagagggattacactgaagttaacataacagaaagggaaacttaccaatgcattatcagtatttagtagtaggcgcagggctatatggtgcagtctttgctcatgagatggagaaaaggggaaaagactgtctggtcattgagaagagagatcacatagccggtaatatttatacaaaagaagtaaatggaattcaggttcatgagtatggagcacatatttttcatacctcagataaagaagtatggaattacgtaaatcagtttgcggagtttaaccactatattaactgcccggtggcacgatataaggatgagttgtataacctgccttttaatatgaatacctttgccaagatgtggaacatcaagaccccaaaggaagccagagagcatattgatgcacagattgcagacctgcatatcacagagcctaagaatctggaagaacaggcattatcactggtcggaagagatatctatgagaaactggtaaaaggctatacggagaagcagtggggcagagattgcaaggaactgccaagcttcattattaagaggcttccggtccgcttcgtctttgacaataattattttaatgatccatatcagggaatccccaagggtggatatacgcagatcgtggagaagcttctggaaggaattccagtgaagcttggaaccgattatgagactttctgtcagcggagcacagatggcggatttatctctatggacggtgaagatacttttgaaaaagtactgtatacaggtatgatcgaccaattctatgagtattgttacggagaactggcataccgttccctgcgttttgagactgaatatctggaagacgaagacaattatcagggaaatgctgtagtaaattatacagaaagagaagtaccttatacccgtattattgaacataagcactttgaattcggcacacagaaaggtactgtcattaccagagaatatccgaaggaatggagccggggggatgaaccatattatcctgtaaatgatcaacataacagtgaattgtatgagaaatatgcacaaagagctgcgcaggagaagaatgtactctttggaggaagactgggacagtacaaatattatgatatggataaggtggttcgtgccgcacttaccatggtagaagagcaattataaatattcattataataggtacaaaaaaggcatcatttgagaaagaatcagatgatgcctttaacaatatgtattaaacagcatgccgctgtagatactggttacatatgggttgatataagtagtggcaggattgggataggaacagatctgccggttcaggtattccatagggtccatggcgatagagcttaatttacggatcaaatgactgccaaagttctgcaatgcatccagatccatcggagtcgcctcttctgatttctctcttggcggatagaggagggtatcatcttctttgacctgtataccgtatttctcaatctcactttgatgcccttgcagtagtctatgcatatcttcgcttaaacgttctgaatgttccggcgcggattttgtactttcccagaatgcattatagctttttacaaaggcgtctatattataggaaagagattgtgggtcgggataaagtcctacttgaatctcagtgttcttatcggcagcagattcaggatgcagagtgatttcatatgcatcatagacccggaaagtattgccataggaagactgaggttcaccatctattgtataggcagcatttcttgctgtctcaatgtctttgttaagaccaaggtaatgtaccatgccgctgctgtgagaggtattatcatctgtaatgcggaaatgttcattgccttttgcaggaataccataagcatcagaggtaatctgcagggcactgcggccgctgtcgtcctgaagtacctcggcatgtacacccaggtcagaattgttgatcagacgcataagtctgtgttgcagggtatcatgtgtatcgcccggctgtaagtcgaattgcagttcatagtgcagtttatttgtgatcagatcaaaggaatagctgccgacaggcatcatgaccggttgggaagaggtcagataactggaggtattacgctgcggagtcgcatagtcctgaattgacataacaaagtgagcaggtgctttacaataagaagaaacaccttgattctctgtcggttcataagaaacactgacttgtccagggtgatcgctataggcagttttagtggaaaaaagctgattctcatcatcacagcttaacgtatctatcgtttcgtgcagagacttagcctgttctttgagctgaattgcataagaaatctccgtggcagtagggctctttaaatataccggtgcgaaccggttctttaactgtatggaactgtatagctctttgagctcttttgaatcatgggtgtcataacgggagcagcgcttgctgccataggttgtcagatattgatcgtagatttgcagtgtagcataggaaattggcatactgcgccctcctttctttttaaataaaaattaaataaaaaatagaacccaaacataccctgttacacactttcacaatagcacgaaaaatagctgatggcaaggcttttgggatttttttgcaagactattttcaaaaaaaagttgacgatatgaatggggtatgatatagttgttaggcaagatgtgaattaggtcttttttttatgcttttttatgaatgcatcgagacagaatatcacggacggcagattagaacacaggtaaataaattagaacgctagcggaggtggaattatgcgtacaaagattactttagcttgtacagagtgtaaacagcgtaactacaataccacgaaggagaagaagactcatcctgacagaatggaaatcaagaagtattgtaagttctgcaagactcacacattacacaaggaaacaaaataacagttagaatccacaggaggcatactatgggagattcagcgaagacagatgctccaaagggcagcttttggaaaggcgttaagacagagcttaacaagatcatatggcccaacaaagaagaccttttgaaacagtcagttgctgttctgtgtgtttcacttgtaatgggtctggtcattactttcctggatactctgatccagttcgcaattaacttcgtaactgcattgtaagagtgaggttgaatggtatggaagagaagaaggaacatagggcagtagctaaaaagatttttgagccaatgatgaaggaatgggaaccggtttccccaaagatgccggaacctgttgtacaggaagagccacaggaagatgtggaacctgtagtggaagaacagcctgaaatcattccggaacccgtcgatgaagagcctcatagcaatgtggcactcagcgataacaagagtggcaagggaatgggctggtatgttgtccatacttattccggatacgagaataaggtaaaagccaacattgagaaggcaatcgagaacaggcatcttgaaaacgagattcttgaagtcagagtgccgactcaggaagtggtagaagataagaacggtacgaataaggtttcccagagaaaactttttccgagttatgttctgcttcacatggatgcggataataatgacgcatggtatgtagtgcgtaataccagaggtgttacgggcttcgtaggaccgggaagtaaacctgttccgttgacagacgaagagcttcgcgctcttgactttggcagcgaaatcagcgtagcatttgctgtaggagatgtaatctctgttactgccggagtatggaaggatacggtaggtacggttcagaagattgatgccggtcgccagaccgtaacaatcagcatggagatgtttggaagagagactcctgtagagattaatttctccgatgtcaaaaagctgtaaacaaacaattgacaaaatagtgtagttgtaatacaatattagccggacttcaaatgtaagtccgtgtgggagggtcatccacccagactaccacaaaacagttgaaaaactgagaatgaattaggaggtgccttaaaatggcaaagaaagtagaaggatatattaaattacagattcctgccgctaaagcaacaccggctccaccagttggtcctgcacttggacagcatggtgtaaatattgttgaatttactaagcagtttaacgcaagaacagcagatcaggaaggtatgatcattcctgttgttatcacagtatatgcagacagaagcttcagcttcgtaacaaagactccaccagcagccgttcttttaaagaaggcttgcaatctgaaaactgcttctgcaacacctaacaagacaaaggttgccactatttctaaggctgaagttcagaaaatcgctgaactgaagatgccggacttaaatgcagcaagccttgaggctgctatgagcatgatcgccggtacagcaagaagtatgggtatcacagtagaagagtaagcggaggtagagaagaatgaaacacggtaagaaatatgttgaatccgcgaagttaatcgatcgcgcatctttttacgagacagaagaagctgtagcattagttaagaaatctgctactgctaaatttgatgagactgtagaagtacacatcagaacaggttgtgacggacgtcatgctgaacagcagatccgtggcgctgtagtacttcctaacggaacaggtaagacagttagagtattagtattcgctaagggcgataaggtagctgaagctgaagcagctggcgctgattatgttggaggagaagaactcattccaaagattcagaacgatggctggttagactttgacgtagttgtagctacacctgatatgatgggtgttgttggacgtcttggtaaagttttaggacctaagggcttaatgcctaaccctaaggctggtacagtaactatggatgttactaaggctattaacgatattaaagctggtaagatcgagtacagacttgataagaccaacattattcactgccctatcggtaaggcttctttcacagaagagcagttattacagaatctcaatactctgttagaggctcttgtaaaggttagaccttcaagcttaaagggtcagtacttaaagagcataactcttgcaacaacaatgggacctggcgtaaaggttagtgttgctaagttctaatctaagataaatcaagacctcggtttgataccgaggtctttttgtgttacactatatgtaactattcagagccatgcaaattaaggcagaatatgcttgtttacaagc

SEQ ID NO: 989 - DNA, 33436 bp, unidentified
  source 1..33436: mol_type = unassigned DNA
atgatacagagtgtggtattagcatctgcagcagcaggcgtcctcacagcagcagccgtgatcggtattaccggtctgttgatagccgtacttcttggtgtggcagccaatgtatttgaggtaccggtcgatgaaaaggcaattgcgatccgtgatgttcttccgggagctaactgtggtggttgtggttatgccggttgtgatgcgatggcagcagcgattgctgcaggggaagcaccggttaatggctgtccggtaggtggaccggctgtcgctgataagattggtgagatcatgggagtatctgccggtgaagacgtaaagaaagttgcgtttgtaaagtgtgcaggtacttgtgataaggcaagtgtcaaagcaaactattatggaatttctgactgcagaagtgctgcagcaattccaggtcgcagcgataaagcatgtgcatacggctgtatgggatttggttcttgtgttgcagcgtgtggcttcgatgcgattcatattgagcatggcgttgcggttgtggataaagaaaagtgcgttgcttgtggcaaatgtgctgaggaatgtccaaatcatttgatcgaactgattccatacgatgctacgaaagtggtatcctgttccaatcaggataaaggaccaaaagtgatggcagtttgtgaagtgggctgtatcggctgtggcctttgtgcaaaacaatgtgaagcggaagcaattaccgttgagaacaacattgcacatattgatcagtctaaatgtacgggctgcggtaaatgtgctgaaaaatgtccaaagaagatcatcttggcacattagttcggcttatcaatattttcgagtattaagacctccggggaatcccgggggtcttttctcatttatcagtcagctcaaacttcacacttccaatgctgctgtctggtcacatattgcttattatgtcacaaaaataatagctattttgtagccaacaagctgacttgttctgccggcagaaatcgctatgttgtggctgcaaaatacaatataatcattgacataataagcacattgtgcttatcttgggagtttctttgaaactccattatgcgcagaaatcatgcgcaagtattatgacataataagcaatatgtggtcgtgtgagataattttgaaagtgcgaaatttgagtgattaattgatggcatatgagattcaattcttaagaattcttaagatggtatcgaagttgttgactggggtgggtatctgtgatgtactagagatgtaacggaaaactttagaaaggtgagggtgaattttatgaaaaagtggtttttggcttgtggtattattgttattgcaattatgggacttcaattaacggcgcaggatgtatccggtgcagagcacatcaataatcaggttgctttggaaacaacacagacaatgatgaaaattcaagcaacgccaagacctcttgaaatgtatgatgcagatgggtggaaaaagtattatgtaagtggaggttatcaatacacatatataggggctggaaaggggattcgcatagaacgattcagcgacaattcgccatggagtaagtccaaaaaagtgattattccatcggagatagatggacatcctgtccggagattggcagccaattcatttagtcaaaattcgtatatagaagaagtgaccattcctgatagtgtagaggtaattggaggtcaggcatttatgatgtgtaagtcattacaaagagtttatattggaaaaaacgtaagaaagatagataatgatgcattttatatgtgcaggaaattggaaaaaataagtggcggagagtcattaaaaatgttaggattacgtacatttcagtattgtgaaaaattaagagtattgccgtttaaagaaagattttacaaattggattttggtgaaatgttatgcgggaatactggaatacaaaatgtctcatttgataagaatgttgtactggcgaatggtttatttaggggctgtagacggctgaaaacagcaaatttatctaaaatacaaaatagtgagtgtacagatgatttgtttagagattgtatagcactaagacaggttaagataaataaaaactggaagtatatagaaaatcaaattttttacaattgtcgtaatttaacatcagttaatataccaagtaaagtaaggagggtggggtcgaaagcatttggaaattgtagaagcttaaaaaaaataaagatgcctaaatctgtgaaaaaaatagagaaagatgcatttaaaggctgtaaaaagcttacactttatgtgaaaaaggggagttatgcgcacaaatatgccaagaaatatcatgtaaagtataaatattggaaataggactatcggaagctcaatgcgccgtttccgtaaaaatataataattaagttatgacgatattgagaaaagttgatcagtaactatattgtaaagcataaaataacagtgttacaataacactgttattttattgcgtaaatattgttgtgatgtgtcgtagagtattttaatagtgaatgtttgcattttggtagaaagaacatagtgtgtggccaaataattattgcgcagaagaaaaaggagggatcacatgagacaagaatcagccggagttacagaagcacttcttgacagtgcacgtcgggaatttatggaacatggttttcatggggcgagcctgcggcggatttcggcggatagtggtgtgagtaccaattctatctatacgcgttttggagacaaggcagggttatttgcggctgtcgttggaccggtggcagatgggctgatggagtattatctgacttgtgtggatcaggcaacagatacacaggactcttccagtgccatggagacgggagaagaggggactgacggggtgctgcgatatatttatcagaatttcgatgtgttctacttgatcttttgcagatcggcaggaacggagtatgagcagtattttgatcggctggcgcagattgaagaaacctactatcgagcatttgccgataaatatgccaagagtccggaacagatcacggatttttttgtccatgtgatttgccgtaccggttggcagtatatttatgagatcgtgtcacataaactgccttttgaagaagcaaaggtgtttatggacaacataaaacaatatcgttttgctggctggaaagccgtgctcggccacgagtaaagcaaaacaccaagaatggagggacaattttcaatggaaaagaaaaaacagagtgcattgtcaagattgatggactatgccggaggacataagtattttacctatgcttcccttgtgctggcagcggtcagtgcgatcattgcactggtgccattttatgagatctggcgtatgttgaaggaagtgttagaggtacgtccgcatttcgaaaatgcggtttctttgaaacaatatggttggatggctgttggttttgcactgctagcgatggtattttatatcgtagcgttaatgtgttctcacaaagcggcatttcgcgtgcaggccaatatgcgtatcaagttgatgcagcatattatgaaactgccgcttggtttcgttgaatccgaaggcagtggaaagattcgtaaagtggttatggaatcaagtgcagcgacagaaacatttttagcacacaatctgccggataaggcagtgtctattgcaacaccgatcggtttgctcgtgatgatgatcgcctttgactggcgactgggtattgctagtttgatcccggcagcattggcatttattctcatgggaagttttatgatgggaccgaaaatggcagaagatatgaaacagtatcaaaatgcgctggaatcaatgtcttcggaagcggtagagtacgtgcgaggtgttccggtgttaaaaacgtttggacaaacgattttttccttccgacgttttcgccatgctattgatgaatatgagaaatggacattaggatataccaaaaatatgatgttgccgatggtatgttttacaacagcgtccaatggaatctttgcggcattgatcattgcagcgtatttatttagtggtcatggagtgacggatacatttatcttgaacatattcttttatattttgatcacatccatattgacggtgactttgatgaagatcgcatatgccggagagtcgcaaatgttagtagaggatgcattgatgagaatggatacgattttggagatgcagccacttcctacaaatgaggtaaacgttccgaaagattcttcggttgtcgtagaaaacattcagtttgcttatccaaatacaaagaatctggctttggatggtgtgagtatgcagatccggtccggagagcatatcgctttggtcggaccatcgggaggaggcaagacaacattagcttctttgatcgcccgtttctgggatgtgaaatccggtgctatcaaactgggcggtgtcaatgtgaaaaatataagcggtgatgagttgatggatcaagtgtcttatgtatttcaggacagcagacttttgaagatgagcattttggataacgtgcgcatgggacgcccggatgcaacggacgaggaagtcatgcaggcgttaaaggatgcacagtgtatggatattattgaaaagttcccggatggcgtacatacgatgatcggttccaaaggaatttatgtttccggtggcgagagccagcgtttagccattgcacgagcatttctcaaaaatgcaccgatcctgatcttagacgaggcaacagcatttgcagatccggacaatgaacgactggtgcagcaggcatttgaaaaactttccaaaggtaagacggtgatcatgatcgcccaccgtctgtcaacagtgacggctgcagatcagatttatgtgcttgccgatggcaaagttgccgaacatggcacgcacgaagaactgcttgccaaagatgctgtttatggacatatgtggaaagagtataacagatctgtaaactggcaggtaggaaaaggaggtgttacagcatgatcgaaagattacaacataaatatgcattatccgaaaaaggtaccaaagatatgttacgtgcctttgttgcagttactattgccaatcttgtccttatgcttccggtaggacttttgtattacttggcgtcctatttactggaaggtgatgttccgagagcaaagattccattttttacggtttcgattatagtagtgctgattttgatcgctgcgtctacagtgtttcaatatatgtctactttctattcgacttatgtagaaagcggtgtcagacgtcgtactttagcagaaaaactgcgcaagatcccgctgtctttctttggtaaaaaagatttggcagatcttacgaacacgatcatgtccgactgtgcattgttagagacagccagttcccattggatcccggagcttgtgggtgctattatttctacaacactgatcgtgatcagcttgtttttctttgattggagaatggcgttagcggcggtatgggttatgccggttgcttttctgatcgtattgtattccagaaaagttatgggaaaagtatatgaacgcaccatgcagtaccgcatttcctgtcaagatggtattcaggaaggtcttgagacattgcgtgatcttcgttcttacaatatgacagatacttatatgtccggattggagactaagatcaaagcagtagaaaaaaatgctatctttgtagaatttaccaatgcagcatttgtatgctctgcgcagatgatcttaaagcttgggatcggaaccgttgcagtagtaggaagtgttttgttgatgaacggacagatcacggttcttacgttctttatgtttttgttggtagtgacgcgtatgtatgagccgttgcagatctctttgcagaatctgtctgccattattagtgcagataccaactgcaaacgcatggatgagattttgtcgtatgaggagcaggaaggcagcgaggagttgacgaatgatggttatgacattcaatttgaccatgtttcctttgcatataaagatggtgagcaggtattatcggatgtcagctttatggcaaagcggggtaaggttactgcgttgatcgggccgtccggtggtggtaagacaacagtaacacgtcttgcagccagattttgggataatgacagaggaagtatcacggttggcggtatgaaggttacagatattgatccggagaaactactttcgttatattccattgtttttcaggatgttactttatttaatgatacgatcatggaaaatatccgtatcggcagacagggcgcaacggatgaagaagtcatggaggctgccagactggcacactgtgacgaatttgtagagcgtatgccggagaaatggaatacgatgatcggggaaaacggatcggaactttccggtggagagagacagcgtatttccatcgccagagcgttcttaaaggatgaaccgatcattttgatggatgaggcaacggcatcgctggatgttgataatgaatcctttattcaggaatccatttcgaaactgatctgtgacaaaacggtgttgatcattgcacaccgtatgcgtactgtggatggtgttgataagatcgtggtacttaaagatggtacagtcgcagagcagggaagtcctgctgagttaaagcagaccgatggtatttacaagcatatggtagagatgcagatggaatctgccgcttggcgatttgaataagagaatggatttggtataacagtggcttatggctgcttagattgacagttacagaatatgatgataaactaaaaaataatgcccacatttcgcattttttgttgaaagactgtctgatatatagcagtcagcctgcgaaaagtcgggataaataggaaatggagaataccatggacaaagagatcatgatggaagaccggatttcgtcaagacgacttactgtgacgatcacgaaaatctggtgggaacgaatcattgtgcatatcgatttacagcttacgtatgcggatgagtcgttaaaaggtgaaaaatttgatgtatatgccgtggatcaaaactttcatgccaaagcacgatttaagcagacgattgtggatgaagagcatattcgactgtcaatgaatatgacaaatccggggaactgcgaatgtctgccgatgggaagttatttcttttatgtttgccgcaagcaggagattttggcaaaatgtgtgatggcgcatgaattggttccggaggcagaaaatgtatcgcgttctttcctgcataacaaccggacgagaggttatcttgtaaacttctatgtcacggaaggggaaaatgatcttccgctcctgatgcatatcatggatgcgatgaaggtcagcatggaacaggaaagcaatggtgagatcgtgaaatctgcggtgacagatccagcgatcaaaatgaagaaaaatgcaggccggatgcgttggaaagcgtattatcacagtcaggttaagaagtataaagaccgtcaaaaggtgatcatgtttatgacggagcagagcgatacgctcgggacgaatctgcaggcggtttatgaccgaatgtgtgaacgtggattggataaggaatataccattcttttttccgcaagacctgcttcttatatcagacaggcgcgcagctcaaccaaagagctgctccacaaattagcacagtgcgatatggtattcattgacgatcatgtaccgctttttgactggctgacattagataaacggacaaagctgatacagctatggcatgcgggggcgggctttaagtcctccggttatagcagatggggacacttgggatgtccggcaccagtgagctgccatagacaataccgctatggaatcgccggttccagacagatcgggaagttcttctctgaggtgtttggcattaatgatgatcaaatcttgccaaccggtatgccgcgtatggatgagtatctggatgaagcctttcgtgagaagaaaacggcagagctttatgaacagtatccaatgtgtaaaggcaaaaaggtgatcttgtttgcaccaacctaccgtggcaaaaaccgtaaaacagcctattatccgtatcacatgatcgattttcagcgattgtatgatttctgcggagaggaatacgttgtgttattcaagatgcacccttgggtgagtgaggcggtaccgatcgaagaggctcataaagaccgctttgtggatgctaataaatatccaaatatcaatgatctgttttatattacagagatattgatcacggattattcgtccaatatatttgagtatagtttgatgcgtaaaccaatgctgtttttcgcatttgacaagatccaatattctttttcaagagggttccatcgtgattatgaggaagcggcaccgggtaaggtctgctatacttttgcacagatcatggatgcactcgaacaaaaggattatgaatatgaaaaagttgaacaatatgtagacaagcattttgactatattgatagtcatgcgtcagaccgcgtgattgactggatcctgcttggaaatattccggagaacattcagaaaaaactgcgtcatattgagaaagtaaaccaaagacttcctctgcttaattttagcgcattggaggaagaagaaaggagttaattatgaatattgcaatgatctttgccggtggtcgtggagttagaatgggttccggtatcccaaaacagtttttggagattcacggaaagccggtacttgtgcatacattggagctctttcaggagcatgatatgatcgacaagatctatatttccgtattggaagactacattggtaagacacagaaattagtagaccgttatggattggataaagtagtatcgatcattccgggtggtgcaactgctcaggattccatctacaatgtgttgaaagatgcagagaaagaaaatgatggggattctatcgtgcttttgcatgatggcgtgcgtccgtttgtatcctatgatacgatcaaacagaacattgaaagtgtacagaagtatggcagtgcgatcacctgcacagcttgctacgagacaatcttactcagcaagagcggtgagaaagtagattctgtaccatatcgtaaagatacctttgcggcacaggcaccacagagtttccgcttaaaagatattattgcagcccacgatgaggtgcgtgcgatcaatccttcgtatgaaaatatggtagatgcctgcacgatcatgacaacgcttggcaaagaagtacatatgatctcgggcaatcgtggtaatattaaggttactacaccagaggatgtatatatgttccgtgcgctgctcaactacaaagagaatgagcagacgtttggtatcggcctgacgaacggaattcgttagcagacagtttaagagaagtatgaagtataagaaagtaacagatggacgacagaaatgtttgtgaaatttgattacggatggaaaggaaaactacatgagtagaatagaaagtccggataaccgggtgcttcaagaagatttagagcgtgctgcagcgcttgatctgccaattgaagcgttagacggcagtcgtatttttgtgacaggtgcaacgggattgatcggctcacagctcgttaagtttttgttgtgccgcaaccgtatctgccattgcaatacgacagtcattatttttgcgcgcagtaaagaaaaagcgttaaaggtattcccttatttagaggaagaggagcatttggagattgtgcttggagatatttcagagccgatctgctatgatggagacatagattatgtgatccatggggcaagtccaacgagttccaaatattttgtcagtcatccggtagaaacgatcggtgcggcagtggatggcactcgctatgtgttagaacttgccaaacagaaacaggtaaaaggtgttgtatatctgtcatcactcgaagtgtatggaactcctgcggaagatgcgggtatgatcacagagaaagattatggatatattgagccactcagcgtacgaagcagttattcggagggaaagcgtatcgttgagtgtttgtgtgcatcttatgcgaaagaatacgatgttccggtcaaagttgccagattatcgcagacttttggagcaggcgtagcttacgatgatggccgagtatttgctgagttcgcacgctgtgcgatcgagggcaaaaatatcgtgctccatactgagggcaagacggttcgtacatactgttatacgatcgatgctgttacggcattgcttaccattttggcaaaagggcaggctggagaggcgtataatgttactaatatggatacggcgatctcaatatatgatatggcaaagttagtcagtggaatcttgccggagtcgaatattgcggtggaacgtgacattccggaagatctggcaagtttcggatacaatccggagatgatcgtcaagctggatagtacgaagttacaggaacttggctggaaggcgacggttggcttgcgtgaaatgtatgagcgcctgatcgaaagtatgagtctggtacattagatctgagtagagcttagaacgtacaggcagagcatattggtattgacagagccggtacatggatttgagatcagaggcttgaacaatagaaagagaggaatactaattatgggaatgacaatgacacagaaaattcttgcagcacatgcaggtcttccttctgtagaagcaggacagttgatcatggcagatctggatctggtattagcaaatgatattacaggaccggttgctattcatgaggttcagaagttaaataaaaagacagtatttgacaaagataaagtagcattggtgccggatcactttgcaccaaataaggatattaagtctgcagaacactgcaaatgtgttcgtgagtatgccaaagagcacgacattacgaattattttgaagtaggtcagatgggtatcgaacatgcgctgcttccggaaaaaggattgatcgtagcaggtgagacctgcatcggagcagattcacatacatgtacttacggagcgctgggagcattttctacaggtgtaggtagtacagatatgggatgtggcatgattaccggacaggcatggtttaaggtgccttctgccatcaaggtagtgcttaccggtaagccatccaaatgggtaagcggtaaagatgtgatccttcatctgattggtatgatcggtgtagatggagcgttgtatcgttccttagagtttaccggtgatggtgtgaaaaatctgtctatggatgatcgtttttccattgctaatatggcaattgaggcaggtgctaagaatggaatcttcccggtagacgacaagacgatcgcttatatggaagagcattctacaaagaaatatacagtatatgaagcagatgaggatgcggtttatgatgaagagtatgtcattgacttaagcaagttagagccaacggttgcgttccctcatcttccggagaatactaagacggtgaaagaagcgggagacgttaagatcgatcaggttgtgatcggatcttgtacgaatggtcgtattgaggatcttcgtacagcggcagagatcctcaaaggcaaaaaagttgccgatggtatccgtgtgatagtgatcccggcaacacaggcaatttatatgcaggcaattgaagagggcctagtgcagacctttattgaggcaggtgctattgtcagcacaccaacttgtggaccgtgcttaggtggctatatgggaatcctggcagcaggtgagcgtgcaatctctacaacaaatcgtaatttcgtcggacgaatgggtcatgtggattccgaggtgtatttgtccagcccggcagtggcagcagcgagtgcggtgaccggtaagatttctgaaccggcagaacttggtctttaatcaattaatgtgagcagtgaaaggagataaacatgaaagcttgtggtacagtacataaatatggagataatgtagatacagatgtaatcattccggcaagatatttgaattcttcagatccggcagagcttgctaagagttgtatggaggatattgatccggattttgtaaagcgtgtgcagaagggtgatattatggtagccaacaaaaactttggctgcggttcttccagagagcatgcaccgatcgcgatcaaagcatccggcatcagctgcgttattgcggagacatttgcacgtatcttttatcgcaatgcgatcaatatcggtcttccgatcattgagtgcccggctgcagccaaagaaattgaagcaggggacaccgttgagatcgattttgacagcggtatgatctatgacaagacaaagggaaccgagtatcagggtcaggcattcccagagtttatgcagaagatcatcaaggcagaaggcctcatcaactacatcaacgaaaatacaaaataacaacagcacacataacatgtatgcggcaggaattgacatcaattcctgccgtttgcacgtgtcagccacccaaactccccatatcaatagtcattgtcagaccccatattgcttattattgacataataagcaatatggggtcgtgcggatgtcttggggatgggaagtttgggttattgagaaaaaaaggaaagatttattgattttgagatatttttttaatttttttgacacatattggcggtagaatggtgaacgaaaatagatgtcttgaagatagattgggaggtatcatgagaatatgagattaggtggtttgagtaaaaagttgatggctgttgcattgtcgagtgttatggtggtgtccggttttgcggggcttgcaccagccgtttccgtgagtgcagcagatgatactgcaaagttacgtatgatctttacatcagatctgcatggacagttgacgacagaggattatgagaccggcaaggtctacacgacgggtggtttgtcgagaacggcaacattgatcaagaaagcgaaggcagaagtcaatgcaaagaattctttgttatttgatctgggagatgttctctttgattatacaacggattacatatacgatgtaaatagttcggcacagcagccgatgtacactgcgatggccaagatgggatacgatgcaatcacacttggaaatcatgaatttgattatacactggattatattcaaaaacagttgtcttctaccgggatgtccggcaaggtggtattgtcgaatgttacaaatgtcaatacaggagcacatatttgggcagagaataagatcattactaagaatctggtaacagagtccggtaagacaatctcagtcaaggtaggtttgatcggtgagacagttcccactttagctaagaaacgaaccaattacaccggagtgctgaatggagaagatattgtcaaaaacgtcaaaaaggaagtgccgatcctgcaaaagaaaggtgcagatatcattgttgtactggcacactccggtattggagagcagaaaccggcagagttagatgccaatacgggatatgcactgacgaagatcagtggggtagatgcggtactctgcggtcaccttcacaaagatttcccgaatgccaatggaacaaaatatgatgattatccgggggtcaataagacaacgggtattgtgaacggcaaaccgcttgtccagattgaaaaccgaggagcaagcattggtatggttgatctgaatatcggtacgaagaataacaaaccgacgatcacaggaaagtctacacagatccgaaaagttaatgcttctacagaggtagatccaacgatcaacgcagcatttgggaactggaccaaaacatttatggctgatagcagccagatacttagtgaggtagcggcagatacacaattacaaaattattttggtacgatggaagataatgatgcaatccaattgttgaataatattaagatcagttatggattgcaatacatcaataatacgaagacacaatacaaaaatctcccggtagttgcggcgtctacttatctaaaatacggatcgtccgatggagaggattacatagatattcaaaatcagtttaagaaggcaaatatttatgatctggtcagttatcggacaggcttgtatatctacaagatgacaggcgcacagatccgggaatggatggagtggtccgcaggcggttatgagcaggccggcaaaaatctgttgggagacaatgcaccggcagaaccgacaacatcaccggcagaaccgacggcatcaccggatgtagcaaccggatcagcagtgtctgcggggacggcagacagagaggaagagacatcttctcaggcggcggtatatgagtctcagacaaatactgcaccggcagcgcaaagtagtttacagcagaaaaatgctttgcttcagaccaaggggctgccatcgttaggagatatcttaaactatgattccagcaaaccgtttcagttcgtaatgcaggatgattatctgacggattggtcacagtattttatatttgatggattagagtacaagatagatacgacagtagcacctcgttatgatgcagcgggcaaaaagatcaatgatacccatcgtatcgtatccttgacgcgcaacggagcaaatatttcaaatacggcttcctttattgtgttgtctaataaattgccggataacaatctgtttaagacgatgaagccgacaatactatccattagcaaaaaggcgttgtatcgcagctatattcagtcctttatcgagaagatacaaatggccagcggtacgatcaagccgatgcaggataataactggagtgtaaaatactcggataactataactatattgtacagagtggtgctaaggcgtcccgctatttagacagcaagggatggattaaagcatcgatcggtggcgatagtaatgttcggtattacgtagcaaatccaaacgaaaagtctacgacggatacgacaggaccttgcctgacggctgttgtgaaagatgagagagttacgaacaaaaaggtacaggtattgattcaggcgacggattcttcaggaattgcgtccgttcgttatgcggctggcaaatatacggcagacaatgcaatttggaagacggcatcaaagatcaacggtaacgtatggtcttgtgaccgcaatggaacctttaccatttgcgcaactgataagaaaggcaataacagtgttgtcgtactcaaaatactcaacatcaataagagtatgttgtcggcaccggtagtagatggctatacaaaccgtaagacgaagattaccggtaaggcagaagcctatgccagagtatattttaaggttgaggggggcgcaacgtattctaccgttgcaaccaagagtggtacgttctcttacaagatgccgccacagagagccggcaaacgcatctttgtatatgttgttgacagtaagggaatgacaagtgcacgtacgatcgtgaccgtaaaacgaaccggtccgaataagccgacacttcacaaagttaagacgaacagcaaactggtaacaggtaaggtaaacgacagttatgcttatccaatgatccttgtaaacaacaaaacagtatatgtaccaaatcagaacgtcaaggcattgtaccgtaagtcttcgttctacaagaagaaaaacaaggtcaaagtgggacgtattgcactgaacaagaatggatcctttacgttgacgctgccgtctacgctgaaggccggtacaaaagttgagcttcgcacggtagatgcggtatccagatgcagtttgtcgacacatgtgatcacaaatcaggcggtgccgatcagaccgacgatttcgcatgtcagcaataagacgacgaaagtaaaagtgtatgcctatgaaaaatgtaaaaaggcagttgtaaagattggcaagaaacgttatgtggcaaccaaaggaaagtataagtccaaatcaaaacgttactgctatactgtaaagataccgagaaccaattccacaggcactttgaaagtatacgttgtgaatgtgaaaggcggaagcccggtgctgcgtgttcatccggtacagaaagtaccagacagtccgattgttgtaagtgcaccaaccggcaaaggaaaggttgtcggcaaggtgaatttggtcggcgcaccaaagaataaggctgccacggtttctaacacaaagaccaaagttgctgcgacagtagccggcaaggtgtataagggaaaggtgaaaaaagatggtacgtttgttataaaaataccaaagctcaaaaagggtacaaagtttaaggtgacggcaagcaaccgatatggcaagagcgtaccgcgggtcagcaaggtcggtaagaaaaagtgatcatattttgcatcacagtgaatagttgcgaaatatagagaaatattttataataaaaggtactattggtttgaaagggaatgcaggagaacaaaacagttgttttcctgcgtttcgttcgttaatattaggacaagcaggaaggagtatgcgcactgcggaagtagtgacagaaagtgaaaagaagaggatatgggaaacagtcgatttaaattttcggtaattataccggtatataatgtggagaattatttggaggagacgattcaatctgttatacatcagacgattggattcaagaaaaatattcagatcattttggtcaatgatggaagtccggatgatagtggtaaaatatgtgagaaatatcagagggaatatccggataacattgtatatgttgaacagaaaaatgcaggtgtcagtgccgctagaaataacggattaaaatatgcagaaggcgaaattatcaattttttggattctgatgacaaatggggaaaaactgcttttaagcgtgcgtatcgcttttttcaaaaatacggaaatgagattgatattgttgccggccgtatcaaatattttgaaatgaaagataattaccatgtattggattataaatttgataacgacaaacttgtggatattcagaaagatcatgaatatatacagctaagtatggcgacaacatttgttcgcgctgaggcattaaaaggacgacaatttgattctcgaatccgttatggagaggactgtcttttgatcaataccatattatttgacaagtgtaaatatggcgttattcgagattgcgtatattattaccgtatgcgtaataccggaacatccgcaatgcaaaacacaatttcccagaagacatggtattttgacacagaaaaacttgtgtttcaacatcttcttgaaatgtccaaagaaaaatttggcaagccgatcaaatatgtacagtatctcgttatgtatgatatgaaatggcggctgcgtactgttgtgccgtcaggtgtgttgacagaggaggagaagaaacagtatttggagcttcttcacgttattttgcaagatattgacgatgatatgatcgctactcagaaaaattgcctaagtctgcattacctgcttgcttatcaattaaaataccaaaaggattgccgggatgaaataacgtttgatggcggtttggtttgttttcatggacagcggttaacgcatatggcaagacgacgttttttgacattagactttgtagatattaaggataatgtactggaaattaccggtcaggcagatttttggatatatgaggatgattataaaattttgtttgaggatcaaaatggaacagagtattatccgacatattatccactaccatttcgaacaagacatggtttgttaggcgattatggtgacgttagaggatatcacgtatccataccgttagccggagtcagaaggcttcgtgccgtatttgaatacaaaaacggtgaaagatgttatatgatgatcggttatggtaagttttgccaattaacgcatgcaatggattcttcgtatggtttatacgatcgccatatcctgcgtgccaagggaaagaccatatatgttcagaaaaaaacaagaaaacgctatcgtaaatgtgagcgcagatattgtttggaactggtaaaaaaaggatattttaaagaatacttttatcgttatgcgacaagagtatttcgtaaaatccacagcaataaaaagatttggttgttgtcagatcgaatcaatttggcacgagacaacggggaagcactgtttcaatacctgaaccggattgacaccggaaatgttgacgtttattttgatatttccaagaaatgcagtgattatgaacgcatgaaacagataggaaaggtagtgccacatggttcatttcgatattgcatgtattttttgtcagcggataagatcatatctgcacatattgatgagtatgtgatcaatgcctttggtgtgatgagagattacttgaaaaacctcttccgatttgattttgtattcttacagcatggactgacgaaggatgatctgtccgggtgggtgaaccgttttaacaagaacatcagcctatttgtgacggcagcgaaaccagagtatcaatccattgtggatggcaattatttttatacagacaaggaagttaagttgaccggttttccaaggtttgacaatcttgtggctgataaaacaaagaagcagatcatcatactgccaacctggagaaagcagcttgcaaactctattgatcaaaagacagggcagcgcatttacaacgatacatttaagaactctgccttctttaagttttatgatcgattgattcaagacgaacgtttgcttgactgtatgcgagagcatggatacaccggtaaattctgtctgcatgtaaatcatatggagcagattggcgattatcatggcaatgatgtgattcagattcatgaaggtgcattgaactatcaaaaagaatttgtggagaatgcgttaatggttacagactattcaagtgtggcatttgattttgcttatatgaagaaaagtctggtgtatgcgcagtttgaccgcgaagccttctttgagggacaaacatacgatgaaggctatttcaattatgaaacggatggttttggtccggtatgctatgattatgagacgactgtgcagtcgatcattgatgcgatcaaacgtgattgtgaaatgtcggaagagtataagaagagagtagacaacttctattacaagacagacacagataactgcaaacgagtatatgaggcaattttagcgattgatcagaataaagaagcgtaaaaagggcatcttatactatttgataaaatagagatatgacgcataaagtgcgcagcagcaacagtttgatcaatatagaagaaagcgagaaagcgaggaaaagaggatcgcacgaatgaagtggataaaaatactatttattggatgctttgtggcgtttatcgggttcacagggcttaagacgatagcaggcaaagaggcgaaaagtctgacagagggcaggagtttgactcaatttccggatctagattattcggaaatgacgaaagattcgtatctttcaaaggttgagaatgcgttttcagatcagctcagcagtcgcgagaataaaatccgccaatattatgatctgacagtaaataagcttcatatgaagtatgccggttcagtttctattggaaaagacaatcaattatttgaacaaccgcaggtgatcaatgactatgcggcatttgaccgcgaagtaaagaaactcgctaaggttgtgaatagagaagctgccaagatcacaaaaaatggcgcaaagtttctttttatcaattatccacgtaaagatgtaggtgctaaacagtatctgccaagttattatccggattctacgaaagattatcaacgatatattcgtatacttcggcaagaattgtcggacgatgtgatattcatcgatgcaaatgagctgtttcaaaaatatgatggagatggattactgtattacaagacagatcatcatgtaaatgcaaatggttcgcagcttgtttatgatgaagtcatgaaatatgtgaaacagcagttcccggcaacccagacaaagtcattgtcagactatcgaatcaagcaaaaggtagttgccggatcctttaaccgtaagattggatatgtagtgtcagccggtaaagaagagattactcttcgaccaaaatggaaactaaaatataaacggctaaacagtaaggcgccgctttttggcaaaggagacacttatgccagtgcgtttatgggtggcgattatgcgtatactgatattacgacacctcagaaggatgccgctaagatcatgatcagcggaagttcctatacgaatgcattggaagcgatgatcattccaagctgcagagagatgatatcgtacgattatcgctataatacgaagtccggtactttggcacaagaagcagcaaggcaatctccggattacgtgatctatataccaaatcaatcagatgctcatttttcctatgagacatttcgtcaacatttgggattaagcaataaggcaggaaaggaatagtatggtttttagtagtgctgtgttcgtttttggatttatgccgctgttgttatttttatattttttggcggaacccaaataccgtaattatatattattgatatttagtctgatcttttatggctggggcggagttaattatttgctgcttatgttagcagtggttatgtcggattatgtatttgcaattgcgatcgcgcagatcaagacacagaaaatacgtaagctgtttgtcgtgttttcagtggtcgtaaatctgggggtgctcggttattacaaatacacgaatttctttattgaaaacatcaatcatttcatcaaaaatgatattaaaattgcgacgatcgtattgccgatcggtatatcgttctttacgtttcaggcgatgagttatgtcattgatgtatatcgtggtgatgttgcagcacagaaaaatccgttttacgttatgttgtatgtatcgctgtttccgcagcttgtagcaggtccgatcgtccgctacaaaaccgtagaaaatgaaattgcacaccgacagatacatatggaggatgttgcagacggactggaacggtttatacttggttttgcaaagaagatcattattgcgaataatgtaggggcattggcagataaaatttttgaaatgaatagtattgatatgccgcttgcctggcttggagcaattgcctatacgctgcagatttactttgatttttcggcgtattcggatatggcgatcggtctgggacgtgtctttgggtttcattttgaggaaaactttaacttcccatatatcgcaaaatcggttggtgacttttggcggcgctggcatatttcattaactacgtggttccgtgactatgtatatattccgctcggtggtaaccgcaaggggatgcctcggatgtatgtgaacatgttcattatatggacacttaccggcatatggcatggcgcagagtggaactttattttgtggggaatgtattattttgtgtttcaggcgattgaaaagttattccttggaaaatggcttgcgaagataccgcgtgtattccagcatatatataccatgtttgttgtgacacttggctgggtattgttccgttgcgattctggattatctcagtgtgtgacttggtttaaggcattgttctcaggtaatgttacgagcgagggaatgtcattgctgcatatgtatgcagtacagtatggtgtttatcttgtacttggtgtgattctttccatgccgatatatcgtgttctgaaggcagcagtctacaagcggatacaaaagaaccgcatctgcaaatgggcatgtgctgcagcaggatatgcggtactgttagcgctgttttatgttagtgtattgtatttggtcaattccacgtacaatccgtttatttactttagattctaggaggtctgagatgaaactgatcgacaagacaacgataaaatttattttggttggaatagtgaatacacttgttggtaccggcgttatgtttttgatgtataatttactgcatgcaagttattggatctcatcagcatcgaattacatcattggtagtattgtgagttacgttctgaacaagtattttacatttcagaataatgagaaatcatttgcgatgatcattaagtttgttatcaatatttccatctgttatctggcagcatatggcgttgccaagccgctggtgcgcatggtattaagcggcgcatctaaaagcatacaggaaaatctggcaatgcttgttggtatgggattgtttgttgtattgaactattttggtcagcggtttatcgtatttaagaaggatgaggcttaatagaggttttgaaactgtcataagtttgcagattaagaaagggctagaggtataggatgagtttattatcaattataataccggcatacaatgaaggtgcattgatccaaaatacggcttcggttgtcgcagatatcatggaaaaacacagtatagattatgaaatcgtatttgtgaatgacggatcaaaagatgcgacatgggatgaaattcaaaaggcacaccggaataatgagaaagtatgcggggtatgtttctcaaggaactttggaaaagaaggcgcagtatttgccggtttggaatatgcgaaaggagactgctgtgtcgttatggactgtgatctgcagcatccaccggagacgatcatagagatgtatcatctgtgggagcgtggatatgaggtcattgagggtgtcaaagcagatcgtggtaaggaaagctttatacataaaatatttgttaaaatgttttatggcatgatgagtgagtccacaggaattgatatgtccagagcctctgatttcaaattgcttgatcgcaaggcggtagatgcctttattgcactgccggagagacatgtttttttcagagcattgtcctcctgggtgggatttaagacaacgagtgtagaatttaatgtacaggaacgtgctcagggagagtcaaagtggtcctttgcatccctgtttcgttatgccatcaataatgtcacatcgttttcaacggcaccaatgcagattgttatgggatgtggaattgttgtgtttatattctctcttattttttcaatatattctatcgtgaaatggtttatgggatactctttggagggattcacaacggttattattttgctgttatttattggaagtgtattgatgtttggccttggaattataggatattatatagctaaaatatatgaagaggttaagcatagaccacgttatattgttagagaaacaactgaggatcattaagaatgatcctcagcgaatagaatggcgatcacgtctgcttagcggataaaattgcgatcgcgccataatgtaaaggttacactgtcgacaagacagtgtttctttttgttataaacgataacgtgcattccgccggcaggagaagtcagctcctgattgttcattttaatgctgcagtcagcatcgatagtattgtactttccctgactgagcaatgagaactgtttagcgtcaatcgtgcagttataagagagcttttccgttccggtatttgagtatagcgctttgccatcatcaattacggcaaggaatgactgacgaaatgtcggtgtttttgatatgccgcattttttgagtatttttttatctgtgcgattaagaaactgtgaaccatcatcgtgtacagacaaaaatgcagtgtatccttttttacggattgcccgcaggtattcggtaaagtcagagcatttcgtgaaacgtctttctgtatttttatagataagatcaaagcgttcctgcttcactgctttgaccgaatctaatttataatgttccgcaaaaacccgattagtccaaaaagtcgggaattctgacagatcgcataacatatattgtgcagagtacttggttgccggttctggagtgatgtatggaacaacaacctgtttcgcacctttggcaacctgagtttctacataattgacgcggtcagtggctgatttataactggttacgacatcataggcaccgtttacaccttgatagaatgtaaatagcagcaatactgtcataccggcactgcgggcaaaatgcagctctttgcggtcgtaagccgtgcctgcaagtccgatggagcatgcaattaccaacaatattgtcacaccgaatgtaacacggtcagtctgacgtcccggagaaaggatcaatgcatattcacaggcaaatgcagctaatccgaagaggatctcagagtaaataagctcttttgctttcttttgataaatatgcagtatgataaagaaagcaagtaacaagatgagaacgatctgctttgtaaataaaaactttgttgcgttagcaaatcgttccgcaatgatcaataaagggtttcggtcatcgacaacactcatcgcatattgcgggtcattcattcgaacggaatgaccgggcgaaaagattaataatgcataaccaatcagcgtaccgatcagactttcaaacatccatgcttttaatttggtcttggtaaaaagagcatagacaatccatccaagcatgatcatgatcaatgcaccggaagtgttttcactgctccaaccggcaacaacggctaatagtataagcgggatctgttgataccaatgttgacatgtgttttgaccatgaataaaatacaggctgtacggtaatagcaaagtgatgatccagacagccccccacatatagttgcatgtaccgacaagccatagacatgtctgtccgatcacatcaacaaaaagccaaatgctgcagggaataaataagtaagtcagtgcggaaatgtttttggaaactcgtgtatgttttgttccgttagcatgcagataaatgcagtacgtaagccacaaaaacattcctgtatttataacgtcaaatagtattttgttttgagagagaaatacgcgtgccaaaaaatgagcgacagagcgtccgttcatattcatgtattgcatatattccttgtgaagcatatcaagcagagatttgccacccatataagtatagtcatcagcaacgtacggggtgaaaaggttaaagcccaaaaatacgagccctgttataataaacagtataataaatgaatgatccagcaggaaaatcgacagttgctgccacttttttttcataatcgttatctccttagcaatattaattatgcgttatgcgcagaaagcgtgcgcaaatatatgattaaatatgaatacacacttcgataatggtagcagaatgcaaatattatgtcaaatatagatagagattacgtcggcgttcattcaaatatcataataggcgtatcgttgaaaaaaagggatgaatatgttaacatgatacgcagattatatgaggacacgatcattataaaaatgcagagaacttaataagtgttataaaagaatggagaacgcgatgcatcatgtagagaaactatgtaatattttatatgtgttattatttggaatcctgttaattgtagtaatggggtctatgtttacgtggtcttttcgcatggtatggatccctccaatatttgtagcattgtttattatatatattacgaaaaagaagagaatattgaaagaagaatggtgttcggtgctttggtatattgtatatggggcgtgtttggtgtttttgatcgcgttttcctttttgtgtgaagtggcaccatcttgggattgggggcaggtgctggaatcggcatcagagtatgtgttgaaagggacgttagatgcaaaagaatattatgcacgttataccaataatcaactttgcctgatttgtatggtaacgttatttcaatggattcgttttgctctgccggatgccaactttgttgattttcaagaaatatccattgtgatcagttgtatattcgtatggctatcgatcgggatgatctatctgatagctaagaaagtgtggggaaaacgcagagcgtgcatcgcaggaatgctggcggccggctgcctgccgttatatatgtacgcacagtttttatatacagatacgccggggatgttgttgctgacgatacagttatatctggggatctgtatttataaaagtcatcgtttttatcggaaactatggctaggcatcttacttggtattgtggcagggattacctatcatatcaaagttattccgtttattgtatttttagccatagtgatcgcattatttttacagaaagagcgctggtatcagaaatgtatactgctattaatgatgagcctgacgttgggtggcgtgattcaatgcattggagtgtattcagatcaatatgcagagggctgttttggaattacagatgcaataaaagatgagtgggagtacccattgacgcactggatcatgatgggattaaacgagaaaagcgatggtggctatatgcaggaagatgttgcatatacggcgacctttgagacaaaaaaagaacgcacggaggaaaatatccgcgttatacttgcaagacttcgctgttttggtgcagctgattacatacaatttatcttttttgataaaatgccacgcacctggggggacagctgttttgcaggggatgactatttgttccgtatgccgtatttgccggagtgtcctttggtacagattatgaaatggaatggaacgtcacactcgtattgcctgatctacacatggacctattatgtgatcttgttttttggtattgtattgtcagggttattggcattgggacaccggggcaggcaggatccgatgatgatcggcaggatcgcgatgatcggtatttccctgtttcagatattgtgggaatgtaacagccgctatgtgatcacatttttgccgatgatgatattaatggcacttgatggctattttacttgtaaacaacgcctcacacaggcagattgacttgacaggtgaaatatgataccctcaacttgggcgtttgccctaagaagttaatggaggactactactattatgaagataggaattatttcgatcaatgcgcatacaaaagtattgaattttgcgtcaccgctgcattcttatgcatttcagcagtttttgaaaatgcatggatatgacagtgtgatcattgattataaaccaaactattatggacaatataatccgagacacccactgttttaccagttgtctcatccgatgaaaaataaaaagaaacagcgtgcagcattgaaaaaatggcttaagctgtttattccgcgtcagatccgttttgataaatttcagcgttttatcgacaagtattatattacaacggacgagtgctataatgagaatacactcgatacaaacgatctgggactggactgttatatctgtgcgacagatgttatttggaaatgtaataagaaagccggatttgacagaggatttttcttagcctgcgattcgatgaagggcaaatacaagatcgcatatgcggctagccgtggtccggtagtagagctggaagaggacaagcgtaaaacctttattgagtacatttcacagtttcaaaacatatcgatccgcgagaaaagttttggggagtatattaagcggatttccggtatcgagacaacgcatgtgttagatccggtattgcttcatgacaagagcttttatgagccgatcattcagcggccaaagagaaagaaaggctatgtactgctctatgttgttatggaaagtgcgatcccattgatcgagcttgcggtcgattttgccaaagagcatgatctggaagtgatcgaacttagcgagaatctggcagatgccaaaattccggcaggaacacgacataaagtagtttatgatattggtatcgaggagtggcttggttatatggatgaagcagagtatattttcaccaattctttccatgcaacctgtttctccatcttattccataagcagttttttgtcggaaagcgtaacggcgacaaaattttgtctgtcatggaaatgtttggactttcggatcgtcgtattgaagactgttttgatggacataagtgcattgccgacaatattgattttgcgccggtggaagagctgcgcaaaggctatgtagagagttctacgaagtttattttggatgcactgaagcaggcagaacagagtctggagggataatatgtggattgcagaccgttggaaagattatgaagttattgatacttcaaatggagagaagctggagcgctggggtgattatattttagtgcgtccggatccacaggttatttggaatacgccacataaagagccgcgttggaagcaaaagaacggacattatcatcgcagcaatcgtggcggcggtgaatgggagttttttgatctcccgaagacatggaagattcattatggagaacttgcgtttcatttgcagccatttcagtttaagcacacgggactttttccggagcaggcagtgaactgggattggtttggtgacaagatccgtcaggccaacagaccgatcaaggtattaaatttatttgcttatacaggtggagcaacgcttgcagcagcggcagcaggagcttctgtgacacatgtggatgcgtccaaaggaatggtcgcttgggctaaggacaacgcagcactgtccggtttatcggacaagccgatccgctggctggtagatgactgcgtgaaatttgtggagcgtgagatccgccgtggcaatcattacgatggaattattatggatccgccttcttatggaagagggcctaagggcgagatatggaagatcgaagaaaagatttttccatttgtggaattgtgtacaaaagtgttaagtaaggatccgttgtttttcctgatcaattcctatacgaccggattacagccggcggtattgtcttatatgatgaatactgcgctggtgccaaagtttggtggtcatgtggatgcacaggagatcggattgccggtaagcagcaatgggctggtattgccgtgtggtgcttccggacgttgggagaggagtaagtcctaatgaagggcgataagcgcagaatcaagaaaatagtcacaggccttgtgatcttggtactgtttgggatcacgttatccggtgtgcggatccgttcggttggtcagtacaaacaagagcagaagcagttagcaaatgatctgtttgctacgccggataagacgcagacggacaacggcactgtatcagagacggagccaccggacgaggtcggtgcatctgaggcaccgggaagaacgtcaacgtcagaaccggggaaacagacgacaaagcctaaaacggtgaagaaatcgccgcaacgtacgccggggacggataacaccgcttcgccacagccttctgcgaaacaaaaaccgtctgtaaagaggacgacaaagccgttgaaggcacggaaagcgaccgggaagccgtcgaccaaaacgaagcggtcatcgtcggtaccgaaagcaacgaagaagccatccgctgcgcagaaagcgacagcaaaacctgcagcacttacctgtacgataacgatccgctgtgacagtttacggaagcattgggattcgttatcggataaagtaaaggccaagatgccggagaacggtctgtttcttaagaagacaacggtaaatatcacggcatccgatacggtatattcgatcttacagaaggtgtgcaaggcgaaaaatattgcgcttgatgcagagtatagtacgatgttttcgacagagtatattcggggcatcggatatttatatgaaaaggaagccggcgatatgagtggctggctgtaccgggtaaatggcaagctgcctaattatggggcttccaattattcagtcaaagctggagatcatatcgaatggctgtatacttgtaccggaaaggtcgagtaggaaataggaaagagaatgtagtaaggaggaagaatgcaaaggtcagcgtttgaatcatttcatccgtgggtgatatttggatatttggcagcagtacttgctgtgacaatgtttacaatgcatcctgtaatgatcgtgacgtcctttgtgatctccttagtatattctctttttttgtgtgggcgcgtcgtgtggaaaagaagtgtaatgaccggactgggtgtggcagtgtttactatgggaatcctgccgctatttcgacataacggtgcaacgccattgttttacatcaacgacatggcagtgacccgggaaaacattttgtttggtggaatgatgacattgctgttgctggcggtactacaatggttttatgtatggaatgagctctttggggcagagaagatcatgtatctgatcgggcgtttcttccctgctgtttcactggtgatcacgatgacacttcgatatctgccgttattagagcgcagaatggatcagattcgtgccggggaacgcgggatgggatccgggagcagtgtgcttcggcggctctcggtgcttttgtcgtggtcgttagaggattcgatagagacatcgacagcgatggaaacgagaggctatgggatcggcaggagatcttcgtttcatttgtttcactttcggaagcgggatgcagtcatgctcgtggtttttacaggtcttacggctgttattatcggccagtttcttcgtcagaaagcatcctgccagtattatccggtgatccgatatgcaccgcttggtcagatgtatttgctgccggctggttttggattgctggcaatgctgccacttgtatatgatgtgtggcagtggatggttcgttctttggaggaacgaaagcaggggaatacggatgctcacatagcgatggcgcagtatttagagcagacctatggtgttccttatcatgaacgaaaagcaagggaaacgagagaaggtgagatgtgatggcagttatggagtttgcaaatgtgtcgtttcgatatccgacaagtaaagaacaggtacttaagaaggtatcttttcaggtgcaaaagggcgaatttattgttctttgcggggcatccggcagcggtaaaacgaccttgttaaaacatatgatcaaaagccagataccgatagggattgggagcggatcgatgtattttgcgggggctgatattgaaacgatggatgaccgggtcgcagcatcgcagatcgcctatgtcggccaggatccggaacacaatacggtgacagattatgtatggcaggaacttgctttcggattggagagtctggggatgagtgttccacagatgcggagacggactgcggagatggcggaatatttcgggttagaatcgctatttcggaagcgtacggcagccttgtcaggtggacagaagcagttggtgcagttagcggcagcaatggtcgtacagccgaagctgttagtattagatgagccgacctcacagcttgatcccatggaagcaggacgttttttggatacattagccaagctgcatgaagaatttggggtgaccatatttttatcggaacagcggttagacggtgttttgccgatagcggaccgcgttttcgtgatggaggacggtacagtgacagataccacaccacgtagagttgggcatttgctgaaagaacgtcatgatccggtttatgcagcgttgccaatagcggctaaaacagcactatgttgtggggagtctggggacttgccgcttactgtgcgggagggaaaagtatggctgcgagactatttgaaagcacattccgaagtaagcttggagacaattgtagaaagaataacaaaaatggcaccggaaatatttgtttcggagtatttcagtaacgcggacatcgagaagccggatatacaacgggaagacagaacgacgatccttcatgcaagtcaggtatcgtatggatatgaaaagggaaagccggttctccgtgactttgactggaagctgccaatgggcagtatctattgcattatgggcagcaatggctccggcaagagcacagcactcaaagtgatggccggcatatataagccacagcggggcagggtgatcacaaaggcgaaatgtacgtatctgccgcaaaatccaaaagcagtcttttcggagacaacggtagaagaggaactgacagagtttttgtaccgcagaggtagcagagaagcagaagttatcgagactgtagagcaaatgttacgttttgtggaactttgtgaggtgcggcagagacatccttatgacttgagtggtggtcaaatgcagaggcttgcggttgcgaaggcactgcttaccaaaccggagatcttattactggatgagccgacgaagggattggatgctgccttaaaggagaaattgggacagtatattcaaaaaattgtggcaaccggagtgacagtcgtgatcgtgtcgcatgatgtagaattttgtgcagattatgctacagactgtgctttattatttgatgggaacttgatcggagcggatgctgccaactgtttttttgcggacaattatttttatacgcctgccgtacagcggttgtttgccaacgaaaaggaggatgcgtgatgcgaaaggcacgggatgtttcgtatcggagaaaatttgacctcaagcaggtggaaaaagcgcagaataagcggcaatggattttgctcggtgtagtgctcagcttgctggcgtgtctggctgttgcagggactactgctttagtaacaaagcattatatgctgcttagtgctgtcgtcttggtcggcggtctgctgccaatgttttttgtctttgaatacagaagaccgcaggcaagagagatcgtgacgcttgccattatgacggcactctgcgtcagtgtcaacgagctgtgcagtcatacgatcccactccatgccggaacggcatttgtcattttgacgggaacgtgtttaggcccggaggctggctttatggttggtgctttaagcagactgctgtgcaacttttttgacggacaggggccttggaccccgtggcagatgttgacgtggggactgctagggatctgttttggcgttatttattcgcggggaaaacgctttcataacccgatgcgctttgtgttaggattggcagttatggcatttatcacagtgtttgttgtgtacggtggcattatgaattttgcagcgtggttaatggatcatgcaatgagtccgcaaaacagtgcactcacgaaggaagaattgctaatggtctatgcagcgggcgttccgtatgatcttacccacgccggaacaacggctctt

SEQ ID NO: 990 - DNA, 31696 bp, unidentified
  source 1..31696: mol_type = unassigned DNA
  misc_difference 4452: note = a, c, g, or t
  misc_difference 4453: note = a, c, g, or t
  misc_difference 4454: note = a, c, g, or t
  misc_difference 4455: note = a, c, g, or t
  misc_difference 4456: note = a, c, g, or t
  misc_difference 4457: note = a, c, g, or t
  misc_difference 4458: note = a, c, g, or t
  misc_difference 4459: note = a, c, g, or t
  misc_difference 4460: note = a, c, g, or t
  misc_difference 4461: note = a, c, g, or t
  misc_difference 11010: note = a, c, g, or t
  misc_difference 11011: note = a, c, g, or t
  misc_difference 11012: note = a, c, g, or t
  misc_difference 11013: note = a, c, g, or t
  misc_difference 11014: note = a, c, g, or t
  misc_difference 11015: note = a, c, g, or t
  misc_difference 11016: note = a, c, g, or t
  misc_difference 11017: note = a, c, g, or t
  misc_difference 11018: note = a, c, g, or t
  misc_difference 11019: note = a, c, g, or t
  misc_difference 16899: note = a, c, g, or t
  misc_difference 16900: note = a, c, g, or t
  misc_difference 16901: note = a, c, g, or t
  misc_difference 16902: note = a, c, g, or t
  misc_difference 16903: note = a, c, g, or t
  misc_difference 16904: note = a, c, g, or t
  misc_difference 16905: note = a, c, g, or t
  misc_difference 16906: note = a, c, g, or t
  misc_difference 16907: note = a, c, g, or t
  misc_difference 16908: note = a, c, g, or t
atggctgctgcacaatattacacttgttataataatgaggtcgttatgcttaataatttaaaaaaaattcgtgaatcaaaaggtatgtcacaagagtttgttgcgaaagctcttaacgtgtcaagacaatccgtttctaaatgggaaaataataaagcttttccagacatagaaaatattaagcttttatcgcaactttatcaaatctctatagatgaaatacttgataataacataccatctgataaaaatattaggacagttgactttgattcccacatgcatgagaaaaatatttatcgtgctgtctacttattaacaattgtactcattacttctagctttatttcagtaataggattcttgagcgctattgttattttattaaaaacatggagaaagaaatatccatactatttttatgtcttatgcatcatctgcttagtcatcaatataataaacatggggatcttttttaatagtttattgtttcatattggtattacagtgattcaataggaaggatgtcatattaccgcaacttgtaaactattgtttactacttttgtttttacccctgttgaatggctcaatcccatatacttgtatataaaactcatagttgcttgtttgcttgagttcctttttagcacacagttatatatgtttcctttataacaagtatatgatggagaatttacagaagagatgttgttatccttaatcacaacattatattctgctttccatgcaaaaatagattcataggcaatatgataagacctatttttcaatgatcaagaaactgtaagtagaattacaatcaatctttggtgagtttttttcataaatatagtcctccacaaaatttttgacaggtatgaattttgacacatacaaactgatttggaaagcaactagcactttacattatgtatatagtgcttaacatattgaaaaattctcctgatgcattgcatataggaaaagaaaatatttcgtcatcgtaaagatttatcagaattttggagttatactggaaaagtgcaaattccggtcgatcggggcatccataccagaactagtggggcctcccggccatcctgctcctcccgttcctgtgggggatgaacagggtcacgtacgcacaggccgccgcggatctgctgacaacagctgtgaccgtgttttcgcggtgcagatccaccgccagttaaagcagcccgtcgcctgacggactgctgcaacctgcggattgccctaacttccaagctcccactgctccgctttctttctcacatccacaaacctgcggtaaatcccttcttccttcaggagttcttcatgggttcccctctgcgcgatcgttccgtcctccaccaccagaatctggtcagcatgctcaatggttgccaggcggtgggcgatggtgatgaccgtcctgccctttgtcagttctgtgagcgcttcctgaatcagatgttcgttctccggatcgatactcgccgtggcttcatcgaggatgatgaccggcgcatcctttaagatcgcccgggcaatggaaatcctctgcttttccccgccggacagcgtaccgccgccttcgccgatcaccgtgtcatatccgttgggcagtgccatgataaagtcatggcagcgtgcagcctttgccgcgtttatgatttcctccccggtggcatccggctttccgaaacggatgttgttccttatcgtatcgtggaagagatagacattctggaataccatggagatattcgcaagcaggctgtcgcaggtaaactctcgtacatcatgccctcccatgcgcacactcccgccctgtacatcatagaaacgggcgatcagactgcagatggtggtctttccgctgccggaaggcccgacgatggctgttgtggtatgttccgggatgcaaaagcttacatttttcaggaccttgcgcctattattttctccatagctgaaatcaacatttttaaattcaatgtcataatgacacagttcgatcttctttccgtcccggtcaatataatttccttccttcagggcttcaagctgatccatggtcgtatcgatcacaccgagtacatgggcgctgtcgctgatgggctccagcccggacaggatgctgaaagagaagaacacaaacatcagcatataggagaaaggcatttcccccgtcattcccagatagaacgccgcacccgccataaatacagacgccgtcttgatcgccagcagatgcaggcagttcgccggggtatatccccactcaatcttcaggcagatatcacggctgtcgctgcatgccttttttacagccgccatggacgcaccgccctggccgaaagatttgaccaccggaagtcctctggcgtactcaaggattgccgcggtaagatccttccccgcctgtgccgataccggagcgttcttcacactgtgccgggagaccagaagcaggaacaggaaggaaatggctgctcctgccagtgcaattaggcagacagccgggctgaaaaagagcaggaaaaggaaaatgcataggaagtttaagtaccctcccacaaaagtatccaccatccgcatccccatattttccagagaatgaagccctgtcgtaatagagtttagaatgttcccggtatctacctgccggaaatagcccagagatacccgcttcagggcgtcgccgatggcaagccggtctctggcaaccagctcatagctgatcccttcctgaaatctggcgcgcagatagtcaaaaagaaaccgcagcagcacaaggcagaggatgataccggtgctcagccagatccagttcttgtcaaatccagtccctttcctctcactctcgatcagcataccgacggtataagccgctgccatggtcggcattgccgcaaaccatgtggagaggaaggaaaagaaaaatcccatataaagcctgcttttaaactccccgcaccagttgatgatccgctttactgtccggaacatatcaggtcacctcctttttctctccgcattttgtgcgcctcatcggaaaccgcccatccttttgcaccgatatgggctttccacatctcacagtacagagggcaggtcaaaaggagctgctcctgcgttccctgtgcgatgatcctgccattatccaatactgcgatacgatccgctccccggatcgtggagagacggtgggcgatcacaagcagtgtcttccccctcgtcagctctgtgatactcttctggagcttatcttcattttccgggtctgtaaaagccgtagcctcgtcaaggataacgatcggcgcgttcttgagcatcatcctggcgatggcgacccgctgcttctccccgccggaaagccgcttcccggcctcccctgccggcgtgtcgtacccattaggcagtttccggatgaattcatcgcactgtgccgcttttgccgcggcaaagacttcctcatcacttgccgcagggttcccgatgcggatattttctttcagggaacaacggaagagaaagttatcctgtgtgacaaaactgaccatcccggacagctccgacagggagtattctttgaggctctttcctccaagaaggatctccccgctgtccggatcccagaacctcgcgatcaagcgtgctacagtggacttaccgccgccggacggccctaccagcgctgtgaagctgccgggtgagagttttaagttaatgccgtggagcacctcctctttgcctttcccataagaaaatcttacattcctaagttctataccataagccgcggcagaagcctgtgaaaaagccgggcttttggtctcttcttccgctgctccttgcggttccggcagttcttcaagctccagatacgcctgcagctcttccaccgtcatctgtatttccttgatactgttggagaacacttccagctttgccagggatgtgaccatggacatggacaacatcacgcacagagccgcctgccctgcgctgacagatcctgacacagccaaaaacaggctcacggggagcgtccccagcagagtggacggaaacagtgcgaaagccagcttgaacgtcacccatgtggagcttagccatttcagcacgaatgtcttataatccatgatcgcgccggcaaatttctcataggaagttccggcacgtccgaaggccttgatgacctcgatcccctccacatactccacgatcgtgctgctcatccgggcatttgcctgattgtatttgtcgaagttttgcccactgatccgaaaagtcagtatcatgcagaccagagaaagcgggaccgtgaccagagatgccagagccactctgggatcgatcagcgccagtgcaatcaagcttaaaaccggaagagcgatgtgccctgccccttccgggatcatatgcgccagcggcggnnnnnnnnnnttcgatcttatccaccatcacattcttgatctccccgatggtatgcgccgttacttcacccagcggcgcgcgcaggaaacggtctgccacctgcagcctcagcttctcaagaatatggtacgccgcatagtgtgacagcccggttgaaagcccgaaaaatactacttttacaatgtaggatatcagcgccagtgagcaccagaaaacaatgacatgtactgtgactgtttccgaaataaacctttcaatcacccggtacatacagaaatagggcaaaagccccgctaagacgctgataacagataaacaagtggaacagaatagttttccccggttccctgcggcataatcgagcaggcaggagaaccagccctgtttcttctcatccatatcgtacactcctttccgtcagaggcggttttcctgcgtatagcagtttatagcctttgacgttcttagtgtacaatctttcgttggatacgtccgctccggtcagaccggactgctccatttggttcagaaaattttccgatactgcgcaggagacatccccattgccttccgaaatgcagcagaaaacttactgggactgtcataccccaccatcccggcgatctgtgccacgctgtagtccttttccgttttcaaaagcacggcggcgcggttcatccggtactgcgcaagccacattccgatggcggtcccgtatatggagcgaaagcattttttcaatgtggtcagtgagatcccgaaacgttccgccagttcctcctgggtatagctttctgctggatgttcttccagaaattttctgacagctttcgttttctccacatgggctttataaaaatacggtttctccccgatggattccggtagttccagagcatccagatacagcagaagttccatgatcttcactttaaaatagggaagcctgatcttctgcggcaccgcgtagagctcgctgaaaatatgttcaatggcgtccattccatggatgacaagagggtacttatcccggcagtatttctcctgcaatgcatatacatctaccggaaaatcccggatctcctgcggcagcgcgcggctggccgctgcaaggtcaaaggagatcatcgcgccatggtaatgggaaaggggaagcacaaaacgccctgtgtgggtaagccggcggtccagtttgagatcccccgcctccacataggagtatgcgtcactctttgccgcatactcaagcctcccctcacggcagtggtcaatacacaggatctctctgcccggatggaagtcagaatcataatactgcatatggaaatcattgtaagccagcgtgacaccggggaacacgtcatagatggtcatcctgccctccccggtctcgttacggaattcatatacactgcacccgctttttttcgtcaaaagggcggcatcatcacagtggctgaaaacatctgtcatgggtgtttcctcctttgacattcagcatagccttcctttggttagttgtcaataactgtactgggcaaagaataatcaaccctccggattgattttgtttattgtccatgcacagctatgctgctgtaattctacaaggtggcgatataatccatcttcctctatgagttcagaaggcgcgccctgctggacaacttttccctgttccagaacaaccaccttgtccgcaccggcaaccgtacgcatacgatgagcaactacaaggactgtctttccttttgtgagccgggtgatcgccttttgcacagaggtttcattttctgcatcaagggacgctgtggcctcatcaagaaggataacaggtgcatcttttagcaaagcccttgcaatcgagattcgctggcgttcaccgccagacagagtagaaccgttttctccgattactgtctgatatccctgtgggaaacgggatatgaattcatcgcagcatgcggcctttgaggctgcaatgacttcctcatcggtggcgcttcttcggccaatgcggatattctccatgatcgtatctccgaacaggactacatcctgaaagacaatcgagtaattggaaagcagcgtttccggatcaaccgtccggatattaatattgccaagtctgatctctccacttgctgcatcccaaaagcgggccgccagctttatggctgtacttttaccgcttccggacggaccgactaaggctgttacttctccctgttttgccgtaaaacttacattcttcaaaacagtttctccgcccttgtaggaaaaagaaacatggtcaaaagtgatgtcacatccgctatttgcacagctgtccgctccagataactctggctggttttccatttcttttatgcgtttgatctgcagattagcgttgaagatttcagataactgcatcattacgccgcttagtggttcatatacccttgatgccgccagcaggaaaagtaaataagtaaacaaatctgtatcgccgccaatcagcaatgtagttcccactaaaacaaccagggggaggccaagcctcaaaagcatttgagcggaagtcagcagcgtaccggaggtaagttctgccttggcggacgcattgaccacatcttgtaatttcctttcaagttcttttaaatatttatctgtttgattacaggttttaaggtctgcaatattgtccagaaattcctggataccatcggcggcagaaagcctcgcctccatccgtctggttcccattctgtcctgcagcttcttgctgcccactatcagcagtaaggctgcgggggcaacactaaaaagcgccagtgccatgcgccagtccatagcaaataacccgatcataatgaaaatgatgctgatgacggaaccgatcatctttggtatggcgccggaaaaagtacgttccaactcgttacagtcactcatcatggaggtagtcatttccgcaagatcatgttctccaaaataggccagagggagtttccgaagcttctctgccagagtaatacgccgtgcagcactttcttcatatgccgcaatgtaggtacagcggtattcaataaaattcgcaatgaaaatgacagttacgctggccagtgcaagaattgtatagagccaaatatcaagagttccagccgtttctcctaaaagaggcttacacacttcttgcaaaagcatgaggcacagtgccatcgggacaaacaagctcaaacttgaaaatgcagaggcgataccgcccttttttaaatctgccgcacctttatcgctaagggcaaacaaacgtttaagcatgaaccatcgcctcctttcctctgcttgccgcactggctgcggcatctggggacacccttgcggcatttcctaaattccatgcagcagagcgctgatactcccgccacatgtttgcataaatgccatccatcttcagcagttcttcgtgcgttcctgtttcaacgatttttccgtcagccatgacaaaaataaaatccgcattttgcactgtagtcagccggtgggcgatcatcagaaccgttttgccgcacagtaaatgctcaaaggccttttggatctggtactcattctcggcatccgcaaaggaagttgcctcgtctaaaatgatgatcggcgcatttttcaaaatagcccttgccaaagccagccgctggacttctccaccggaaagatagatcccttctgttccaatgaccgtatgaatgccttgtggaaatttatgaatgatatcatcgcatctggcctgatgcagtgctgccaggacctcatcctccgtcgcagcagggcaggacattcggacattttccaaaatgctggtcttaaacagttttgttgtttggagtacaaatgctgtcttctccgaaagggcttcatctgtaatatcccggacatctacgccgcctattttaatactgcctttatccacgtcataaaaccgtgggatcaggcttgcagctgtcgttttcccagatccggacgcacctacaagcgcataagtctttccggacggaagctcaaatgacaggtctcttaacgccggcgccggcgcccccggataggtaaaagtaacatgggaaaaagtgacggtattcccatccggcactgacggatgctttgttttaaccagcggtttttcttctaaaagtgtatcgatcctcctgaccgcttcctccgctgtaattttgtaagaggaaacgtacatgattttattgatcattcctgcacaagccggtgtgaacaggatataaaacagccagttgatcagaaatccccgataatccgcggttccggaaaggaacagcaggccaaaagggatcaaaagcaggaatgaagcattgaccagcgtataaaaaatactcataggccactggcagacaagagcaaaggccgtgatattttccttgtagctcagaatggaacggtaaaaacttttgaaagaataaatggtctgctgaaatacttttacaacaggaattcccctcacatactcaacagcttcgcggttcatggtctctccggcatcctgtacctgtttgatgtatttcggggcggtagttcccatgacagttccctgtacggcaaagcccagtgccagggggatgaggctgagcagccccaggcgccagtcaaagataaacaggaaagaaaaaataataaacggtgtgacaaacgcaccggctaaatccggtaactgatgtgcgataaatgtctctgtggaatcagcgttttcatcaatcactttgcggattttaccgcttccctgcataccgaaaaacccaagcggcaatgttgtcaaatgttttaaaacagccattttcatgttctttgcaatacaaaaagccgccaaatgagagcaaagcagcgagacgaagtagagcaaaaacccacctgccgcaaacgccacggcaaaccatgcataccgcagcaatgcagatgtggaaacctggccaagatcaggcagaaccataaatatttctctcgccgcgaaccagagccagatgaatgggcaaagtgaaaaaaacgtactgacagcagaaagcgcgcaggaaagaacaactaagtatttcctgttccctgcaaactgcaacaggcgcgatattccacttgcctgctttttttgtgtcatagctggacacccctttccaaatgtgatttgcatttttactataattatgttatcttttaagttagaaatagctaacttgtgtttacgatagcgtttatttttactctggtcaatgcaatcgacgatctttgtgccggcagccgaaaaggttgtgccagaagccgaaaaagaggtgtttcttgtgggaaatatattagatcagctatttgaacctcagtttaaacagatatctttataccctgcttcgggcagcgatcagctcaaaggaagtggcatcacttatcgccctgcgccggatgtgggggacggatactattgggtgcatcctatccgtgacttgtgtgtagtggctatagcagacctgacttttaagaaagagacagagttaaattatgaccacccctctttcctcacaataggaaattatgcatctccgctggtaccatattttcaggggaatacatctgacgtttactatgtccgatgtacgcggacagaagaccatctggcaggatatgtcaataatgcgtcaagatttcgggcaggtatatcatgtggggaaaccatacgtctggtctctgtcacaatgctgccggattactttcgctccttcctgcaaaaaaatttttcggtagaccagcagtcattgatccattccattgaggggctggcaggcagaacatctatgccggaactggagtatctgttcacacagatctgccgggctgaaccgactgtccagaatggaagcctttattttgagagtaaagtgctggaactgatttccttgctgcagatgcaacaagaacatcaaaaagcatttccagaagtgtcagcattggatgaagctacggttgccatggtacgccgtttagcagtttttttggagagccactgtgaccaacatcttacacttgagacattaggaaaaatattttataccaataaaaataagctttcctacctctttcgtctggtctataacgaaagcattcctgcatatattcagaaaatgcgtttagagaaggcacaaaagcaattggagcatccggggatcagtatttatgaaattgccagttctgtggggttcaaaaatcaggggagtttttcagagtggtttaaaaaagaaaccggccttacaccatccgaataccgctccggcgcgggatctggactggtctgaccatatccgggtaaccagcaagggatatatgctcggttatcatgatatgaggagcgacggcatccgtttcccgcaccggtttctggcaaagatcggcgacaaatggatgaagatggctgtacacaagatggactttggcgaataaggcttttttactttaattcccgggatgcgttccacattgccgcgtattttccgccctccccgatcagctcgtcatgggtannnnnnnnnnccgccgtccagcacgaggatccggtccgcgctgcgtatgatggggagtgtatgagcgatcatgaccaccgtcttatccgcgcttagaaggcgcgccaccgcctgcttgacaagaagctcattctcgatatcaagggaggctgttgcttcatcaagcaggagcaggggactgtttttcaggatggcccgcgccacagaaagacgctgtctctcgccgcctgaaagccgattcccgttctccccgaccatcgtgtcatatccgtgttccatctttcttataaaagtatcacagttcgccagccggcacgcttcttcaatctccgcatccgtggcgccgcgccttgcatatcggatattctcccgcacggtatcattgaacaaaaatacatcctgatccacaaggctgatccgggagagcacctgctccgccggatatccggcaatgtcctgtccgccgatggtgatctgcccgccctggggcgtataatacttgcagatcaggttcaggatggtagacttgcccgcgccggaatcgccgaccacggcggtcaggcttcgctccggtatggtaaaggaggcgtgtgtcagcacaggttctccctccttgtaagagaaatccacgtcctgaaaccggatctcggttcctgcagccgtcagatttcgtctggctgaagcgtgtacgatatctgtccgcgtctcttcctctgtcttctcctcttcctctgcgaagatcccgctgatcttcaccttcgacaggaggagattccggtatgctgtcagatcgataaaaagcgtcatattcaccttgcctgcaaacaggggcagcatgatgagcaggatgagcgctgccggctccagcgcgccggaaagccacgcccgcacagacaggacgatggcaagcgccagggcgatatagcttaaatagttgaacccaaagccgatagggagcactgctttttcataatcatagctgatattggaataagatttcatcgcctctgtcactgccctgtttttcgtccccaccagcccgtaggagcgcagtgtctggctcccggtcagatactccgtgatcgcgctgacattctcctccctcgcctggttcttcctcgtaccgtatttctgtacctgacggatggacagcgccatggcagggatgacaaacagcgtggacgccagcataatcagtccgatcggcacatacagagtacagccatagagtccgatcatcagcagaaggatgctgtatttggtgatgtccgccaccttatgggtgaggatctgttcataatccgctacctcactggtcgccgcattgatgtagaatccggtgcggtttttggtaaagagcgacaaggggatgcgtttcagcttatcgcccagggcgatgcgcacccggcggctcacatcagagcccccgatctggctgcctgtataggacgtagtatagagcgccagacgcaggacaaagatcagcgtgagcatcccggtggctgtcaggatatccccgaagtccactgtctgcccgaagatcaggtcaagcacccggaataatacgagaaagctgcatccactcagaagcccctcagccactacccctgccacagacaactttagttttctgcccatactgaaaatatctgttcccgatttcatgccaaagcgcctcctttctctgcctgccgcaccgtctgccgtgctgtttctccggcctttccatccctgcttttcagttcataccggatatttcttgccgcatgataatcctcccatgcttttctgaaatacacactattctcaatcatatcttcaaaacttcctgttctgctgatcccctggtcttccaccacggcgatgcggtcgcagttctttacgatacccagccggtgggcgacgataatgactgtcttgccccggcacaggttttcaatggcacggtcgatctccagctggttctccggatccgccgcgctggtcgcctcatcgagaatgaggatgggcgcgtttttcaggattgcccgggcaatacagatcctctgcttctgccctccggagaaacgggtcccatagctccccactttcgtctcatatccgtccggcaaggacataatgaactggtcgatctgcgcctcccttgcggcggcacgcactctctcaagggtggcggtccggtcgcccatagcgatattctcatacacgctgcctctggtaaggaagctctgctggaagacaacggatatattttttaataattcctcatagtcaatatccctcacatccactccgccgatcaggaccgcgccgtctgttacgtcgtagaaccgggaaataagctgcacaagggtggtctttcccgcaccggattcccccacaaacgccatacgttccccatgggcgatatggatgctgcagttttgcagcaccggattcccgtccgcataggcaaaggatacttctcgcacttcaatatcctgcttctccgggaacgccctgcctcctccgaacaccggcgtatccaggatctccttcacctgccccactccgtttagcacataggagaaattcgacgccagctcctgaagcggacggatgtcagtcaggtactgggttcctacaaatgcgaacaaaaggaatacgcccgcggtcacttggccatgcacatacatccatccgccgagaggcacaaggaacaggatgccgcattccaaaagcaccacatacgcggcatacagtggtcccgttgcccgggagatctctccccacatccggtgctgttcctccacagcctgggaatatttccggaacgaccgggatcccatctgaaacgccttgatcagccgcatgccattcacatattcatggatggaggaggaaagattcccactggctgtgtttacctgcggcatgaatttagaaaaccgcgtaaacatcacgatcatcacgatcacgacaatgacaagggggatcatgctgaccaatgccagcggcacgttcacagacagcagatacaggaacataaccaccgggccggacaggtacagcaccagttccggcagattgtgcgccagaaacagctccagcttctcgatgctctcattcatcacatatttgatctccccggtgttcctttcattcaatgctcccagaggcatctttgccatatgctccgtcaccatgcaccgcaccttgaacagcgtgttgtaagcgccccggtgggaagacagcgtcgctgccagcgcgaaaagacatctaagcgccattgatacaagcaggatcgctgcccacttcagggcataggacaggtcacagcctgcgcccgcaaccgcgtcgatgatcttgtaaaaggcaaagtaggggatgaccgaccccagacttgccagcagggagagccccacagaagcatagatataccacctgtcgcgtcccgcccattccatcagcagggaaaatccctttttctcagatttcaaaatatcttctcctttctgctataaaagtgttacagtgtgaatcctaaccaagagttcagttgtgttagcctcaacttactaaaaggattgtaaatcgtaatctgccctgttacaatagacacagagaagatacgtctgatacgcatgaaaaaacgtccgatacgcacagcggatcatttcagaaacaaaaatgggggatatttatgaaggctgctgatgattacagaaaattatttgaagaaatgcactttacgccctgcccggctccggatggatttccgaggatgggggaatgctggcgcttaaactctgcaggcggcgggggctattactggctctatgacgcaggcgggcgctatatcataaagatccatgatttctggttccgggaggataccatattagatatgcgtttccccgaagcgctgagtgttacatggtatgaatccatttccggtgaggaaatgatgccctaccggagcctgaactcccatgtggtcaaaagcttcctcggcggatacgagccgttccgcgcactgatccaccgcaacgtccccatccgctccatcggcatcgagtaccgcccttcctactatgatgcctatctgcgggaaaccttcgggccatcctatcagaatgccgcggaggcattccgcagtattgatgagacacgggatttcccgcagatggcggagcttctgaaacagctctggcactatcaggggcaggggcttcccgccaccttgtactacgatgccaaggcggcgtaagtcctctcccttgtatttgagcggcacaggaaccttaacaaaaagaaggcggcgccgctgccggaaacagaccgggcagtccttgacagccttgctgcctatatcggggatcactatgcggacgaccttaccattgaaaagctctcccgcatcgcctgcatggggaccaccaagctgaagcggtgctttaagatttattttgagtgcacggtcaccgaatatatccagcaagtgcgtattgatcaggcagagcacctgcttgcctatacagacctccctgtaaaagatgtggcagaagctgtgggatactctgccgccgggcgttttgccgagctgttctgccggataaaaggaacgcttcccgccgaataccgaaggattgcgaaaagccggacagcggtttgagattgctcttcaaaccgctgtctcctcaatttacagcgaccagcccactgcctcgctcctctgttgccagaaccttcggtaaattccctcttcacccagaagttccccatgttttcccttctgcacgatcttgccctgatcgatgaccacgatctggtctgcttcccgcacggtagtgagccggtgggcgatagtgatcaatgtcttgccctctgtcagctcccggatcgcgcccatgagcgcctgctcgttctctgggtccacgctgctggtggcctcatcgaggatgatgaccggcgcgtcctttaagatcgcccgcgcgatggagatgcgctgcttttccccgccggacagggtggaaccgccctctccgatgaccgtgtcatagccgtcggggaattccatgataaactcatggcatctggcgcgcttcgccgccttgatgatctgctcccgcgtggcggcggggttgccgaagcggatgttattctcgatggtatcatggaagagatagacattctggaataccatggagatatttctgagcaggctgtcggccgtgtagccctttacatcctgccctccgatgagcacctgcccttcctgcacatcccagaaacgggcgatcaggttgcacagtgtcgtcttgcccgagccggagggcccgaccacggcgcatgtcgtgccctgtgggatggtgacagacacatgctcgatgaccttccgcgccccgtcataggaaaaggaaatgtcccgcagctcaatgtcaaatctctctgcctccagttctctgtcagaccggtccatgccggggatattggtgactgcctccagacggtccagctctgtggtgattttcttggataagaaagcgccgtcccccattgtctccatctctgaataaatgataaatgcagccacaaggaacataaagcagtaggacagggagatcgtcccctgtaaatagagcgccgccgcaaggaacaaaagcccgcagccggtcagcttatacaccagggtatacagtctcagcagaggcagggacgccttttcctgatccagtgccgcctgctgtctctcccggaacgcttcgtacaccgcgccgtccctgccctcattgcggcagaaggcacgcatgaccgcgattccccggatatattccagagactgggtgaccagatgctcctgggcttcctgcactttcacggtgtgggtcgcggcggcatggatcaggcnnnnnnnnnnggttcatgaccagaagccctgccagaagccccacaagggacagcagcgacatcaacgggctgtaaaacgccatgcacacgatgatgatcaccgccatggagatgccccctgtcatgtctgtgataaagagcatggaatactgctccagttccacgaccgtggaggtcagcgttgtctggatcgtgccaaggcgctgctcggaaaaatagcccatgggcgcgctcttcatcttctccccgatagcaagccggtagtcgcggaacatatcgaagcctttggcgctcatggagatatcgccgagccactggaagaggaaacgccccgcgatgctcccgatcaggatatacagtgcctgcaggatcacgcccctgctcaggtgctccagattctccaccaccacgaacactgccagaagcatgactgccatggacatggatttcaggaaattgcataaaatacccagatagatgcggggcttttccttccccgcgatcgccaggatccgccgtatggtctttatcatctcacttcgcctccttttcgtccgccctgtcagcggcgctgatgtgctgttcccacatggtcttataaagcgggcaccgtttcagaagttcctcctgcgtcccggcgtcaataagcctcccgtggtcgattaccaggatctggtcggcgtttcgtatggtggagaggcggtgggcgacaacgatcagcgtcttcccttttaccagacgccccagcgcctgctggatctgcgcctcactctccgggtccgcgtacgccgttgcctcgtccaggatgacgaccgacgccggctttagcatggcgcgtgcgatcgtgatgcgctggcgctcccctccggagagccggtcgcccgcgtcccccgccaatgtgtcgtacccttccggcagagacgagataaagccgtggcagttggctgcttttgccgcttcctccacctcccggtcggacgccttcggattgcccatgcggatattctcacggatagacatgtcaaacaggaaattatcctgtgccacatagctgatctcgctcatcagctggtcaaaaggaatcttacggatagggacgccgccgaaagaaacacatccgctggtggcatcccagaaccctgccatcagcttggcgatggtagattttccggaaccagacgggcccacgatagccgtcattttccccggcccggcagtaaaggtcacatcatggaggacttcggatttcccgtcataggtaaatcccacgtggtcgaattcaaaggcgcgatctctcagttctgccggctctgccggcctctcctgctccggcgtggctaaaaattcctcgatcgggcttaaattcgctgccatgtaagtaagctgctccagcccaaatccgaacttgatcagccctgcgatgaaaccgatggggatgatgatgcaggcgaggaagataggaagctcgatgctgtccttcatatacagccatgccccgatgggcagcgtccccagcagggtggacggcagcactgccttgaatcctgccatccagaaccagctctgtctccaccagtccaacgtgctgtcatggaagaagttcacagattcggcgaaatgtccgaagctcttgtttccctgtccaaatgccttgatgacctggatgccgcccacatactccacaagcgccgcgttcatctcatttccggcgcgcaggtacgtctccatcttctcgctgtagccccgcatcatccccaccatgaagacgaggctcagcggcactgtgacaaaggacgcaagccccatgcgccagtccatgacgaagacaagcgcgatggcaaggaggggcgccgacagattggaggggaactccggcaccatgtgcgcgatgatgtcctccagcctccctacattgtccaccataagcgtcttaaaagtccccgacggcgtctccagcatcacgcccatgggtacccgcgccatcttatccgcgatggcgcagcggatatttttcaggatcgtaaatgagatcccatggctgcgcatggacgacagcccggtcagaagcgcccgcaggcacatgcacaccgccgcggtacccgcgatcagggctgctttttgtacggtcgctgtcccctcatacagctgcttcgccagcagcgccaccgcaaaatagggcgccatgccgacgatctccccgataacggcgaggatcaccgacagggtcatcctcccctttgcctcacccgcaaaagaaaacaatgtcttcagcggattcgatttcttttccttcatacaaaacctcctcatgccttgctcagtgaaatcaggatgccaatctgttctcttatcttacagaaacctttttgaggatcacgctttagattagttttaactaacttttctatgtaaaaaatgggactgcttacagtcccagaatatttctccagcccggaacaaagaactggtgcagggtatccagatagtggatcgcctcttcttttgtaaaatcgtggatcaccacctcaaagagcgcgttcgtataggcggtcatcaaaaggtgaagttccttcgcatcgatctccttgaccggcacgccccgcttcttcgccgcttccagatacgcaagcgtttctttctgctccagcatcaccatatcgtgcaggaaccaggcgtatttcgtgcctgccgagcagcacaaaagcagcttgaactcctcgaagtgctcatagactaagtctaccatcagccgcagttcattgcctgccgcccacatgccgtccagattctcctgatccagatagtcatagtcaatctgctttgtcgcggaataccattgctccagctcctccagtaccggatctaccagtgcgcagaacatggcttccttgtctgcgaaatgccggtagagccctgccgccgtgagccctgcctcgctggcaatgtcccgcatgctcgctttctcaaatcccttctccagaaaaatcttccgggcaacgggaaggatccgttcatgagtttctgtcttgccttttgacatcttactgtctccttatgtaaacgatgttagctaacactgtttacagtatagcatgagatgaaaaaggtgtcaatggcctgaaaaaagcagtcggccgctacactttcaatcatgtagcttcagctcaactgctttataaatggcataaagttatctcctatttatacccttttccctgtttaaataccggcggccaagccttcatgaccggcgctcccggtttcaaattaaagtcgcagtaatccccatcctccgcgcaggtgtgttcccggtagagtgggacgcccaacgcgccgaacatcgcataatccagattacacagatacggcatataggcgtcatatccgtgtttcttcgcgaaatcagccagcgggcataccagattgtgatagctgaacacatatcccacctctggcgggtctaaggtctttgtctcaaaactccccggatactttctggcattttccgcgttcgtcttatccttctttttatacattatccgcagaagtctgccgtttgagaacactttgcccgcgatctttctggcaatccccggcatggaacggaatttctgttcatagcagatgaccatcaggcgtcctgcctcctccagcgataccccgtatcttttcaggacttcccccattgcaacaaacatatatgccccagtcaggtttcctgtaccgctgactttgtcccctccgatatagggaaaatgctccagaagctccttttcgtagcaatcccagatttcctgcagaagctggccataggatttgcccgcagctttttctaactctttatcgattagtttcaggtaaccgtccatggtcttcttcagctttgggatggattttctgtaatattcatgcattgcataccactccttacttcctgaggatatcaatatcctgcatgccggagcacaaaagctccgtgcgcttctcgcagtctgcaaagcccgccctttttgccgcctctgccacctcgtcttttctgaccgccatgtccatgccctggaaataatagggcagataccccatcatcatatcccatggaccggtgagatccttttcaatcccttcgctgatcgccagaagaacgccgccggggttcagggcatcatagcactttttcaggaacgggtcataattccctcttgcaaagagcatgaccgcgctggcaatgatcaggtcataaccggttccgatgccatctgccaggaaatctccgctgatgatctgcacacgatccagaagccccgcgctttctacggattcccggatcacctgctccggcatccggtccatcagcgtgccggtgcgctccggttggtcggcgatgaccgccaatcccagaagccctgtgccgcagcccagatcaaggatattcccgatcttttcattttccggcagtgtgcgcacgatgcgcaggacctcctcctgccggtaccctgtctgcgcctgccgcatcatcgctcccatagccgcgaaatccaaactctgctcatttgcctgctgctgcatgggctgggggccctctgtcaccagcttcaccacatccatggggatcatgccctcgctcatcacataatactggatgaatccgcccagatattccggttttccctggacgagataccgctcggcctcctcactgttctgataggtatccccctccttgactacgaacccgatggaggtcaggccgtccagaagatatccggtattcgcctcgttccagcccatttcctccgccagttctttcgccgttgtcttttcactcagatgggaataaatatccaactgaagggatcctgtcactaccttcgtgtaaagcggcagaaatgctacctgcgtcaattgctcccaaacacttttcctgtccatgataattctcctttcaacctttaaattagtttcaactaacccatgtttatataataaggcagccgatatcccgcgctgcctgtattataactgattaaccctggacggcggctctttgccctccatcaatgccagtatccctttctcaaatacttttgccacttccgtcatgcaccgtatgatcttatcccggtctgtctcttccaggatcagcttcgcgagcatggagaaataaccgctcatcagcagccgcaccgtatccttcgacaatggctgtatctgtgcatttgctgcctgtgcgctgctctggatattttcgctgttgcattcctgcaggctctcccagaaatgttcatattttgtgccttgggagccggtaaggatcaggcggatctctttcggattcgccagaaggaagtccacgatctccggaatccgacggatatagaccccgcacatttcaaacaggcgtctgtccggcggcagggctctcatctcctgcctgacaccatccagcagtgcggtaaattgtgatactgtctcatccgtgagggcatagaacagctcctctttattggcaaagtacccgtagaaagccccggtcgtcacacctgcctctgccacaatcttacggagcggtgcccctttaaaaccatgttttaaaaaactgtccatcccgtactgcaggatccgctcccttgtattttgaagttccatgctttctccttataactaagttatataacttagttacattttacacagaggtctcctttttgtcaacaggataaaaaaggacgtctgctaagcgggttcaattgctatgctcactgttccacgctcttgttatcatatttttggtaacgataatgccctgcaattcccgcagcaaaggtcagcactgctgccagaaaagtcatgacaatcttaaaatcacctgtgcctttggcaaaatcagcataaaaatctatcgaccaaagtaccatagcaacaaaccacaacagataccatctttttttcttcttcatcgcaatcacctccatatatccccggtcacttactgtgatcatagtggcagtcgcagtagggaccgccagaagccagggtaaactttcttgtaaatttcgtattgttcatttccgccatatcataatcaaaggcgcacatggcgggaatgtacttggaaagtcccagctgattcatcatcgtacagatgccgcaagtatagaaagtagcggtgtattgattgatcgtttcgccgtcctccaccgtaaatttccagtcataaggattggtaatactttggcttttttcggcaaaggcctttaaccttgcccgtcctttttccgtgtaatttctttcactgacaaccgtctttcgcatgatcttattatccatcgctgttttgtaatagatacggacggtttccgtatcataactcttctcggcggaaagcagcacagcacacagcattgcacagcttaggatattggtaaggaaacggctccccttgtcaaactcgtctacgccgcttaagatttccctgtattttttctttgcacgcttcatcacgctgtccgcgtccttttcgtcgaacactgtccgaaccgcctccttaaaggagccgcgaaacatcagccacattgcgcgctgtatcaacccgtaccgcatcattttctccttttctttattcgtcagccaatcagataaatgcagttatcactcccaccgcaaggcaggcgggcagaccgagaagcataccaatacaggactgcctgatatgaaaacggtagtccttatattcttccatagcttccgtacccggtatcctgacctttttggaatggcagaaccagatacagtcaaggatgagcgcgtcataccagtcaatgatcagccagatcagataagaatcccagaaccctttccagaacgtatccgctccattcagccatttcaagatgaaagcaaagatgaatacaaaaacaacaagggcaatgcctttcctgaggatgtccacccttgtgaagcgctgctgtctgtcctcaatcagccccagttcgatacacttattccggatagccggaggataatcgcccactgaggcaagaggatttttcagtgtcagcgacacaatcaaaaccgtgaatagtacaatccctatcaggctttccaccataactgccatgtccttcacacctcctgaccaatctgagaaagcaagtattcatagacaatggatttgtgatcagatccatccccaaaaggcttttccgccgcctttttaaagccgcgtttctcataaaactcccaggacacaagcgtatttgtaaaaagccggacacaatcagcgccatcgttttttgcccgcttcatgaattgctcgactaatgcggtccccaagccttttcggtaatcctttctggatgatagggcgacaagctccagatcgcatttcccaaaggtttccttatccctttcctgtgactgacggacaaaagcatcaaactgtttccggaatggcgctgacagtttatatcttttcagatagaacttgaggaactttttacaccaaaaccaatagtgcctttttgtttcgtgctgagctgccagtgtcttgctgaaattcttattatattctccacagataaatcctacgacctgatgatcctctgtttccgcaacataggtaaaattacatttttcaaccagaatttgcgcgtaatcacgcagcagcatcctgtcgttctgatccacaggacatgtgaaaaatccctcgtagaaacaatccccgcaggctgcggcatcttcttccttatatggacggacaataaacatggcgtatcctccaatctgctttatttggttaactatataattatatcgtgtctatcctgctttcctgcaatggaatacgccttctgacctaaccgctttcactgacaccttttcatacagctttctaagccgttgttccaaggagtctctcgtatcaaaaggcggtgtgaaataccccatttttacataaagcccttgcacgaaccagtccgtccgtttcccttctccgctgatgtaaaaagctccgcagaacagtccgcccggcttcaagaccctaaatgtttccgaaaatgccgcacccttatctggaaaagcatggaagccattcaatgataaaacaatatcaaaactttcatcagcaaagggcagttttcctacatctccctgcctgaaacagatattattaagattcatctgttttgcccgattctccgcccgtttcatcatatcttccgaataatccagacaggtaatctgcgctttcggcaaagtctgatagaggggcatcgttaaaatccccgtacctacaggcacctccagcagactgcccgaaaaattctccggaatctttgacagcgccaatgcaagataatggtcgttgatcttctggtccatatcccacaccaatttgcacactgcctttccggggatcgtagagcaggtaatcatcccatcgtagaaatccccctcttttccgagcttgtgataagctgttctaatttgttttgctctttttatctcctccatataagataaccctcctcgactaaccgttcctttttcccctattctttaagcaaagaaagcacttgtttccggcatcatgagtaaacagacgctttaaaaatcatgttcagtttggtgttttgtaaatgagagactttaggaagtttcagggtttccaacagtatccatgtgcctgcggagcagccatacatcacatcgatttttccatcaaaatgctccttgatataggctgccgcacagtttccctcatgctcgtaggagttttcaaggacggcataaggaactacggcatctttttcttccccattgaaggcgtcataagcaacgatgatcagatgaaaatgcttacccgctgtctcaacaaagggcatcgcagccggattccaatagacgcctccacctggaaatatcataagtgttttatcgttcccaattccaaattcagtgtacttcatgttgattcaatcaccccggaaagtttcattagatttctttgccagaacacacagccaatgcttcttttcatcggaaaagcttttcgtttctgaaaaacccacggatttcagcgcggcgcagatttgttccttatcatagattttcatcccgctgattttctccgtccatttttcatcggcagtattcattccgtcactctcattgcatatcataaagataccgccgctcttcaaaatacgatatacttccccaaagcatgcctccaaacccggccagaaataaatcgtctcaaaggcggatatacaatcaaatgtgctgtctgcaaacggcatatccgccacattgccctgaacaatttcacagcggtgctgcttgatcgcggcgctgtttcgctttttggattcttccacactgacttttgaatagtcgattcctgttatatgaccgtttttacatttctccagccaaagcgcgatattagctccgccgccgcagcctgcgtccaatatttttgcatcttcctttacggaaattttggaaaatccccagtgtgccagtttgctgtgcccactgttcatcatttttaccatgatttttccgctgaagcctttcggcctgcgcgtattttcaaaaaatcccattgtattacgctccttctatcaatctgccccactgaaataccgcaagacgattattgatcttggcagtgaggactcccacaatcctgctcaccagtgtggatttcttcatctgctccgaaaaactgtgttcgctgacaaggcgcagctttggctccagtgcctcaaattctttccccgattttgttccccagccgaattttgcacctgtatgctttaccgtatcatgctttttctcgtccatcatggaagggcgcatcatttccacaagcagatacccactgccaaattcagaaaccagattgcgaagtattgtgtgctgctcctccttactgaaatacataaataagccttccgcaataaacacaaccgttttttctccggcaacatttttcacggtgggaatccagcccgtttccgtcacacttcctgccagcatcctgcggcggtctatttcttcatatacctttttcctcacagcaatgctgtccggcaaatccacatcaaaccatctgatttttccgttgtcaacccgctcaaaacggttgtccaagccgcagcccatatttacgcataccgcgtccgggtattctttaacaagccgctttactatctcgtcaaacataatcgtccgcgcaatcacgcactcgtgagtaaccagcttatcataattctttgtgtccacgccaagggtctcaatgatttctaccgccttttggtcccgcactctcggatttttccgctttgtttcgcttgcgcggttcgacagcggaatcagagcggtggtctccacatctcctaatttcagtttcattgtctgtttcctttttattttctctttatccatggaatgcagcggttcccccttttgcagtattcctcatgcagactgtatttttctaccatgacatatcatcgcccaaaccatcataatcccaaaccagacaatcatgctttcactcataagcccgtttgtaaatccgagccggaaggcacagtcaggcataaaagattttaccaggtataaaatcccgtatatgaccagaacattcgtaaacgccatacctttaggaaacattgtcctgccagatatctgaagataaaaccaataaagaaaaggtggcagcatgatgatttcgctaagtatcacaagccatgataagtgggaaaataatgcctccgacgcagggattgccgcatcctcatatccgtttctgttcagccatgcaaaaacatataagatcataatataaaacaaatgcaggcacagccatggagtaagtccatatgtagtaagcgtccggtaaattttcctgtgtttttcttcttttataaaactgcacactgaaaacagccctatgccgtaaaacacgattcctggaaaagcaagaaacattgccagcgaatttctccatggtgcaatcccggctactccctcagtaagccagtaaagtgcgcctctgtgggcagtatccccgtacagcatcagccaatcgcctgcgccaaaacagacacagcccatcattccgaatatcaatgggataattcttttcattttattgtccatcttccctcatctcacaattgctttatttttaacctctttttattatagttagcatcagctaacctgtcaattccaaaacgaggtctgttaattgcgctgcttgtaaatttgatatccgctatccatgccagcagccgatgagtaggcttcaccgctgggtcatccagtctctgataccccagcatatatccccggcagtgatctgaaaccggtctgaccacaatcctagttctgccttagcatcacgctcagaaaaaacatctatctccatgaggcgcgtcatgcctttcttggtcttgcatggagaatatatttgagaatgaatctcattaaacaccttgaatctttccccgaggtttggtaaaatatatttggttagttatttctaaccgcatgtgaataaatcatggaaactccttttgcctcttatgcctgaacaggggtaaaaggggatccgtgggaaaggatgaaatggatgatggattatttagagattgaaaaggttctcggacgggaaatcattgactcaagaggcaacccgacggtggaggcagaagtttacctcgcggacgggacagtcggaagaggcgcagctcccagcggcgcatctaccggggaatttgaagcgttggagttaagagacggggatgaagacagattcgggggcaagggggtttccaaagctgtagaaaatatcaacaccgtgatcaacagtacgcttcagggaatggacgcaagcaatatttacgcggtagatcaggcgatgataaaagcagacggcacaaaagataaatccagcctcggcgccaatgccattctcgcagtatcgattgcctgcgcaaaggctgctgctgcttcccttgatatcccgttataccgttttctgggcggagtgaacggcaaccgcctgcctgtgccgatgatgaatatattaaacggcggagcgcatgcggcgaatacggtagatgttcaggaattcatgatcatgccggcaggcgcaaaaagtttcaaagaaggcttaagatggtgtacggaagtgttccatgcattagcggctcttctgaaatcaaagggacttgccacatccgttggtgatgagggcggcttcgcaccggaccttggaagcgatgaggaggccatcgaatacattctggaagcagtaaagaaagcgggttatgaaccgggcaaagactttgtgcttgccatggatgccgcttccagtgaatggaagagcggcacaaaaggagaatatctgctcccgaaatgcggaaagaaatttacctccgccgaattggtggcacactggaaagccctgtgcgagaaatatccgatctactccattgaggacggccttgatgaagaagactgggagggctggcagatgatgacaaaagaactcggcaataaagtccagcttgtgggagacgacctgttcgtcacaaatacagagcgtcttcagaagggcatctctatgggatgcgggaattccatcctgatcaagctgaaccagatcggatccgtgtccgagacactggaggcgatcaagatggcacataaagcgggatatacagcggtgacttcccaccggtctggggagacagaggatacgaccatcgcagatctggcagtggcgctcaatacctgccagatcaagacaggcgcgccgagccgcagtgaacgtgtggcgaagtacaaccagctcctgaggatcgaggaggaactgggggaggcagccgtttatccgggattcggggcatttaacatcagtgagtagttccggcccgccagatactggcggaaaagaacaaaaagttccagccatttatagattccacaaagaaagcaggcatcggcagaatttctccctttgcctgctttccttttttaagaacatccacggtctccggcgctcattcctgtgactgctataattcttaaagcagctccaacacttcttctatcccctttttcccaaaatacacctgctccccatctatgaccatgcaggggacgctcatgatctggtagcgttcttttaactccgggaaatgtgccatatcataaatatccgctgtgacaccggctgattccagcgcggtgcgctgtaccgccatgaccagctccgggcacatggtacacgacagggaaaccaccacccggattcggtgttccgctctcagggaacggatcttctccagtgtttccggtgcgatgggctgtcccggtccggccgcgttgtagagggcgattacaaaggaattgaattcatgcccgcccggcacaccgtggaaggaggttcccagatagttcccatccccgtcgcagatgcggatcgccggatattcgatccccactttttcgtccccatctgcctttttagcaaaacggcaccggatcttcggggagagtgtctccatctccctgccgaagccctctacttctcttgagatggcgctgtcgtcggtacagaactccagagtgatgtccttttccagacgttccagcaccggggcgagctgccgtttcacctcgccgcttaagaagccttcagtatcatctccgtctttgtctttgctggattcttcttccagcgcgccttccctcctgctgactttttgtttttcaagacccagcttttcatacatggaggaaatatgcttctccatagacgtcgctgcaaccgcgccgtcggagaccgccgtgacgacctggcggagatttttcacacagatatcccccgcgccgtatacgccgtccacgctggtcttctgattgatatccgtgacaagatagccgttctctgtcatctccactttatctttaaagagcgcgtttgcaggtgcatagcctgcgaagacaaaaataccgaagccttttcccgcttccggctcataccgccacgtctttcccttttcctcaaataccgcgtactccagcttcccgtttccgccggcctccctgatctccgtttcaaaatgcacttcaatatcgggatgggcaagcacctcctctgcaacggaatccgcgcagctgaaacttttcccacggaccataaggtggatttttctggcgtattttgtgaggaagatggattcctccgccgcggcgaaaccgccaccgatcacaaacacatccattcctgtaaagaactcgccgtcgcaggtcgcgcagtaagccactcccctgccccggaactccatttctcccctaaaaccgatcttcctcgggctggcgccggtggcaaggatgatgccaagcccctgaaaggtccctttatccgtgacaacggacttcatatcagcgtccagatccagttctttcacctcagccatctgaaactccgccccgaaatactccgcctgcctgcgcatattctcagtcaggtgtgtgccgtccgtcttaagtacgcccggataattgacgacctctgaagtgatggtgatctgaccgcctattttttccttttcgatcacaagcacgcggtattttgccctcgccagatagatagcggcggtcagccccgcagggccgccgccgatcacaatcccgtcgtagaactcttccgcgcgctgatctacatatcgttctcccttgcgctgttcttccatacgtgatcctcccat

SEQ ID NO: 991 - DNA, 25153 bp, unidentified
  source 1..25153: mol_type = unassigned DNA
tatcatcattgtaaacagctgtaatatttttctctccaagagatatcataacttctttggcacctactgtcacttttttggtctttgtgcctttagctgtcacatcggctgtgtctgttacaggactttccgtgtaactgattgttccattgtcacttataaactgctgcaccgacagttcatttgaaaagtattcactttcctttttgtaaccatcaggaattttagttatcatcatattgccctttgttgccactttgttattatcatttttattttcttcaaagttaatgttgataaaatcttcagttttcgtaactaccatctgccaaatattaaagtcaaaagcctttacaaatgttatattaatagccataaaacataaaacaacagcagcgatttttgcacaatatcttgtacatctttccatgattatatttccaccaaatttcttttgggcacgacttattctttttatctttttttcaaatctgtaagaataattgtgaatgccaataatatcaggaatttgattcattgtctcctcattgtataaaacaagtgcctgttttaatacatcatcatctagaatcattttgtctcctccgccaataattttcttgcttttaaaagttgttgtcttacatttgtttcacttaatcctgtaatttccgatatttcttttccggaatatcccattacatatttaagtgtcaataaagatgagtatttgtatggcattttttcaattgccagctttacatcattgatgatgtttccttctgacacgtggattttttccaattcaatatccgtgtcctcacctctttttttacgtttgttgtatattttcatagcttctctttttgtaattaacactacaaaatttttagattctctgctatttacttcaagaattttagatatattttttgcaatacgaagaaaggcttcctgaactgcatcctctgcgtctctttcatttctcaatacttcatatgctatgtaaaacatcaaatccttgtatttgtaatatacttgttcaaacttgtccttttggttttcatctaccagtgataaatatagcgctatcattttatcctccaagtttttgaagtttctatatatagtaatcttacattttcaaaaaatgttatttttattttttcgggggttgaatgcaaaactaacttcttgtttgctttttctgttttctttttacagaactaacttctgttttttaatttatggaattaacttattggtttctacaatatagaaaaaggcagacttattttgcctgcctccatgactaatattatatttctccaatctgcgtgtaaccattgtcatctaagcgaactatgattactccacagtttttctgcaatccaccggtccagtattcatctacaccatgacctaacacatgacacataattcctttattcattgctccatgtcctgctattagaactctgtttagtttatccttttgtggttcaatgacctgttccataaattcttttgttcttttacatacctgctttaagtcttctccattttcaggagccacataatgtgccgggtcatcaaagaatttacaaaatggattggctttgtctttttgcagttctattgcactttgaccttcatttacaccaaagttcacttctcttaatctgtcatcctttataatttcaatatttctgtcacctcttataatacaggctgtctcatatgcccttgataatggcgaactgtagattacatcaaaatctatattttcaagttcctttgctctttcttttgcaatgttaattccagcctcacacaacggaatatctctaattccctgcaaaagtcttgatttgttccaaactgtttctccgtgtcgtattatatatatttccattttactgttgcaactattggggtatatcttcaatggccattaaatacaatagttgctattcctttctgttatttatgccacaataattgaataactctgcttaaatgttttaccctgttctactttattaatattgtcttttgtgcgtaattcatgttcaaatcctgtgttatcacaacgtcccatccatggttctaaacatacaaaaggagcatcttttacagaccatataccaaaatttggaaatcccttacacttcattcccgctcttttagttccatctttatagcaaagccaaacttcttctacctgttctccatcaagtatcagagcatcattttcaaatattttttcatttagctgatattgaccgttattcaaaggaagctggtatttttttgaatccactgctgtaccatattctgaatcaagcaacatgtactccaaagaatcttttttattgaacataaggatataattctcttttttatcaccttccctaaatctatatgccggatgagcccctattgtaaaatatattggtttactatccttattgtttacctgccatgtaacaatgatttctttttccttcaattcatatactacaacaagttcaaaatcgaaagggtaaaccttttttgtttcatcattggaacaaagcatatactccactttgttttcactttgatttatgcatttaaaaacactgtcccttgcaaatccatgctgagatgtttcatatttcttacaattaattaacacctgatttttataatttttccctacatttgggaacaatataggagaatgtcttttccaaaacttaggatctgcctcccagattatttctgtgtcattttccttgtcatatacactggtaatttctgctccaagttcatttatttctacacataaaaatttattttctaatttcataatatcctccaatcaatcagtaattattgtatcaaatttaactactattttgtatatgtaaatataattatatacccattttttaaaataatatatcttttaaatcccactttgcatttgtttgcaggataactatatttgtaaaacacactagcatttaaaatataatgataattaattgaactatttgggttgataatgtgcaatactcttttttctatattgactatgctttatttattgtttataatcacttaaaaccatcgttatggagtggatttttttaagacagaagttttattttcgccacacaacctaaaaagttgtgtggtttttattttgccaaaatttgttttactataatgggagattattatgaaccaaaattttatgaaggaaaaacctatattgccactggttttatcaatggctctaccaatgactatttccatgctggtaaacgctctttacaatattgtagacagttatttcgtagcaagaatcagcgaaaatgccatgactgcactttcactggtttatcctgttcaaaatatcgttactgcagtgacggttggatttggtattggaataaatgcattggttgccttttatcttggagcaggcaatcataaattggcagacaaatctacatctcttggaatgatttgcaatgttattcacggggtgcttttgactgttgtatgcattggtattatgccaaaatatctaaaactatttactcatgatgtggatacaattaaccttggtctaaagtattcatatatcgtttttgctttttcaattccaattgccatttccattagtttcgaaaaaatatttcaggctgttggacgcatgaaagtatctatgatatgtatgatgattggttgtattaccaacattatattggatccattttttatttttggtattggcttctttccaaaacttggcataaccggtgcagccattgccactgtaataggtcagattgctacactttcaggctatattttaatttatataataagaccgcttcctgtaaaaattaagtttaaatacatgactcctgaaaaatcaattataaagagattgtactctgttggttttcctgccactttaaatctggcattaccttctcttcaggtttcagtattaaacagtatacttgctacatattcagcaggctatgttttggttcttggagcttactacaagttgcagacatttttgtatctaactgccaatggcgtagttcagggaatgcgtccacttatttcatttaattatggtgccggagaaaaagtacgtgtaagaaaaattttccagacagcgttgactattattatgattgttatgacttttggaactgtaatatgtctgttagttcccaatgtacttattggactgttctcaggaaatgcccaaacaattatcattggaagcactgctcttagaattatcagtgtaggatttataatatcctcagtatccattacagtttcaggtgctttggaagctcttggaaaaggattttcatctcttacaatttccctgttaagatatgtatttgtaatgttatctctttcatacattttcaatattatctggggagctgtaggcgtatggagtggattctgggctactgaatttattgttgccggattttcatttttcctatataaaaaatattttaaactaaaataaaaagccaaattaatttaatcaggcaaaaaataatgcatttaaaatagccaaatgactactttaaatgcatttctttttatctgtcgttttcttcttctgttggaatatcaacacattcaggattttttactgttccttttgcccatgcacttcccacatcacatcttccatgatgacttacttttttaatttcaccactttggatattgtcagatgcagttacgttgattctgcttgtacctgcctgaacctgtccgtccaacattttcataagattctctatatctttttcgcttgccataaatcttcctccactaaaattttagcttattgtaccatatttatagtaaaatgagaaaccacttatggattttttattaaatcatcatcaaatcttttataactttatgaacagtagaaatattctcaatagtacctatttctgctccacaaaatataagaccttcctccacattgcctactgccgcattaattaatctttcagtaatacaataaggtatctcccttggattgcatttttttaaacatccaagacattttttcggaggaaacttttctccagctgatactcttttcataaattgattatttattgctcttccaggcattcctaccggactttgtactatttcaatatcattggaagttgcttttatatagcattgtttataagctatgtctgcatcacattctttggttgtaacaaatcggcttgccacctgcacaccatccattcccaactccaatgcatgtcttacgttttgttgagtattaattcctcctgccaatataactggaattttcttttcatacatttcttcatattgtttaattaacgaatgtatgtctttgacttcctgatcataattgtttttctttaatacaatttcttcttttttaaaacctaaatgacctcctgcttttggtccttcgattacaacaaaatcagcagttctattataccttttttcccacattttaagtattacttttgctgctttcacacttgagacgataggtgcgatttttgtttttgctccttttacatattccggcaaatctataggaagacctgctcctgatatgataacgtccgcaccggctttaactgctgcctgaacctgctccttataattttttaaagcaaccattatattaaatccaattacaccgtttggtgcaattttccttgctttatcaaattctttttttatagcccttatatttgcctttaatgtattttctctaaaatcatcttccttaaagccaatctgtgctgaagaaataattcctattccaccttcttttgctactgctccggcaaggtttcctaaagatattccaactcccattccgccttgtataattggaatttttgctactaaatctcctatttgtaattgattaattttcattgatattctctctcatatctacatttttctaaaacgattgtacctgttttcagtaatttccttacccgataatcgacttttttcatttataaacattgccaactcctgattgagttgtaatataacttcgtccatattttctctcgaatagttttccggttccttaaagactcgctgtattattttcatatttaacaagtcataggatgtcattttcatcatatttgcagcttttgccgccaattttccatccttccaaagtatacttgcatacccttccggacttaatattgaataaattgaattttccagcatccacacctcatcagctactgccatagccaatgctcctccacttcccccttcacctataacaattgacactataggtacttttatatctgacatttcaaataagttattggctattgcacttccctgacctctttcttctgcctctattccacaaaaagctcctggtgtatccacgaaacaaattataggtcggttaaatttttctgcctgtttcattaagcgtaatgcttttctatatccttcaggtgatggcattccaaaatttcttttaatgtttgattttgtatcatttccttttgcctgagcaataactgtaactgaaacattgtgaaatgttgctattcctccaataattgctccgtcatctccgtaatttctgtcaccatgcatttccataaaatcaggaaacaatctttcgatataatctgttcccaccggtctggtcttttttcgcgatatttttactctatcccaaggttttatatcctcatttaaaaattggttgttttcttttattcctacaattttgcaatatttagaaggtatttctttatttgtattattatgaattattagaatcttgcttaaagtatctctcatattttctcttttgactataccatcaataaaaccatgcttttctaaaaattctgaacgttgaaatccctttggtaatttttctccaattgtctgctctataactcttgggcctgcaaaaccaataagtgccttaggttcagccaaaataatatccccaagcattgcaaaactagctgttacacctcctgttgtaggatcggtcaatactgaaatatataaatttcctgactgatgatgtttttttaatgctgctgaagtttttgccatttgcataagagatacaattccctcctgcattcttgcaccacctgaacaggcaaatattattaccggaagtttttcctgtgtggctctttctaccatgcgggtgattttttctccaacaacttttcccatacttgccattaaaaaacgtccatcacaaactccaactgccactcttattccggtaattgtaatttcgccggttgtaacagcctcatccaaacctgtcttctcttttattaattttaattttttttcataattagggtaattcagtggattctcttcttcaattccctgaaaccatgggataaaagaatctttatctgcaatcatctcaattcttctttttgcatgaactctaaagtatcctccgcatttgggacatatataattattttctgccacatccttggcgaaaactactgaattacattttttacattttctaagtattccatcaggaacatctttgtttttatttatgtttatgtattttttattgttcttcttaaatagtgtttgaagtttcactttatgcctccataattatatacgctgattgaacttttctataaaatcaacatcataacttccatcttcaaatatcttatcccacaatattttgtactgataatctacatttgactttattccttcaatgataacctctccaagagcacttcgcattttatctatagcttcttttctgctttttccatgtactattaattttgcaagcattgaatcatagaaaggattaatttcatatcctgaataaatagacgaatcaactcttacaccatttccaccaggcatatacatttcttttatagttccagcatttggcataaaatttttgtcagggtcttctgcattgattctacattctatggcatgtccgtctaatttaatatcatcctgagtaaattctaatttctcacctgatgctatttttatctgttctttaataagatccacacctgttaccatttctgttacaggatgttctacctgtactcttgtgttcatttccataaaataaaactttccatttttttccaaaagaaattctatagttccggcattttgatagtgggcagcctttgctgcttttattgccatattgcccatttcttttcttgttttctcgtctaatgcacttgatgggcactcttctatcatcttttgatgatttctctgaatagagcagtctctttcacctaaatgaaccacatttccatattcatctgctaaaatttgaaattcaatatgacgtgcatgttcaatgtaatgttcaatatacattgtgtcatcaccaaatgccatcttgctttccttttgagccgtgttaaaatctctttcgaaatcctcagggctatatgccacacgcattccttttccaccgccacctaaagctgcttttataattacaggatatcctattttatctgcaattatttttccggttttggaattatacacttcctcttttgttccgggaataaccggtacatttgcctgtaccatagtatttcttgcgatggatttattacccatgtttcgtattatttctgaagaaggtccaataaatttaatattgcattgttcacacagttctgcaaattttgcattttctgaaagaaatcccactcccggatgtatggcatctgcacctgtagatacagcagcacttaatatactttccatatttaaataactatcatttgcctttgcttctccaatacatattgcttcgtctgccaaggccacatgaagtgaatctttatctgcaacagaatatacggctacactttctatgcccatttccctgcacgcacgtataattcttactgctatttctcctctatttgcaatcaataatttatctatcatttctaacctctttatgttaaccaatcataaatgtaagttctgctgtagccactgtttttccatcaacacttgctactgcgcttcccactcctaatggacctttttgttttataatttttgtttccagttttaatttatcgccaggctttaccattcctctaaatctgcatttatttattccaccaaaaaaagctgttttacctttatattcttcctgacttaaaatagcaaccgctccaacctgtgccagtgcctcaatagtcaatactcccggcattaccggttggtttgggaaatgaccattaaaaaagtcttctctataagtaacacatttatatccaacagcatattcaccaggtttgtaatcttctacataatcaaccaacaaaaatggatgtctgtgtggaattatctcttttatctgatttatatctaacatttccttacctttccactgtaaatagtgtctgtccgtattcaacagtttgtccgttttcaacaagcacttcctttataactccatcaaattcgctttcaatttcgttcattaacttcattgcttcaacgattacaacaacctgtcctttttttactttatcaccttgtttaacaaatggctctccatcttctgttggtgatacatacactgttccaactaaaggtgattttatttctacaatattatcaaatgattcttcaacaacttcctgttttaaatcatccaatatttcctgatttttcacattattttcttcaattgatgtagcagatttttcatttatctgtggataattacctgatatacttccaccttttttgcaaagagcaacctttacgtctccctgacaatattcaaaagctgtcaactctgaatctgaaactgcttttatcaattctttaactttctcaatatccataactactccaattatctatattttcttattgctaatgttgcattgtgtccaccaaatccaagggaattggttaacgctaaattcacctctgtgtctacacctcttccaataacataatctaaatcacaatcactgtcggcttctagtgttccaactgtctggtgaatataattgtcattaattgattttacacaagtaatgaattccaccccgcctgctgctccaagtaaatgtccaaccattgattttgttgaattaacttttacattgtatgcatcatctcctaaagccaattttatggctcttgtttcaaataaatcattatgatgtgtgctggttccatgtgcgtttatataatcaacatcttttgtattcattcctgattcttttattgcaagttccattgcctttgcagcaccttcgccattttctgccggcgaagtaatatgatatgcgtcacatgttgctccatatcctacaacttcagctaagatagtggcacctcgtttttttgcatgttctaattcttccaaaactacaatacctgcaccttctcccataacaaatccatttctgtctttgtcaaaaggaatagaggcccttgttttatctgtggatttactcaatgccgtcaaacttgaaaatcctgccacacctaatggtgtaatagaactttctgtaccacctgccaccataacatctgcatcaccacactgaattgttctgtaagcttcacctatagaatgagttcctgtagcacaagctgtcactacattaatagatttaccttttagtcccaatgctatagcaacatttcctgcggccatatttgtaatcatcatgggtactaacaatggtttaactcttgatggtcctttttcatgcaatttaataccttccgtttccatatcctgcaatccaccaatgcctgatccaacacttactccaaccctaaatggatcctcttttgtcatgtctatttttgactgttcaaaagcttcctttgctgcacaaacagcatattgtgaaaatgttgacattctttttgctgttttaaattccatatgctcttttgcaacaaatccttttacttctgctgccagtttaacctcgtattcagatgtgtcaaatttagtgatattatcaattccacattttccctctttaacacttttccaaaattcttctacattatttcctataggagtaattgctcccattcctgtaactactacacgcttgctcatttttactctccattctgaccattaattatacttttacattccgccatctacgctaaacacctggcctgttatgtaattgctaccttcatctgccaaaaatgctacaacatttgccacttcttccggctttccaaacctacccataggtatatgtgatactgctgtttcttttaccttgtcagatagctgttctgtcatttctgtttcaataaacccaggtgctatagcattaacatttatgtttcttttagccagttcttttgccgcagatttagtcagtccaataactcctgcctttgatgctgaataatttgcctgtcctgcatttccatatattcctgatatagaagaaatattaattattttcccctgtcgtttttttatcatatatttagaagcaaatcttatgcagttaaatgttccttttaaattggtttcaatgacactgtcaaaatcttcctcgctcattgccattaaaagtccatcccttgtgattcctgcattgtttactaaaatatcaatggatccaaactgcttatatatatcatctatgaattttttacattcattaaaatcggacacatcacactgatatgccactgcattatttccctgtttttttattttttcaacaacctgtagtgctctttcttttgagccacaatagtttacaataacggttgctttttcttctgccagtttttcggcaattttttcgcctattcctcgtgacgctccggttactattgcaattttgttttctaacataactgctcctttactgtttctatatcttcaaacttgcttacgttatacacttttactgttctatcaatttttctaagaaaaccatttaatgttctgcccggcccgatttcaacaaatgtatctacaccgtcagctatcattttttccattgtctgttcccattttacaggtgaatatacctgttttcttagtaattccttagtctgtgaaatatcatccacatagtctgctgtaagatttgctatatatgggacttctagtggtgttaaatttattttttccaattcttcttttagtttatttcctgcttcttttaagtaaggtgaatgaaacggtccgcttacttttagttctactgttcttctagcaccagctttgctaagtttctctccagctataattacagcatcttttaatcctgtaataactatctgtccgggacaattataattggcaatagtcacaccctctataggtgctatctcctgctccacctgttctttattcattcctaatactgccatcattgtaccttcattgtccggtacagcctggctcataaatattccacgttttcttacagtggtaatagcatccatggaagtaataccacctgctgcataaagggcagcatactctccaagacttaatccggcagttacgttaggtttaattcccatattttccaattctttagttatggcaatacatgttgtaactaaggcaggctgtgtatattctgtttcatttattaattgattttcttcaaagcaaatatctaaaagattaaaatctaacagttcatttgccttatcaaaaatatcttttgcaatagcgctgttgtcataaaaatcttttcccattcctactgtttgtgctccctgccccggataaataaaggctattttactcataatcaaatttctcctttaccaaagtaaatgtttctttcatgtctgttattaatttttccaacagctccttacaggtacattcttctcttacaagtcctgcaatttgacctgccattacacttccattattcacatctccatctactacggcttttcttaatcctcctagtgtaagcaactcaagttcttctaaagttgcaccctgagactccattttcaaatatttttgtgtaatctgatttcttaaagttcttaccggatgacctgtgcttcttcccgtcactttagtatctatgtcttttgcttttattactttttgtttgtaattttcgtgaatattgcattcctttgttactaaaaatgccgtacccatctgtactgcctgggcgccaagcataaaagctgccgccatgcctcgtccgtctccaatgcctcctgctgcaatcacaggtatgttcactgcatccactacctgtggtattaatgccatagttgttgtttcacctatgtgtccacctgattcagttccttcagccacaactgcatctacaccacaacgctccatcatccttgccattgtaactgatgctacaacggggataacctttactcctgcatcctgccaaagtttaatatatttagatggattgcctgctcctgttgttacaacagcaaccttttcttccactactacctgtgcaattttatctgcctccggattcataagcattatatttactccaaaaggtttgtctgtcttttctttaactttctttatctgctctctgacaaattcagcatctgctccacctgctcctataattccaaggcctccggcatttgacacggctgcagccaaatgatagtctgcaacccatgccataccaccttgaattatcggatattttatatttagtaactttgttatttctgtattcatatagaccttcctataattatcctttaaatcctgatttatttattgttattgatgtagtcaattacatcaccaacagtattgattttttccaaatcttcagttgggatttttactccaaattcttcttccaagttcataactaattcaaataaatctaatgaatctgctcctaaatcatctttaaatgaagcgctttctactaccttttctggttcaattcctaaattttctgatactaactcctgaattttttctaacatttttattctcctttatgatttatatttaatgacccttatttttagtcattagaaaactttttaatattctaaataagtggcagcccatgtcagccccgcccccaaaccagccctaatcattttgtcaccactattaatttgtcctgttctatttaactgatccaataatataggaatacatgccgatgacatgtttccatagttttcaatatttataggtaccttttttatatccactttcaatcttttggctatggatttaattattctttcatttgcctgatgtagcacgaaataatcaatattctcttctgtaatattcattttgtccattaatttatttattccatcaggtacctgttttacagcaaatctaaacacctgctgtccatccatctcaatataattatctttttttactggattttgttccaaaaatggatttgttcttgttgcaaaaccattttccatataaagtgattttcctccgctaccatcagcaaacattacagtatcaaattttgcatttttatcctcctgtactattgctgctcctgctccatctccaaacaaaatacatgttcctctgtcattccaatcaaccaactttgataagccttccgagcctacaattaacgctgtttttattaaacctaaacttatatatgactgaaccatattgtatgccattataaatcccgtacatgctgaatttaaatcaagacagctggcatttttcgcaccaatttgttcctgaacataacatgctgtatttggcaatattaaattagaagaaacagaagaaaccactatcatatcaatatcggttggctctatttttgcatttttcattgctctttgtgaagcatataccgccatatctgcagttgtttcctcttccataatatgtctattacaaattcctgttctttcttctatccactgccctgtggtgtccacaatagatgaaatgtcatcatttgatactatctttttaggaatatatgaacctgttccaattatctttccaaacatattttttccttatctgtttttgttttttctttaaacctgccacagtatattaaaaaaaaaattcaccgtcaatagattttgacgatgataaacacaatggcaaaatgttgtttattttcatacttttttgcatttaattgtatattattaaacacttttgttgatttttgtatattaacttctgcaaatatttcttattttcagtgtgaatgttataatacactatgtataacaactatatattaatgtaacgggaaacaaaaatatatctttttaattattaaaaattatatgatgtgtgtgtcaaaaataaattttgtcactcactgatttaaccggattgctccattgctacgcaatttgtactttttacacttagattattatatggagggaaaaatggatcagcaaaagcaggacagacgtattgcaagaacaaaaaaattattagaagatgctttaattaaactattgcaaaagaaaagcatacataaaattagtatcaaagaactggctgaagaagcagatattacaagagcaactttttatcagcactatcgtgatccttatgaaatgttggaaattatgcaaaataggattttaactgaagttcaacagattattcaggaaactactggtggggattcttatggattttttataagattgtttaagtatctggccaatgaagatgtaaaggccgaaatattagcttttgattctggaaaaggcaccggatatgaacgtataggttatactattcataatgactatatgctcagatgggatggctctatatcatccttccagtcagccacatacaaatattatcgatattatattgtatttggctgtatatcagttgttgaaaactggattaattcaggcaaagtcgaaacacctgagcaaatggccactattacaaatagtatgcttcctaaaaagaaaatgtatttaaaggtcacaaaataattaatccttgtgatacattctcttgtcttcttcatactttggctcgcatgttaactgtattccaagtttttttagaatattttcatctacacttgaaagtaatacagttgaatgtgcgtcgcaacctttcaatgatggaagttgtttcattgcccgcattgcaatttcattatttgccgctgttgctgacaatgctgtaagtacttcatctgtatgtagtcttggatttttgcctccaagataatttattttcaatgtttgaataggatcgattgcacttggatcaataagttttacctctttatctataccagccaatgcctttaatgcatttaatagtgctgatgatgcagctccaagcaattcacttgtaccacctgtaacaatatttccatccggtagttcaatggccatagcaggcttattattgtcagttttttccctttgtaacgctactgaggcaacctttctatcctctacagtaatctctgcctgcttcattaacagttcaagcttatagatatcatcttttgtagaaccccttcttctcttctcgcacaggctcttataatatcttctgataatctcctgctttgaagcctcacggcatacctgatcgtcaactatacagtttccggccatatttacacccatatctgtaggggatttgtatggactttttccgtaaataagttcaaacattgcatgaactacagggaaaatttcacagtctctgttataatttacaactgtctctccatatgcttctaaatggaatgagtcaatcatgtttacatcatttaaatctgctgttgctgcttcgtatgcaagatttaccggatgcttaagaggaatattccagattgggaatgtttcgtatttggcatatcctgcatccactcctcttttgtgttcgtgataaagctgtgaaagacatactgccatctttccacttcctggtcccggtgctgttaccactactaatggtctttctgtttctatataatcattttttccataaccatcatcgctaactatatattctacattgcttggatatcctggaattttgtaatgcttgtatgacttaatttccattgaatcaagtctatttataaacatttctgctgaaggctgacctgcaaattttgtaaggcatacgctacctacaaacaaacctacggacttgaactcgtcaataagtcttaacacatccatatcatatgtaatgccataatctcctcgtattttatttccttctatatcttctgcactaattacaataactacctctgcctgatcttttaactgcaataacatctggagttttgaatccggttcaaatcccggtaaaactcttgatgcgtgaaaatcgtcaaataactttccaccaaattctaaatataacttatttccgaactgagcaattctttctttaatgtgctctgattgcatttttagatatttctcattatcaaatccttttttaaacatctttacttaacctcttttgttccttatctcatttcttaactaaaatattctaccatatatcaatactattattcaattgaaaaaacatataaattctatccccaaaaaaatttaaaattcactctcccatctgcattattgcaagaaatgttttatttctgattctattccaaacttttgtacattccaacacagggggaatttttgctattccaaacaacatatattttatactgtttttttaccgctctaggcactgtatatttatactgttttttaccgctccaggcactgtatatttatactgtttttttactgctccaggcactgtatatttttttgtttccacttttcttaaatgctctgatttttatataatgtttctttcttcttgttatagttttaatggtttttgtggaaatattttttacagttatttttttactctttttcaacttactattgtcagcataaattatttcataccctgatgcatattttaccttcttccattttactttgaatgaactgctctttttatttgacatctttattgttttcactttttccggcttgattataaatgtctttgtaaaactgccctgatatgcatctttaagtgttactttaactgttgcttttccaggttttacattatctttatactgaatagtgtagtatttttcagatatttttacacctttcgaatccttaatctttactccgggctttttatttttcccactgtaagtatagtttgttttgtctaaagtaatggctgtagctttgtatatcttgtccgtcttttcactgccacataccttgcacacatatgtcgctttcccgttttcttttttggttgctttttttataaccgacttaattttgtattggtgaccttctatgctacattctcttgacaataaaatatttacatcaatctttgctgatattccatctactgcacctgtttctgtatattgccaaatattatacttgtttccataggcacattctgaattgtactgagccacccacctgtcccatttatcaaatcttgaatctgtaagcttattattccaccaataaaggcttgcatatactcccactttatatcctgccttgttgatttctcctgcaaatgtttctgctatatccccaagttttttctttgacagattttcctgagttttatcttctaaatcatagtatattggcattgttggatttgcatctgtttccctaataagtcgtaatacatgatttgcttcactttttgccatttctgttgttgtggcatatgaatatatgtaaatgccatatgtaatttcattttccttacatccttttatattatctgcaaaatatttgtcgtcctgtgttacatcatcatttccatatccacatcttacaattgcaaatgtaatatcagactgtttaactttgttccaatctatggctccttcgtgatggcttacgtcaatgccctttgctattgcaccctttatgacctgtcccttatcattgtagaaaactccatttacatttgtccaaggcataactgctgcctgaactgaagtctgacatactgccaaacagcatataattgctatgatgctttttatttttttctttatcattttctttgttctttttttcatgcttgttctcctatagaatagtttttatttatttgataattcttgttatgttgcttatttcatgtatattcattttatcatattttgtcagtttatatttggcaatatttccccactctgtgtgacttttgtgggaaatctcgtttttctcgcaacgtgcaacttttgtggcaactcatttttgctatgtacaacttttgtggtaactcatttttgctatgtgtaacttttgtggtaatttttttactatgtgcaacttttgtggtaatttatttttactatatgcaacttttgtggtaatttttttacctaaaaagttgtattgcctcgctatttaccctattttaacaatatttttactgtttttcttgtttatgacaacttttttttgtgtatttttattcaaaaagttgcacattgccagattttgctttaaaaagattaaatgtatttattttttacaatatttcttttattatatctcaaaattgttgtattttttgtcacttccataaaaaaagattaagcgtatttatttttttacaatattcttttcactttttcaaaaaaatattgtactttttattttctgactttagtttgataaagtatttttcgattttaatacaacatttttctcaatttccccaaaaaaacttgtactttttattttctgactctagtttgataaagtttttttgattttagtacaacatttttctcagttttcccaaaaaaacttgtactttttttttgactttagtttgaaaaaatgttttttgattttagtacaacatttttctcagttttctcaaaaaaacttgtacttttattatttttccatattgtacctttattaagtgtaagaaatgctattaaataaacttggatattcctcactctagtcaaatcattttttatatataaatttgctttagattaaaattgccctcactcttaacaaagagtctaaaaaaggatgtaatgtcgaaatttgcttaatatatcagcattttcaaatttacattcttttcaattcttatcgtataaaactattattacattatataaaaattcttaccgtataaaactattattacattatataaaaattttcatacaaaattctgtgtctttctattcattttctttttcgaaatatttcttcagtagttttactacaactccggacaacaagagcactgcaattaagtttggtattgccataagaccattaaaggtttcagcaatgctccacaacaagtctaaattcattgttgctccaacaattgctacaagcgaatataccaacataaatggcttgtttactttagagccaaataaaaattctatacatcgtgcaccatacaatccccaaccaacaattgtagaaaatgcgaaacaacacattgcaatggctgtgaagattgatacccagctaccatatgtagatgtaaaacctgaaatagtaagttctgcgcctgctgcacttccaaagtttacaggaacaccgctacataaaataactaacgcagttagcgtacaaatagcaattgtatcaacgaatacttcaaagattccaaaaaatccctgctttacaggctttcttgtatcagcacatgcatgggcaattgaacctgtaccaagacctgcttcattggagaagatacctcttgaaattcccttcttcatacttaagaagacacttccaacaacgccacctgtaaccgatgcaggattgaatgctccttcaacaattgaagaaaagactgacggtacattttgtatatttaacaaaacaactcctaatgcaaagacaacatataataaagccataaacggcactaacttttctgtaacctgaccgattcttttaattccgccaagcaatataagtgcaagtaaaccagccaaaacaataccaataatcagattaactgtacttgcattttttattgcaacaataccataattctctaaagctgaatcaattgccgtagtaatagtatttacctgtgttgcgtttcccgttccaaacactgtaagtacaccaaaaattgaaaacaaatatgcaagccagtgccaatgtttcttcaaaccgtttttgatgtaatacataggtccaccgacccattcacctttttcattcttctctctaaaatgtactgccaaagtaacttcggaaaacttggtacacataccaagaatggcagaaatccacatccaaaaaactgcacccggtccacctattgcaattgctcctgctacccctgcaatatttccagtaccaacagttgccgccaaagctgtacaaactgcctgaaaaggcgtcattgcaccatctactacttccttttttttgaacattcttccaattgtaacttttattgcatatgggaattttctaacctgcaaaaatctggttctgaaacttagtaccaaacctacaccaataatgcatatcattgccggtactccccatataaaatcattaacaacagaatttattttttctataattgatagcattttatcttccttttcttttgtatatattttcacttataatttggcaaacaattctgaacctttctttttaagccacatataaaatatgccactaccagcaagcattaatactaaaaccagacacatatataccacacttcctataggctttgcaataactaaatatatagtacacattactacaggtacagccattcctccaaacattgcaatagccacactgagactttgctttattggtgttatttcatttgtccatgtaagatttggtcgttttattcccaaatacattccaaacaatgtaataaacactaaaaatgcaattggaattagcattgcaagtatcaattctataacacttgccctcattatcaacaacatacatatctggcaaaaaatcattggaatgcctgttattattaactgaacgcaaatttttgcttttaaaatattccaaggtttaacaggaagtgattgcaatatccatatactttttccctcaagagaaactgagggcacaaccatatcatttaaagcaattaatgcacatataactgtaataaaaataataactatatcaccttcacaaaccgttatatccatacttgaagtggtttgtacaaatccatctattatttcaaatataagttctttttttattaaaatcaatccaccaaaaagaatcacaaatatcgaaccaaacccacagttaagcatatagtttgcattggacataaacttcttcatctctttttcaagaagagctttaaaaggactcttttccttaattatcttttctttgtatcgcacctttgccacagttccctgagatgtggcaatttttataaaactcttcgaaataatagccaaaaccaaaactgtaacggctactaaagtcactgtaaatccaatcattgaaggtatgtaaccctcaccaatttttccaaataaatataaaatatttgctttggcttttacttcattgccatatacagccagatttgtaagtaattcctgtaaaatcttttctactttataatatacaaaataatatagtccaataaataataacgaaaaaataacagtaataaaacttttattttttagttttaagctgatttttgcgacaccccagcctaagacacatgatagaatcaaaaccacaaccgagacaagcaatgttaataaaaccggacctataataaccttagaatttatatcagccactacccaatatacaatcactgacggtataataactactgccgaatacataaatcctaaaagataaactccggcaagtcttgccaatacaatacttctgattggaatgggcattgacaatagcaaatcattatcttttgatatgtacaactgttgaaatgtgttgaacacactacccaaagttcccaaaactatggctagtagtgccattataacgaaataaagccatgacattttcgccgcatacattggtttacataaagttattgataaatatacaaacattccaccaaccactcctaccataagaaacagatataatataaaaaatccaatggttgatcctacagaacgctttttattattctttgaactataaaagtaaccacgaaatatttctgtcaattgcttttttaataaaagtccaaacattacttttcctccaactccaaaaatacttcttctaagctatcgtcacctttgacctcttccatagagccatcttttattaatttgccggattttatgatagctactttgtcgcataatttttctgccacctcaaggacatgagttgagaagaaaattgctcctccttcatcacatacctgtctcatcatttctttaagcaaatgggatgcctttgggtccaagccaacaaatggctcatccattatgatcagttttggtttgtgaagccatgctgaaataattgcaagcttttgcttcattccgtgagaatatgatgcgatgggttggtctaaattgtctgttatttcaaaaatatccccatacttttttattctctcttttcttttttccgcatccacctgatatatgtctgcaataaaattcaaatattttatgcctgtcataaactcgtacaaatccggattgtccggtatgtacgcaatatcctttttacattctaatggtgattttttaatagatttgccatttatgtatatttctccctgatcaaatggtaaaatgcccaccacagactttaaagtggtagttttacctgctccattatgaccaataaatccatatatttctccggcatttatagccaaagaaagattgtcaattgcttttttatctccataagtctttgttaaattttcaatttttagcataattgctccttttttattacctgttttagccacaccaaaacctattgtaccatacatttattaataaatgtacgaactttacttttgctcaaatattttattgtattttcagtatttttattaaataaaaaagttgttgccatttttcaaaatagtaacaacttttctgaatgattcagttttatttgatcttttctttaatattgttttttgtttttttaaactgtatttcccatgcgtcaattacatcattacactgacttatcttttcattgagcatttctttcaaacgtttatccaatgcttctaacatttctgtgtaattgattacatcttcctgcatagttttaattctatcttccaattctgcaatcttcatctgttttctgctactttcatccatcagattgctattagtttcctttaatccatctatcattttttgaactacagatttttctgttgcatcacgattttccaactttctttgtagttcttcaattctttcattcatcttttctatttgaagcatcaattgttcatttttgctctgttcagattttgtcttttttcgttcttcttcaacagactccatatgcttttgttgaatatcctgaagataattatttacttcttttttgctatacccacgccatacaacagtaaatctgttttcattttccaattcatgtctcaaagtatcaattgtatctttttcctgtttttccattataaaacctccaatttgtcattttgttttaaaccaagctgttgaacactaccacaaggcagctcaagtacagcaacactctctttaacttttttgcaacaaactcctgttggaacatcacaatcaatttttactattttattcccattgtctaaataaacaacatctattggagttttcataaaaaacatatgaatctgagaacatggttttattagtaaacctcccatttcagaaatattctttggact

SEQ ID NO: 992 - DNA, 29542 bp, unidentified
  source 1..29542: mol_type = unassigned DNA
agcttttccggcacggcggccagcaccggaacggtgcggggcagggcaaaaagtacagctgccgctgccgccaccgtcgggagaagctgcaccagcggcagcagtgtatggcatcgttttttgttcattccaactcctcctgacacggaaaagcaaggccgcctgatgccaagcgaccttgccgttttgtgttatattttacaataaattaggcagtttcccgtgtattcacagcgccacattgaccggcaggacatacacgccgtcggcggcgtagaaggtgatctgagtaatcgttttgccgatgatggatgcaaagtaaggatcatcggcattgaagcccagcttggtaccatgccagatgttggtcacatgatgcaggccgtactcactgccatcggcggtggtcagaactacgccgtagaccttgttggccttgtagtccagatcaaaaccggagattttcatctcgtaggtggcatggtgaccgttggtattcagctccacagtggtgccctctacggtggtctcggtggtgtggaccttgccaaactcccacttgccgctcagcaggttataccatgcggtgatgtagtaggcaggggtctcactgagcttgtagtaagcgtagctctcgttctcaaacaaggcatctgcgccggtgtaggtggtggtggattccttgcccttcagggtaacggtaatgtcgtagctgtcggcatcggtgacctgctttgcattcttcagcgcccacggggtcagcaccttgaccgggaaggaaacgccggtgatgtcggagccgtccgcgttgacgtggtaggaaccggcggcaaggttgcctgcacgggtcttgttcctggtggcgctggtcacagcgtcgatctcagatgcgctgtccacaccggcagccttgtagaagtcggcgtaggggatgttcatctggacatagctggaggtcaggcagttttcctgttccacctcttccgcagcgaaggccgggactgccacagcgcataccagcatagcggccgcaagtgcacctgcaaatacttttttcaatctcatggtaacacacctctatctcagttttgaaaaaatagttagctttgcctaacaattggcgcaaaaaatacaggggaaaacccctcagatggttaggcgaaacaaattttcgatgtaaaaatagcactcccaccgggcgttgtcaagtagaaaccggaaagtttgcagaggtgaatttttcgatgcaggaaacgatctgcatcctctataccgcaaagcccttgacctttttgccggagcgcagtatactttttgcgaagttagtcatgagtaaccacaaaggaggtactacatgatacaagacgcgttctgggggatcctgatcccctttctgggcacaagccttggggcaggctgtgtgttctttttgaaaaactctttgcgcgacggcatccagcgcgccctcaccggctttgccgctggagtcatggtggcggcatcggtatggagcttgctgatcccggctatggagcaggctgcagatctgggcaggctggcatttttcccggcggcggtgggtttctggctgggcattctgtttttgctgctgctggaccatctcatcccgcatctgcaccagaacagcttgcaggccgaagggccaaaaagccagctccagcgcaccaccatgatggttctggcggtgacgctgcacaacatcccggagggtatggcagtgggcgtagtctacgccggataccttgccggaacggctcagatcaccgccgccggggcgctggcactttcccttggcattgccatccagaacttcccggagggtgccatcatctccatgcccctgcgggcagaaggaatgaaaaaaggccgggcattctggggcggcgtactgtccggcatcgtagagcccatcggggcagtgttgacgattctggcggcaggcatcgtggtgcccgctttgccctatctgctcagctttgcagccggagccatgctgtatgtggtggtggaggaattgattccggaaatgtcgcaggggcagcactccaacgttggcacggtgtttttcgcggtgggcttcagcgtgatgatggtgctggatgtggcactggggtgacggttgggggttcccgaaagcgaaatctctttcggaatttccgaaaatgcctaaacttcttgacagaggagacggcagggcgtattattttggcagaaggaccgctgagaagcggctttttatagaatggaaagttagcattgcctaactcacagcacgaggaattgcgggcctgtcatccagtgcagtgggcgcatctggtaaaaagcattgcattgtgaacggtaaacagaaagagggtggcgttatgtccttttttgaaaacacccgaaagcccgtaggctttggcgggaagatcatggttgctatgatgaactttggacacagcgcaatggcagaatgggggctgcgctttttaaagcctgccccggatgccatggtgctggactgcggctgcggcggtggagcgaacattaagacactgttgaaactgtgccccaacggcaaggtgcagggcatcgactactcagccgtcagtgtggaaaaagcgcgaaaggtcaatgccagagccattgcggcaggacggtgtaccgtgcaacaggcaagtgtggcagaactgccgtttgaagcggagcattttgatgtggtgaccgcctttgaaacggtctacttctggccggagcttgcacagaatttcagagaggtttatcgagtgctgaagcccggcggaatctttttcatctgtaacgaagcaaacggcgaaacgacaaaagacgacaaatggacgaaaatcatcaatggcatgaccatctatacggatactgcactgaaagagtatctggaacaagcaggattttgtcagatccagagccacaaaagcaaaaagggctggctgtgcgttacggcgcaaaagcggtgaaatagtgtaaggaggacggagcatggaacgaaaagaagcaatccgcagtgcctaccggctgacaggcggcaataatttttatgatggtatgatcacctgctccaccctgagcgggaaagcggtgtgccgtctggtgtgggacatgaacaaggcagaaaatgatgcctatctggaaaaggcactgtccggcatcccgaagcatttttccggcaagctgctggaggtgccggtgggcaccggcattctgaccatacgataaaaccaaagggagttctgcccggaccttcgtccgtgacggaactccccttttttagctttatagaaaaaccataagtcctctgccacgctcagcggagcaaaaaccacacacccagcaggatcgcaaggaagatcaggttggacagggtgaacagcccaaaatactgcttcttcccctgtggcagctcccgtgcgatctgtcggtaggaaataagactggccatggatgcgatcaaagtgccaagacctccgagattggtgccgatgatgagggcttgtgtctctgccgtgaaaccggacagcagcagggcggcgggaacattactggtgacctgcgaagcaagaaccgccaccagaacttccctgccggtcagaaattcctgcagccagccggaaaaggccggaatgcgtcccagattgccaatgaagatgaaaaaagccacaaaggtcagaagcagggaatagtccactgcccgtaaggtgtgcgggtctgcaaaaagggcgcagacgagtacagcggcaaaggcaatgccataaggcaacacccggatcacggacagcaggcaaacggcaaacagaaccagatacaacaggatgatcttctgatctccctgagatgtagaagaagaaacaagctcgtccacggagagggcggcagaggctttccggcagaccagcgctgcccaagccagcagcaggagcagagagaccagggtgtagggcagcataagaagcacaaagcccccgatgctcatgccgctttttccgtaaagatagaggttctgcgggttgccgatgggggtcagcatactgccaaggtttgccgcaatggtctgcatacagaccaccgggatcagaagggagcggcggacatccgctcccagacggctcaggaccacgaacgtaaagggaacgaaggtcagcagggaaacatcgttggtgatgaacatgcttccgaaaaagcacagcccgaccagtaccagcgtcagctgaaaggtgctgtgggtacgggacagcaatgcccggcccagtccatcaaaaaagccctgccgccgcagcccggccatgaccgtcatcagggaaaacaaaatcgccagcgtgcgcaggttgatgtagccgagatactgcgcatccggcagaacaaagaaggcggagacaacggccagcacagcggctgcggtgaggaccgtttcctgctgaatgaattgtttgagtttcatagagacacatccttgtaattgtaaaggcagccctgctgcggtgccggacggcctttttccgtatttcagagcagcagctcaaacgacccgatcatcaggggcattcttcaatgtggaagatcgctactttcccgaagaacggattgcaagtgcgtgcagcttccggctcaaatcggccaggcaccatgcgattgccataccgccggcaattccaagagcggccagaaaggtctgctctccgaaatgctctgcagcagacaaatcattggagacgactgcgttcatgcagtagtagagggtgcttccgggaatgaggggaatggcagcagtgatgaagaaaggcgtagagggtgcattgcagcatcgggcaagaatttcggcatacagagcggcacagaaaccggccaacagattggcaagaaagacgctgtgcagggtgttggcggcaagaagataagccagccatgccagaagtccgcctacaccggcggcgggtaagtagcgccggttcagattgaagatcagtccgaaaccgaccgaaccaagggcagcactgagcaactgcgaaaaaacctgtatcatgcggaaattcctcccatcaaccagatggcggccatcatgccgagtgcaagggtggcggccatcagaatggcttccaccagtcgaagagagccggaaataatgtccccaagtaagatgtcccggatggaatttgtcagcatgatgccgggaatcagcagcatgatgataccaatcagaactttatcggcatgaaactgcatcccaaagcggcagagcagcagagtggagacaccgctgagaaatgatgctataaactgaaattctacgccattcatacaaaaaggcgagagatagcgctccatccagcaaatcagaacggcaatgccgccggccagcaggccgtcccagagatttccaccaaagaagatggcaaaactggaagcagccaacacactgccggcaagatgcagtcttgggtccggatgctgtgccagaatggcattcagctggcgctgaaactcttctatggaaggaggcgctgtgcagatacggcggctgagcgcattgagcttttccaatgtcagcaggtcattgctggcagcgtgacgcaggcggcgggtctcggtctgcggcggcagcgagggcatggtaagcgtgaccacgatgctggatgtgatcacgaatacattcacatcttctgccccataggcgattgcgatccggttcaaagtgtcctcaacgcggaatacttctgcgccgctgttttgtaaagcttcgcccattcggaccagaatgtggagaaaatgactgatctcggtctcttccacaatatcacgctcttttcatctcggtttctacattattatagcgggtggaccggcagaacgcaagacgctgcaaggacagagagactttttgataactgcattgtttacgcgggcaatggatcgcctggttctgaaaaaacggcttgcatccgttctgtcacagcgaaagactacgattggagaagaaaaaattgaatccagtgcaaacgattttgccgagaattgcatgaaatattataaaagtattattcttttgtgaattttagcactctactattgacactgctaataaacagtgttataacagtggcgtgctcaggagaaaggggcatgagggaaccgcaaggctcccgggaagactccgcttctgatgcacgatcttgattttatgcccgacccgaacgccgggattggagggttgttttatgtttatgcctgctgttttccatgaaaatctgttcgatgatttctttgatccgttctggaacgacggtgcgctggagcgtgcaatgaatcgtgaagagcgtgagaccttcggcaagcgcggcgcaaacatgatgaaaaccgatgtgaagcagaccgccgatggcaactatgatgtggctgttgacctgcccggctgcaagaaggaagacgttcagatggagctgagtgacggctacctgaccattcaggccgtccgcaaccactccaatgacgagaaggacaacaatggccgttatctgcgccgtgagaccttctccggtacctgtgcccgcagcttctatgtgggtgatgccgtgaagaaggaggacatccacgcaaagttcgaggatggcatcctgcacatcgtactgcccgcaccgcagcagcagaaggctctgcctgcgaatcccaatctcattgaaatcgaataatgtttgtgcatcggtgtgaggaacaccggcgcatagaaccaacccccggagaaccgtaaaaagctcttcgggggtttttgtattctgacatcttttcggaagtgaaaaagcgtggtacccacaacaccgacacacaagaggacgcagcagtcaatctttttgaaaccgccgtcaaacacgcataaaagcgaaaagaacccgctttcaacatcaaattgaagtgaaagcgggttctttattgaagtgacaccaagttgtcacaaaatcacagctttagaaggcctgtgcatcatatttatagcgatatttcgccgtaaattcgtttctgcttgatggggtgaattatttccgacttgtcagccggttgagcagcatcacagccaggacaatgacaccaatgacgagaagaatgccgaccatgccgatgagcatcatgggcagggtggtcatccacgaagaaagatgaagcataagtgtacctccgttaagccatcagggtcagaatcaggccgcctgcaatgacggatgcgatctgccccgaaacgttgacgctgatggagtacatcagcaggaaattctggttatcttcttccaatcccatcttgttgaccacacggccgctcatggggaaggcggagatgccggctgcaccgatcatcgggttcagttttttgccttcgggcaggaacaggttcagcagctttgcaaacagcacgccgcctgcggtatcaaaaacgaaggctaccagacccagtgcaaggatgagcagagtatcgggccggacaaacttgtcagcggtcatctgtccggccacggtcaggcccagcacgatggtgatgaggtttgccagcacattctgcgcggtttcgctgagggcgttcagtacgccgcactcccgcagcaggttgccgaacatcagaaaaccaactagagctacactggcaggagctaccataccggcaatgatggttaccacaatggggaacagaatcttcgtcagctggctgacattgcccttttcatagggcatccggatgcggcggtccttctgggtggtcagcagtttaatgaccggcggctgcacgatgggcaccagagccatgtaactgtacgctgccaccatgatggcaccaaggtactgggagttgagggtgttagctacaaaaatggcggtgggaccgtccgctgcaccaatgacagcgatggaagcagcatccttcaaatcaaagaagaagcctgccagaaacagggtgaagaaaataccaaactgcgctgcggcaccaaagagcatgagccacggtttttccagcagggggccaaagtcgatcatagcaccaatgccgatgaaaagcagcaggggaaacagctcgttggacatgcctgcttcaaacagggcagaaatggggcctacggtatcgccctgcgtgatggcaccggacagcggaagattgaccagaatggcaccaaagcccatgggtaaaagcaggctcggctccatttttttggcgatggcaaggtagatgagcaatgcaccaatgccccacatcaccaccatctgccaagtcaggtttccaaaattggaaaacagacttgcgaatgtgttcagaaagttcatagttttcttgcctcctattgtgctccggtacggtgacaagaaaaagagactcctgccacagcaccttgtctgtgacaaaagtctcaagcgaacacatgacatcgggcatttctgccgtgatgacgctgccatgcagcagtctcccgaagaataagccggaacactgccctttactcccttttatcagatgtattaaaacagaatatgggaaaactgtcaagaaaaatacagaaatcttttctgtatcttatgagggttcttccgctgtggttcacgcaagctgattacagcaaagcatttctggaagcccatcgagagaaaatcactctgcataaggcggccccggagagctgcgataagccctccggggccatttttgttttccgatatctttccgacagtggaaaagcgtggtagaataggagcaaagctgatatatgatcaacaggaaggggaaaatcaagatggaaacggtctatatcgcaggcggatgcctttggggcgtacagcatttttttgacacagtgcctggtgtacagatgactgaagccggcagagccaacggaacaacgagttctctggatggcccatacgatggatatgcagaatgcgtaaaagtggtctatgatgagaaaaacacaagcatttcagaactgatggcacacctgtttgagatcatcgacccctacagcctgaacaaacagggcgtggacgttggaaaaaagtaccggacagggctgtacagtacagatcccagacatctggaagaagcaagagcttttataaacggccgggaggaccgggacaagatcatgctggaagtgctgccgctgacaaattatgtccggagcgctgaggagcatcagcaccatctggaacggcaccctgaagactgcagttactgccatatcccggatgctgtcctgaacagatacagaaatcagtaaatatgtgatcctaccattgcagtaacaccaatggaaagtatcaggagcaggagagtgctccgctggtgcgggaatttctggcggataacggcatgacggcggcgcagatcgaacgggtggcctatctggtggggcaccactgatggttctggatgtggcgcttggctgagagagcgaagcagcttctcaatggtaaaataacggaaaacacccctgtgagcttttttaaactcacaggggtgtttttaggcgttggggtcggtcagcacaaaggtcagctcggcggtggcggcgcacttgccgtccacccacgccgaggctttgcccacgcccaccgggccgtgctgctctaccagttcacagtgcagggtgagcacatcgccgggggtgacctgtttgcggaagcgggcattcttgatgccgccgaagagggccagtttgcccttgttctccggcaggctgagcgccgcagcggcaccggtctgggccagtgcttccagaatgagcactcccggcatcaccggctggccgggaaaatgtccgcagaaaaattcctcattgcggctcacgcacttgcggccgatggcccactggcccggctcatagtccagaatgcggtccacaagggcaaagggatagcggtgcggcagaagcgccgcgatctcctcactgttcagggtgtttgcgtctgcacgcacggtgcggggttctgccatgggtcagccctcccatctgcgcagggcgatgcaggcgttgtgcccgccaaagcccagactgttgctcagtgcgtaggtcatggcctgcgcacggccagtgttcggcacatagtccagatcacattcgggatcgggctgctcatagtggatggtgggcggcgcaaactggtcatgcagggccagcgctgtaaatacggcttcgatgccgcccgcaccgcccagcagatggccggtcatgctcttggtgctcaccacagtcagctgctttgcgtgttcgtcgaacaccgcatggatggcggcggtctcgcaggcatcgttcatgtgggtgccggtgccgtgggcgttgatgtgatccacctgctccggtgcgatgcctgcatccgccagcgtcagcgccatgcagtcgatggcacctgcgccgccgggggcgggggcggtgaagtggtaggcatcgcagttggcaccgtagcccaccacctcggcgtagatgtgcgcaccgcgggcacgggcatgttccagctcttccagcaccagcacaccgctgccttcgcccatcacgaagccgccgcgccgtgcgtcaaagggcaggctggctgcatccggatcggtcgcggtggaaagcgctttcatgctggtaaagccgccgatgcccagagggctgatgcagctctctgcaccgccgcagaccatggcggtctcgtagccgtcacggatgcggtggaaggcatcgcctacggcattggtgccgccggcgcaggccgtcaccgggcaggtgcacatgcccttcagaccaaagcggatggccacctgtgccgctgccatgttggcaatggacatgggcacgaaataggggcttaccttttccatgcccttctcttcaccacgggtgtgctgctcctcaatggtgggcagaccgccgatgccgctggaaaggatgacaccgatctgtttggcttccgcttcggtgtccagaccgctgtctgcaactgcttcagcggcggcagcaagggccagaacggtaaagcgggccatcttgcgggcttcctttttgtccacgatggtttccgggtcaaagcccttcacctcgcctgccagcttacatttaaaatcggtggtatcgaactgggtaatggggccgatgccgcatttgcccgctttggcagcggcccagctgtcggcggtgttgttgcccagcgggttcacggtgccaaggccggtgatcacgactctgcgtttttccatgagagttttctccttttacattgccatgccgccgtctgcacagagcacctgcccggtgagatagctgctttgttctgcggcaaaaaatgccactgcatttgccacatcctccggctttcctgcgcggcctgcggggatgccctttgccatttcggcacggacggcttccggcagggcggcggtcatgtcggtctcgataaagcccggcgcgaccgcattcacggtcacattgcggcttgccagctcgcgggcaaggcttttggtcaggccgatcaggcccgccttgctggcggcgtaattggtctggccggcgttgccccgcagggccaccacactggaaaggttcacgatgcggccccagcgctggcgcaccatgcggcgggcggcctccttgcagcagaggaacgcgcccttgaggtttgcgttcagcactgcatcaaagtcctcttcgctcatgcgcaggatcagattatcgcgggtaatgcccgcgttgttcacaaggatatccacccggccaaaggcgttcaccgcctgttcaaagagcgctttgcagccctcggcagtggaaacatcggcctgcacagccacggcatttgcgttttcggccttgcacagagccaccgtctcggcagctgcagcttcgccgtggcagtaattcaccaccacattgcagccctgctttgccagctggatgcacacagcccggccaatgccccggcttccgccagtaacaacggcggtgcggatgatcgtttcttcgctcatagctcttccttccatgctgtcagtgcggcgttcagctgctccggggtctccaccgaagcgcagaccacgccgggcagggtctttttcacaaagccagccagagcactgcccgggccgacttccagaatatggtctacgcccagctcaccgaggcggtggagcgtatcttccatgtaaacgctgctctgcacctgcttcacgagcagggcggggatgctgtcctgctcagctttttcacggccaaggcagttgaacagcaccggcacctgcatctcgccaaagggctcagacgaaaaacgctttgccagtgcatccccggcgggggccatgaggcgggtgtggaacgggccgctcaccttgagcgggatgcagcggcgggcaccggcttctttggccagtgcggcggctttgtccacagcggctttctcgccgccgatgaccagctggcccgggcagttgtagttgcagatctgcacacagccgagctgtgcagcctgctcacagcaggcggcaagtgcctgccggtcaaggttcagcacggcggtcatgccgcagtcgatgccctttgcagcttcggccatggctttgccgcggtaagcggccagctcgatggcctgctttgcggtgaacaccccggcagcttccagcgcggagtattcgcccagcgaaagcccggccacataagcgggtttcacgccctgctgggccagcactgcggtcacgccgcaggcaaaggccaccatgcagggctgggtgtattcggtctgattcaaaaggccgtccgggtcctcaaagcagacgcggtgcagatcgaagtccagctctgcgctgtcaaatgccgcccggaacgcgggagagccttcgtaaaattctttgcccatgccggggtgctgtgccccctgaccggcatataaaacggcaagcttcattgattttgcctccattcggtcacaagttcatccatcagctcctgtaccgtgcgcatccggtccagcctgcccacgttggccccgcagaagaacaggccctcctccacattgccctttacggcttcgatgagcgcgtgggtgatgcagtagggcaccttggcggggtcgcaggtcttcaggcagcgggcacagtgctggggagggaagcgggtcccctctgccagcgcctgcaccagcggggtgttcagtgcacggcccggcattcccaccgggctgtggatgatccgtacatcctcgggccgggcgttcagcagaacgtccttgtagccctgggatgcgtcgcactcgtaggtggtgataaagcgggtggcaagctgtacgcctgcagcgcccattgcggtaaagtgggccatgtcggcaccggtgtacacgccgcctgccacaaatacagggatgctgtggccaaactgtgcttcaaagggctttacctcggccagcacctcaggcaggatgtcgtcgagggtctggcatttgcctgccagcaggtcatcttcggcaaagccgaggtgtccgcctgccttgcagccttcgatcaccacaaaatcagcggtgcggccaaactctttggcccagcggcgcaggatgagctttgcggctcttccgctggaaacgatgggagcgatggcaacatccgttgtgcccacgatgccgggcagctccagcggcaggcccgcgccggacaccaccgcgtccacgcccgcttccacagcggtgcggatcgcggccgcataatcctgcgttgccaccatggcgttgatggctaccatgcccgcgccctttgcaatctgctttgcttttttaatttccgctgtcagggcacggtggttggcgcttgccgggtcgcgggcaaagtccggctcccggtagcctgcatcggctgtggagatgcaccccatgccgccgcaggctgcaacagcaccggccagcccgccaagggaaacgcccacacccatgccgccctgtaggatgggcacagacagggtctttctgccgagggtcagcattcggtgctcagcgcggcaatgcgctgcctcccgccgttccacaggtctgcaagaatatccgccaccgggcgcacctcgtgcagcatgcctgccacctgaccggccatcaggcttccggtggtggtgtcgccctcaaacacggcgcggcgcaggctgccaagggtgtacttttccagctccatcttgtcggcaccggcgttttcctgccggacatattcgcggctcatgcggtttttcagcactcgcaccggcgcacccacgcttcggccggtcacgatggtatcgctgtccttggccttgagcagggcggctttgtagttttcatggatggggcactcctcgctcaccagcaggcaggtgcctacctgcacgccgcaggcacccagagccagagctgctgccagctggcggccatcggcgatgccgccagccgcaatgaccggaatgctgacggcatccaccacctgcggcaccagcgccatggtagccatttcgcccacatggccgccgctctcggtgccctcagcaatgacagcatcgatgcccagcggctccagatgctttgccagcacggcggcggcgacaaccgggatcaccttgatgcctgccgctttccacgcggggatatatttgcccgggttgcctgcaccggtggtcacaacgggcacgccctcttccaccacgatcttggcaaactcatctgcctgcggatgcatgagcatgatgttcacgccaaaaggcttgtcggtcagctctttgcagcggcggatgttctggcgcagggtgtcggcgttcatgccgcccgcaccgatgatgcccagcgcacccgcattggagcaggcggcggcaaactcgccggtggcaatgttggccatgccgccctgaatgatggggtattttgtgcctaaaatttcgtttaaaagtttcatagttttatcctatcggtaagcgtcctcgccctctcagtctcgctctgctcgacagctctcccaagggtagagcccttggcagtacggtaaacttttcggttttgccaaaggctcccactttgggggagctgtcaccgaaggtgactgagagggcgagcccgtttgccgaacatgatttttactctttgtattgaaaaattgcgccgccccatgtcaggccgccgccaaagccgatgcaggccagaagctggcccggctgcagctgcccgttctcggcaagctcgttcagggctaccgggatgctggcggcgctggtgttgccgtggcggtccatgttcttgtagaactttgccgggtcggccttcagcgcccgcacgcagtggtcgatgatgcggctgttggcctgatggcagaccacccactcaagatcatcgagggtcagctgtgtttcatccagcacagtgtgcaggcacttgggcagggcatccactgcaaagcggaatacggccttgccgtccatggtgatgggcgcagaacctgtgcggttcggcccgcccgcatggagaacatcgctgccgcgcgcgcccagcgtcagagcaaagggagtgtccgacagctgaaaaatggcagcaccggctccatccccaaacagtacacaggtggagcggtcggcggggtccatcaggcgggaaagggcttcgcacccaatgacgagggcatactgtccacccaaagttgtcagcagtccccgcgccacggctatgccgtagaggaagccggaacaggccgcgttgacatccagcgcaggccggtcctcgggaaggcccagcgccgcctgcacctgacaggctacactgggggtcgcgtctggggcggacagggtggcacagatgcagcacccgatctgcgcaggggcaaggccgctgcgggccaaagcctgctttgcggcggaaatggccagcgtggcggcagattcatcctccgtgcaccagtgccgggtgcggatgccggtgcggctggtgatccactcgtcactggtatccaccatgcggctcagatcttcgttggtgaccgttcggccggggatggccccgccggtggcgatcagctgtaaaccactcatgcgttcctcgtttctccgatctggcggtattttttatagcgctggtcggccagctggcggccgctcatgcggcacagctctttcaggtgcacccgcaaagcaacatccaactgttcaaacaaggctgcgtggctgcgctgtgcgccgcccaacggttccgggatcacctgctccacgatgccatcgctgtacagatcctgcgcggtcagcttcatcatctcgcaggcttcgccactgcgggaagcatccttccatagaatgctggcaaagccctcggggctgagcaccgagtaaacggcattttccagcatgaggatgtggtttgccacacccagtgccagcgcaccgccggaagagccttcgccggtgacaacggcaatgaccggcacggtcaggccgctcatttccatcaggttgcgtgcaatggcttcgccctgaccgcgctcctcggcatccttgccggggtaagcgcccggcgtgtcaatgaaggtgatgatgggccggccaaacttttcggcctgcttcatcaggcgcagggccttgcggtagccctccggccccggcataccaaagttacaggccagattttcttccagtgtgctgcccttgcggtggccgatgaccgtcaccggcaatccgtgaaaacgggcgatgccgcccagaatggcagggtcttccttgcactgacggtcgccgcgctgctcaaagaagtcggtgaacagggcagaaacagtctcatcaatgtgggggcgctccgggtgccgggctagaaatacccgatcctcggcggtcagcgggccgcaggtacgcaggatctcgtcctcttccacagccagctctgccagctcggaggcatgggccgtgatggcatccatctcgttgccgctgcctttcagcgcggcgatctgggcatccagcggagccagctgctctaaaatttccttgatcattcgtgttttcctcctgcatggagctgcaagacctggatcagggtatcccgcagctggctgcggggcaccacctgatccacaaagccgtgctccatctggaactcgctgcgctggaatccggcaggcagcttttcgccaatggtctgctcaatgacccgcggacctgcaaagccgatcagcgcgccaggctctgccagcatgatgtcaccaaggcttgcaaagctggccgtcacaccgccggtggtggggtgggtgagcacactgatgtacaacccgccctttgccgaaaagcgctggatggcggcactggtctttgccatctgcatcaggctgaaaatgccctcctgcatccgcgcgccgccgctggccgaaaaaataaccagcggcaggtgctttgcggcggcgtactcgatggcgcgggtgatcttgtcgcccacggcagtgctcatgctgcccatgaaaaagcggctgtccagcacggcagccacgcaggccaccccgccgatgcggccggtggccgttacagcggcttcgcgcaggccggtcttgttctgggcggcggcaagcttttcagggtagcccggaaaatgcagcacatcctgcggagcaaggtcggcatccagttcccggaagctgccgtggtccagcaccagactgagccggtagtacccgccaatgggcatgtggtagccgcagtttgggcagacgtaaaggcttcttgcccacagggtgcgtgcggcgcggcggccgcactgcttgcactccacaaactgctgctcgtgccagacggcaccggcatcccgcttggccttcagctggaaggtgcgctcccgcattcggccggggaaaagatctcggatatcgttcattgctttttgcctcagatatgtgcggtgatgtagttgtagatatcgcccacggtcttgagctttgccagctcttcgtccgggatggacacgccgcaggcatcttccagagccatgttcagctccacggcatccagactgtcggcctccagatcctcggtcaggctggcctccatggtcaccttgtcctcgtcgcagttcagggtatcaacaacgatcttcttcatttcttcaaacgtcatggtagtagtctcctttgatttgttttgaatatctaaattttttgaagtttcttgcgaacacgaccattatagccgaatcgttggataagtcaagaataatagttaaaatattttatcttttacaattctgacacagttttcttccttttatatattgtcctcttttacgccggtgtgcagtgtggtatactggacccagcagtctgagaacagtgtttccctgtgagggaaaggagccttccgatgattacgatttcagagcgcagagagcatgaatctgcaaaaagttttgttctgcgggtattgatcgataatattatcaatacccgtctggagccgggtgaaaaactgaacgagccggaattgtgcgaacagctgggggtgagccgcacccccttccgggaagcagagctggagctggcgcagcggcggctcattgagatccggcccaagatcggcacctatgtttctctcatcgatgcagagctggtggaagaagtgcgccatctgcgtgctgtgctggaagcagagatcgcccgcatggcgtgcgaaaagctgaccccggcggatatcgaccagctgtgggagaacgtggcgctctggcgcatgtacattgagcgtgcacaggaagaaaaaatctttgagctggacaaggggttccaccggctgctttatgtgcagtgcggctgcccgtactggtacgatctggtggaaaatctggctccgcattttgaccgcaccaccatcctcagcttccgctgcaggcccgcaaaaacgatctacgaagatcacgtcagcctgctgaaagccattgaacagaaggatgcggcggcagcacaccgcattgccgggcagcatatgcagcgctacacggagaacctttctgcgatccgggaagcattcccacactatttcaaagcctgaaacaaccgtatcacgttcagaaatgccgtatctatgccaaaagatgcggcatttttttgtgcagttttttgccggaaacggcttgacagagatcatgaaatgttatatattttagtcaatgaaatatataacataaaagccggatctccaaatcaggaagaaaggtgaataccatgaaaaaacaatacgatgtggtcatcatcggtgcgggtgtcgtgggcagcgccattgcacgcgaactttcgcgctacaaattgagcattgcagtgctggaaaaaaatctggatgtttgcaacgagactagtggccgcaactctgcggtggtgcacggcggctttgccaaccccattggcagcctgaaagcgaagtgctgcgtggaaggcaacaagatcatgggccagctggccgaagagctgaacttcccgttcaagcgttgcggcaaggtgctggtgggcaacacccccgaggacatggagcagctggagcgcaccatgaagcagggcgctgtcaacggctgcaccggccttgagatgatcgatgaagcaaagctgcacgagctggtgccagccgtggtgggcaagtttgccatgtggtccaaaaacagcggcatcatggacccgttcctgtacacggtggcgctggccgagaacgcacacgccaacggcgtggacttcttctttgaccacaaggtagaggctatcacccgggaaaatgagctgtactacctgcatactgcccatggcgatttctgcacccgctgggtggtcaacgccgctggtctgggcgcaaagcagatctccgacctgctgggcctgaccggctaccgtgtcatcggctcccgcagcaactacatcatcctgcacaagcgcatgggcaagctgctgcccatgccggtgtacccggtgcccagcaacacctatatgggcatccacatcacccccaccgtggacggcaacgtgactgttggcccggacgcggagaacaccgatgtgctggacgactacagcgtgccgcaggccaacatggacagtctggccgtggagggcgcaaagctgtggccccacatcttcaaaaaggatcagatccgcaccttcgccggcatccagcccaagtgggtggatgaaaacggtgccattcaggactggaaggtggagatccgggacgacgtggcacccaatgccgtcaacctcgtgggcattgaatccccgggcctgaccggcagcgtgccgctggcccgctacgtcatcggcctgatgcaggagcgcgaaaagtttgaggaaaacccagactttgacccgcaccacaagggcatcgtcaagtttgccgagtgcacgccggaacagcaggcagagctcatcgcgcaggaccccgattacggcgagatgatctgcagctgtgaggaagtgaccaaggccgagatcctgcaggccatccataacccgctgggtgtttccaccatgaccggcatcaagtaccgcacccgcgccatgatgggcggctgtcagggcggcttctgccagatgaagatcgaacacttcattgagcaggagctgggcaccgagccggagaatgtgcgttacagccgtcaggggtcatgggtactcaccggcaatatgcggaaggaggagaactgagcgatggaacagaaagacgttgtgattatcggcggcggccctgcaggtcttgccgcagcggtggagctgcacaagcagggcatccgcaacatgatcattctggagcgcgaggcgatgctgggcggcatcctgcgccagtgcatccatgacggtttcggtctgggccgcttcggcgagagcctgtccggcccggaatatgcacaggcgttcattgatgaagtgaacaagcgtgagatcccttacgagaccagcgccacggtgctgagcctgacggaggatcgtgtcgtcaccgcctccacccgcagcggcctgcgccagtatcaggcaaaggctgtggtgcttgccatgggctgcaaggagcgcagccgcggagcactgggcattcccggcgagcgtccggcgggcgtgttcaccgcaggcaccgcgcaggcttacatgaacctctacaaccggatgcccggcaaggaggtcgtcatcctcggctccggcgatatcggcatgatcatggcacgccgcatgacgctggaaggcgcccatgtgcaggcagtgttcgagctgatgccttacccctccggcctgccgcgcaacatcgtgcagtgtctggatgactacaatatcccgctctatctcagccacaccgtcaccgagatccatggccgtgaccgtctgaccggcgtgaccatctccgaggtggacgcgaaccgtcggcccatccccggcaccgagaaggagtacaagtgtgatacgctgatcctctccgtgggcctgatcccggagaacaagctgctggaggatgccggcatcgccattgacccccacaccaacggcgctgtggtggacgagaacctgcagaccaacgtgcccggcgtgttctctgccggcaatgtgctgcatgtgcatgatctggtggactttgtttccatggagtccgaggcactggcacgccacgctgccgcctacgttgagggcaagggcatcgacccctgcacgctggacgtgaagtgcggcgagggcgtgggccacaccattccgcagaaggtcagcggcaagaacgactttagcctgtcgctgcgcgtgcggaaccactaccgtgactgccgcatcgtggtgcgccagaacggtgtggaagttgctgccaagaagatgaagaaagccattcctgcggagatgatccagttcaaggtctctgctgccaagctgcaggaaacgggcgcactggaggtgtcggtggaatgaaaaagcaatttacctgtatcgtctgccccaacggctgcgagatcgaagccgaagttgaaaatggtcaggtgatctcggtcaccggtcacacctgcccccgcggcgaacagtatgtccgtcaggagctgagtgcgccccgccgcaccatcgctagctcagtgctggtcaagggcggcgagctgcctgttaccagcgtgcgcctgaccaaggctgtccccaaggatatgatcttcccggtgatggacgagatccgcaaggtggtgctgaccgcccccgtcaaggcaggcaccatcgtgttgcacaacgtctgcgggctggacagtgacgtgatggtcaccaagaatgtggatgcctgctgaccggctgaaataaagaaatacggaaaaacagccctgatcgtctgcctgcttttacagcggacacggtcagggctgttttgatgctataaacctgttgacatgatgtggaaatgggcttgtgacggccccgacgtgggaaaggactgcggcaaacgccaaaagcgggcaatgccgcagcacatggctggtctgtacaggcgcggcccatgcactgggtgtggagcctgccagcattgcaaaaatacgggcacaaaaagaactgtttgcattttggaaacgagatgctatactattgattgtacatacaacgatgtagatacaactttctgcaatgaagcccggaggagcctatggatattacggaacgaaaaatcacaaagatcgcacgcgaagcggaaaaactggtcctgctcacgatgcgggaggaaggggtcggcacagcagagatcgacctgatccatgcagtgcggcatcaccccggctgcacgcaggcgcagctggcggaactgctgcacgcagataaggctgccattgcgcggcggacaaaaaatctggaagcaaagggtcttctgatccgcagagatgcccccagcgaccggcgcagccagctgctgtatcccacccaaaaggcggaaagcctgagatcctccaaggcagagatcgaagcggccttttacgaatacctgaccaatgtgctcaccgccgaggaagccgctgcctttgccgctgcgctgaacaagctgtacacagcatccaagaccgagagccgcgcgggcttcccgcatttccggaaagctgcaggaggtgaggctgctcatgaaaaaggataaaacgttccgcccggacagggtgctcttctatttcaaagcagagtggcttccgctggcctttgtcacgctgtcgggccttgtgtataacatcggcctgctggcaacgccttggttcgagggccggctggcccagtgccttgccgacattctgggcggcagcgagacggcggcaaaaatggccatgctggtgctggcctatatcgtggtcacgctggcggtgcaggcggcgcgctttatcaagcgcttttatgtccgccgctttgccaacaacatcaaccgccggatgaagggcatcctgtatgccaatctggtgcggcagagccgggcggcgctggaaaaagaaggtgccggtgaactgatgaccaaggccatctcggatgtggatgactgcgtagaggggatgcgcaagttcaccaccgagatctttgataccggcgtggcgctggtgggctatgctgtgatgctgctggtgtacgactggcggctggcgctgctcagcctgctgttcacgccgttttcctacatgtgcgcggcatggatgaaaaagccggtgcagcgcgccggtgcggcgtacaaaaaggcggcaagtgcgctgagcgctgccaccctcgaccgcgcccggaatgctgtgacctaccgcatttacggctgtgaggatgcccgcgtagaaaagtacgaggaagccctgaacacctacgaaaaaacagccgtgcgcaacaatgtgtggcagtccgctctgccgccgctgtatctggcagcgtctgaggcaggcgtgctgttcattttgtggttcggcgctaaaaatgtgctcggctccggctggagcacatgggacattgcggcgttcaccaccttcctttcctgcttcacgaaactggtggtcaaatcctccaaggtggcaaagctgttcaactcggtgcagaaagccgaggtctcgtggaagcgcatcaagccactgatgaagcagccggaacagctggaagcattgaatatcccggcggcgcaggacgtgacgctggaaaacctctcctttgcctatggcgagggacccatcttttccggcctgagcctgacggcgcaccccggcgatatcattggcatcaccggcccggtggcctgcggcaaatccacctttggcagggtgttcctgtgcgaagcaccctacggcggctcggcaaaatttggcaaaacggaatttgctgccctgaccccgcggcagatctccgccaccgttggttacttgggccatgatccggagctgagcgccgatacggtgcagaacaatgttctctgcggcagtgaacaggatgccatgccgtggcttgctgccgccgcgttggacgacgaagtgctggccatggaaaacggtgtggataccgtcatcggccccagcggcacccgcctttccggcggtcaggcccagcgcttggcactggcaagaacgctggcccacccgcgcccggtgctgatcctggacgacccgttctctgcgctggaccgccataccgaggataccgtgtttgccgatttgcagagcgatgcaaaggataaggtggtcttcctcatctcgcaccggctgtaccacttcccgcagatgcagaaagtgatctttatggacggcggtaaaaccaccgttggtacccatgcccagctgatggaaacggttccgctgtaccgccagctgtacgagagccagacggtgcagaaagaaggcgatctggatgaagagtaaaaaggataacggcgtatttgaagccatccgcatggccgccatgtcgcatcatctgctcacggcgggcaccatcctgtgcgtggcggcatcggtggtggcatcactgctgccgccgctgctgctggccggtatcattgaccggctcaccgcaggcatcccgctcacctttgcagcagtgctgctttactttggcagtctggcgctggaaggggggctttcctccgcgcaggaaagcctgctggtgctctttggccagaaaatgacccacgcgctgcggtcggaaatgtcccggaagcttacccggctgcccgcaagcacgctggcaggccagaaccccggcgaggtggcggcacgcttttccggcgatgtggacacggtggaagcgctgttcacctccggcatcatcagcatggcggcagatgcctgccgcatcatttccatcatggcggtcatcgcggtaaaaaacaccggcattgcgctggtgctgctgctggtgctgccgctgtttgcggtgttcacccgccatgtgcaaaagcggatgctggccgcacaactggataaccgccgtgccgttgcggctgtctccggtcaggtgccggagacgctgcacaacatccgcaccatccgggcactggggctggaaagctatagggaacgccgctatgaccgctgcatcggcgagagctacgccgctatggagcgcaccaatttttacgatgccatctattcgccggtggtgctggcgctgaacgcggtggtggcaggcatcgtgatgctgctttccgcttccggcaatgccatggtgcttacattctttgggatgtcggtgggtacctcggtggcgatcatcaactacatttcccgcatttttgctcccattgaaagccttggcatggagatccagaccatccagtcggccatggcgggcgtcaagcgcatcgatgcctttctcgctcagccggagcgcacgatccctgccgagcgccggaccgctgcgcgcggggatgtggagcttgcgcatgtgaccttcggctatggcgaaaagcccgtcctgagtgacttctccatgacggtaaagcagggcgggcaggtcacgctggtgggccgcaccggtgcgggcaagagcacggtgttcaagcttctgctgggcctgtaccagccgcaggcgggctctgttaccattggcggtgtggatgtggcacgcatcaccgaccgcgagcgccgcacctgcatcggctgcgtggagcagcatttctcccgtgtgccgggcaccgtgctggagcagatcacgctgggcgatccgcagatcactgcagagatggcacggaatgcggcaaagcttgcgggcattgacgaagccattcaggccctgccggaaggctgtgacaccgtttgcagcgatggcatgttttcgcagggcgagtggcagcttctgtccattgcccgcgctgctgcggcggacccggctgtgcttttgctggacgaggtcacggcaaatctggacgctgaaacggaagcccgtgtgctggaagcactgcgccgcgcctctgcaggccgcacggtgctctcagtctcccaccgcatttacgaaaacctgggcggcagaacggtgaagatcgagccgcagagcatgtgaaccgaaacatttttcgcaatgcacgaaaaacgtttcatctcttgacagaacaggcgctgtgctgtaaagcaaggcgcgaaagccgggcaaagctcgtctcgttctttcaggaatggtaaggaagatcaaaaatctgttttttcatgtcagacatgaagatacttcttgttctttcgcagagaaaggaatataatgagaaagataagatcaccagcatgcacatgataaaacttggagtgcgctcaaggtcaagaggaagatgatttctttcccggcaggactgtgctatactgacaaaaagatctccgggtgcagcgcaaaagctgctgcagggaagctgaaacttacagaaatgaggaacacacacggcaatggcacagcacgaacgcagcacggcatattatcatcttccgggactgtttgaattttatgaactgtaccgtgtgtttctgccgctgttccgtgaacacagggaatatttttacgactggtgcgagatcggttcggtctacggtgcaccggccgactgcatctggggcgggggccgcactggctttggcgatgcacagccgcaccgggtgcttgcactgatgcaggaatatggcatatcggcccggctcaccttcagcaattcgctgctccgggaagagcaccttgcagaccggaaatgcaatgccctctgtgcgctgtttgaaaaagaaaaccgtgtgcagaatggtgtcatcgtccattcggacctgctgctgaactacctgaaaaggcagtatccgggcctttatttcgtgtcctccacaacaaaagtccttacagattttcagcagctccgcagagagacggaacgggaagagttccgctatgttgtgccggatttccgcctgaacaagtcgtttgcagagctggataccctgccgcaggatcagaaggacaaggtggaatttctgtgcaacgaatgctgctggtacggctgccgggacagaaagcactgctacgagaatgtcagccgcaaaaatctgggcgaggactgcccggaccaccgttgcacagcgccgggcgcacagcagggctatcgtttttcaaaggcaatggaaaaccccggcttcatcggggccggggatatccgcaaaatttatctgcccggcggcttttccaacttcaagatcgaggggcggggactgggcagcgcgttgatactggaatttctgctttactacatgacaaagcctgagtatcagctgcgcgtccgggaagaaatttatctggacaacatgctggatctgttctgatggccctgagccgcgttcatatttgcttccgtgatgtatcctgccgtcttcgggcggcttttgttttaggatgtacggattgacaccctcaaaagcatcctgcagggaggtgcagcctgcattgttctcggaacgctatgtggaccgtatgatctcttaccatgcaggaattttccgttccctgatcgcaggcggcgaaattcgggatgaggacccggatacattggcatggatgtacgtttccccggtcatcaccctgctcagcgtctgcgaccgccagccggaacgagaagccaaaagccttgaaaagctggacgctcatgtaaagctgttcttccgtacctttaacattgaacgaggtgaaaaatgaaatcatccgatggatcaatacgaagggtggtgtgaaataatggcttccagcaaagaatatcttcattttattttggaacagctatcagatttggatgatatctcgtatcggtctatgatgggagaatatatcctttattatcgcggtaaaatcgtcggcggagtctatgatgacagattgcttgtaaagaaaacaagatctgctttgaaatgtatgcctgcggcggcatcatggagccggtggccgtctgggtgcgcaagggcggcgaatgggccatcatccaccgctgcaaacgctgcggaaagctcagctccaaccgggtggcggcagacgacaatcccatgaagctcatgagcattgccatgaggcccctgtgctctccgccgtttccgctggactatcttgaggaaatgaccgccttgatgggcggcgatggacggatgcggtaagccgcagccaaaaacaaaaaggtcgctgtgtcggagaagcgctctgcggcacagcggctttttacaacttactgcactcatcatggaacaatcgggcgttctgtgctatattctttaaagagccttgagtggaggagatccaaagcattgctgccgggcagatcaccgtcaacggcacggcagacgggaaaatggaagaaactgtgccggaaaaggcataaggatatagggggacgcttcgatggagtatatccgaatcacaaaagaaaacatcgacaaggaacacatctgttgtgccatgtccggcaaacagagccttgccaagaaggaatggcttaagcagcgatttgaggaggggcttgttttttaccgcagtgcggagcgcggcaaatgctttatcgagtacatcccggcagaaaacgcatgggtgcccattgaagcggcaggctggctttatatcaactgtctgtgggtctccggctccttgaaagggcacggctattccagcgagctgctggaagaatgccttcgggatgccaaggcgcagggcaaaaacggcgtttgtattctgtgtgcagaggggcgcaaacgagaattccttgctgacccaaagtttttgaaccataagggctttaaggtttcggacatctccgattgcgggatcaacctcatgtgcctgccccttgcagagaatgcccagccgccaaaattcaaggcctgcgccaagcatcccaaggtggaggaaaacggctttgtcctctactataccgaccagtgcccctacacctattattgggtgccaaaggtgcaggagactgcaaaggaacatgggattccgttcaaagccatccacatcaccgagaaagagacggcccagaatgtgcctgcaccggtcacaacatacgcattgttccgggatgggaagtttgtgacccagagcatccagtcggacaagaaatttttgaaattggcggcagaataa

SEQ ID NO: 993 - DNA, 13948 bp, unidentified
  source 1..13948: mol_type = unassigned DNA
  misc_difference 561: note = a, c, g, or t
  misc_difference 562: note = a, c, g, or t
  misc_difference 563: note = a, c, g, or t
  misc_difference 564: note = a, c, g, or t
  misc_difference 565: note = a, c, g, or t
  misc_difference 566: note = a, c, g, or t
  misc_difference 567: note = a, c, g, or t
  misc_difference 568: note = a, c, g, or t
  misc_difference 569: note = a, c, g, or t
  misc_difference 570: note = a, c, g, or t
  misc_difference 3154: note = a, c, g, or t
  misc_difference 3155: note = a, c, g, or t
  misc_difference 3156: note = a, c, g, or t
  misc_difference 3157: note = a, c, g, or t
  misc_difference 3158: note = a, c, g, or t
  misc_difference 3159: note = a, c, g, or t
  misc_difference 3160: note = a, c, g, or t
  misc_difference 3161: note = a, c, g, or t
  misc_difference 3162: note = a, c, g, or t
  misc_difference 3163: note = a, c, g, or t
  misc_difference 3164: note = a, c, g, or t
  misc_difference 3165: note = a, c, g, or t
  misc_difference 3166: note = a, c, g, or t
  misc_difference 3167: note = a, c, g, or t
  misc_difference 3168: note = a, c, g, or t
  misc_difference 3169: note = a, c, g, or t
  misc_difference 3170: note = a, c, g, or t
  misc_difference 3171: note = a, c, g, or t
  misc_difference 3172: note = a, c, g, or t
  misc_difference 3173: note = a, c, g, or t
  misc_difference 3174: note = a, c, g, or t
  misc_difference 3175: note = a, c, g, or t
  misc_difference 3176: note = a, c, g, or t
  misc_difference 3177: note = a, c, g, or t
  misc_difference 3178: note = a, c, g, or t
  misc_difference 3179: note = a, c, g, or t
  misc_difference 3180: note = a, c, g, or t
  misc_difference 3181: note = a, c, g, or t
  misc_difference 3182: note = a, c, g, or t
  misc_difference 3183: note = a, c, g, or t
  misc_difference 3184: note = a, c, g, or t
  misc_difference 3185: note = a, c, g, or t
  misc_difference 3186: note = a, c, g, or t
  misc_difference 3187: note = a, c, g, or t
  misc_difference 3188: note = a, c, g, or t
  misc_difference 3189: note = a, c, g, or t
  misc_difference 3190: note = a, c, g, or t
  misc_difference 3191: note = a, c, g, or t
  misc_difference 3192: note = a, c, g, or t
  misc_difference 3193: note = a, c, g, or t
  misc_difference 3194: note = a, c, g, or t
  misc_difference 3195: note = a, c, g, or t
  misc_difference 3196: note = a, c, g, or t
  misc_difference 3197: note = a, c, g, or t
  misc_difference 3198: note = a, c, g, or t
  misc_difference 3199: note = a, c, g, or t
  misc_difference 3200: note = a, c, g, or t
  misc_difference 3201: note = a, c, g, or t
  misc_difference 3202: note = a, c, g, or t
  misc_difference 3203: note = a, c, g, or t
  misc_difference 3204: note = a, c, g, or t
  misc_difference 3205: note = a, c, g, or t
  misc_difference 3206: note = a, c, g, or t
  misc_difference 3207: note = a, c, g, or t
  misc_difference 3208: note = a, c, g, or t
  misc_difference 3209: note = a, c, g, or t
  misc_difference 3210: note = a, c, g, or t
  misc_difference 3211: note = a, c, g, or t
  misc_difference 3212: note = a, c, g, or t
  misc_difference 3213: note = a, c, g, or t
  misc_difference 3214: note = a, c, g, or t
  misc_difference 3215: note = a, c, g, or t
  misc_difference 3216: note = a, c, g, or t
  misc_difference 3217: note = a, c, g, or t
  misc_difference 3218: note = a, c, g, or t
  misc_difference 3219: note = a, c, g, or t
  misc_difference 3220: note = a, c, g, or t
  misc_difference 3221: note = a, c, g, or t
  misc_difference 3222: note = a, c, g, or t
  misc_difference 3223: note = a, c, g, or t
  misc_difference 3224: note = a, c, g, or t
  misc_difference 3225: note = a, c, g, or t
  misc_difference 3226: note = a, c, g, or t
  misc_difference 3227: note = a, c, g, or t
  misc_difference 3228: note = a, c, g, or t
  misc_difference 3229: note = a, c, g, or t
  misc_difference 3230: note = a, c, g, or t
  misc_difference 3231: note = a, c, g, or t
  misc_difference 3232: note = a, c, g, or t
  misc_difference 3233: note = a, c, g, or t
  misc_difference 3234: note = a, c, g, or t
  misc_difference 3235: note = a, c, g, or t
  misc_difference 3236: note = a, c, g, or t
  misc_difference 3237: note = a, c, g, or t
  misc_difference 3238: note = a, c, g, or t
  misc_difference 3239: note = a, c, g, or t
  misc_difference 3240: note = a, c, g, or t
  misc_difference 3241: note = a, c, g, or t
  misc_difference 3242: note = a, c, g, or t
  misc_difference 3243: note = a, c, g, or t
  misc_difference 3244: note = a, c, g, or t
  misc_difference 3245: note = a, c, g, or t
  misc_difference 3246: note = a, c, g, or t
  misc_difference 3247: note = a, c, g, or t
  misc_difference 3248: note = a, c, g, or t
  misc_difference 3249: note = a, c, g, or t
  misc_difference 3250: note = a, c, g, or t
  misc_difference 3251: note = a, c, g, or t
  misc_difference 3252: note = a, c, g, or t
  misc_difference 3253: note = a, c, g, or t
atgaagaaaaggacaaaaaatgaaattaagcggtgtcttacgggtattgtgacagcatcgcttataatctcaagtgtgcatattggcacatttgcacttgcggcaaaaaaaacaagtattgcaaaaagtgcaaaagttacggtgggaaagaccgtaagggtaaaacttaaaaacaacaaaaagagtgttaaatggaaagtttcaaaaggaaaaaaatatgtaaagataactaaaaagagtaagacaggctgcaccgtaaaaggtttaaaaaagggttcggcaaaggtacaggcagttatcggaaagaaaaagtacagttgtaaaataaccgttgcggcaaagaaaacgacaaagaagccggcaacaacgaaaaaaccggtaacaacaaagaagcctgttgcaacggcaaaacctacggcgacaacaaagccgacagcttcctcagatgttacggtaaaaccgtccgtgactgaaacaccaaaggtgacaaacacaccgacagctacgagtgcacctacggttacggaaacaccgacagtggcacctgtagttacggctgcnnnnnnnnnngatgatgacgattgggacgagccaaaaccgacaccaaaaccgacacgcaaaccaggtgagattgagacattctattatgatggtgataatttaaatgattttaagaattataatgaaccatacaatgttgtcgttgaggacgatataaaaaagcttagttatggagcactcgaggattgcacaaatatggtaagtgtaacaattccaaaaagtgttgaaagcattggaaatagagtgcttgccggatgcactaatctgagtaagataacggtagatgccgataatccatactatgacagcagggataactgtaatgcgatagtagaaaccgaaagtaatactattgtggcaggatgcaagaacacggtatttaaagactctatgaattctgtttcaaaagatgcattctatggagcggatattgaaaaagtgatattgccagatagtattacaagtattggagactatgctttctttggatgtaataagttgacaaaaatttcaattcccggaaatactgaaataggatatagtacattttccggctgcaagaaactaaaagatgttgaacttaaagagggaacaggttttttaggggattatacatttgaaaattgtgagagtcttgaaaaaataaatattcctaaaggaaaaaaagctattggcgatggcgtttttggaggctgttcatcattaaaagaagttacgataggtgaagatgtagaaagtataggtgaagaagcctttttggagaccggattaacggagataaatattccggacacgctcactaaaattcaaagttacgcatttcagggttgtgcaagcttgacaaaaattaatttatcgtcaagtgtcaaatttgataaatatactacagacatattttccggatgtacaagcttggaagaagttacgattccgaccggaataacttatattgcacctggtatgtttagtggatgtgagaaactaaaaaatataatgatagaagcagaggaatatactataggtggatctgctttttccggttgtgtaagtttaaaagagtttaatttccctaaaggtaaattaggagcctatatattttcgggctgcacgggattagaaaagatagatttgacaggagttaccagcattggtgagggctgtttcagttattgttcaaatcttagtgaagtaacactttcaggtgatttaaaaaccataggtaaggaagccttctttaaatgtggaaagttagctgagattactattcctgagggagtagaaagtattaatattgctgcatttgaggagtgtacacttttaaaagaaataaatatacctgcgagtgttaagcagattggaacaggtgcatttatagaagactctcttgaaaaaataacagttgatgaaaataatgaatatttttattgtggtgatggtgtaaatgcaataataactaaacaaaagattagtagcagtgaagaaatggaaagacatgacgcaaatgaacttattgcaggttgtaaaaatactgtcattcctgatagtgttaaaaagatagctgattacgcattttatggaatggatgttgaaaagataaatattccgtcaggagttacaagaataggagatatggcatttgaggaatgtacggcattaaaagaaataaacatatctgatactgtttcaaaaataggtatcagaacatttgcaggctgtgatgctttagaaaagataacggttgatgcggcaaatgaatactattacagtgatggcagtaatgcgataataacaaagcaggaaataccatttgacagtctttatgattttgctaattatggtgaggctagtcagccgtatgaacttgtatatggatgcaagacaaccgttatacctgacagtgcaaagataataggatttatggcatttactgatttaaagacacttacaaagctcaatatcccagatgatgtaaaggtaaatgatgctgctttcaatgaatgtgacaatctgacaagtattacatggaaaggaacagaatataaatccgtaaaggagttttttaaagcatacaatcccagtatgtatgatgacgatgatgatgacgatgttgagtaggattgtaaaacaagcataaataagaagtaaatcaaacaacgataaaatcggcatttacagtagttaagtgccgatttttttgtcatatttctacaaaaaaatcagagaaaataatgcatattgcataagaaaacataaaatttattattatacaattatatgtattgcaataaaacctatacaatattttttgcaaaatgcacatattaaaaaattaaattgtctgatatgattaaaccagtttagaaagtaactttaaatattgcctttttaaaataaacaaaatataatgaaaggaagaataatgtatggggaaaattgatatagcaacaaaacaatatatgtcgcacaaaaacataatagcagatgcttttaatttttatgtgtatggcggagcacagataataaaacctgagaaacttcaaaagatagatacggcagagtttatgatgccgtatggaaatgatgctaaagctgnnnnnnnnnnnnnnnnnnnnnnnnnnnnnnnnnnnnnnnnnnnnnnnnnnnnnnnnnnnnnnnnnnnnnnnnnnnnnnnnnnnnnnnnnnnnnnnnnnnntgatgtgtgcagagcatgggaaaattcaatgaaaaatgcaaaagatgagggacagcgagaaggcaggattgccgggcagattgaagcgtatatagattgtaatatgacgataccagagattgcaaagaaagtgtcgaagccggaagaatatgtaagagaagttgtaaaaaagttatcagcagtatctcaatgaacagataatatataagggtgggcgtcacagattataatatgagataaaaattgaaaataattatacattgatatttttacacaaaaggtaagttgcatatagattataaaatgaataaaaactgaaagtaatagtacttaattttaataaaattcccgacagcacgaatataaaaagttcacactatcgggagtttttattttattattttgatgcagtcaagtggatatttgcaatccatactgatattttttagtagtgtttaataatagattatctcttattactctgtctccagatatgcatcttttctgcttctgagataagctgatccctgaaatcaggatgtgcaactgagataagagcctcagctctctgccaagaagaaagtcccttgaggtttacgatgccgtactcagttacaaagtaattgatgtttgcacgcgtatcagtaacgatagaaccatttgaaagagtaggtttgattcttgactgaacagtgccgtctttggttgtgaaagtagaagacatacagataaagctctttccaccgtttgagaggtaagcaccgagtacgaagtcaagctgtccgcctgcaccgcttatgtgttttgttccggcactctctgcatttatctgtccgaataaatcaatatctaccgcattgtttattgaaataaaattgtcaatagaagcgataactgacatatcgtttgtgtagtttacaggagcactcatgcactcaggattttcatttaagtagtcgtaaagtttctttgttcctgaaccgaaagcatatacctggcgacccttgtctcttgactttttaagacctgttatcttgccggcttttgcaatgtcaacaaatgcatcaacatacatttcagtatgtacaccgaggtctttaaggtctgactgtgcaataagtgaacctacggcatttggcataccaccgataccaagctgcaggcaggcaccgtcaggaatttcatctacgatatattttgcaacagcttcatcaacttcagttgtaggagccggagcacctgtctcaagaattgcaggattgtcaccctcgactatcatgtcaacattgctgatgtggatgccgttttcaaatccgccgagacagcgaggcatatttttattaacttcaacgataattatatctgcaacttcacagcaggcagccatatgtgatgcgtttggtccgaagttaaaatatccgtgtgcatccataggagcagcctggaacattgctacacgaggaggggtctgactgtttctgtaatatcccggaagttcagaatatttgataggagagtagaaacaaaagccttttgctactgcttttctctcgatgccgctgctatgccaagagttccatgtaaaatgagaagctgcatcttcaagtttgaagatttcaggctctttcataagaataccgccgcggatgttgatgtctgaaagttcaggcatacgctttgcaagtgccttgtcgagtgcatcaacagtgccggtgcaccatccataatcgatccagtcgccggatcttataactttgactgcttcatcagcagtagtaagtttctgcttgtaaatttcattaaaatccataatcttcctcttttctgtgccacaagattgtagttgtcctaattgcatcattaacatatgaaatgattgttatctgccattatagaaagtataggcagtaacagtagtccgcatcgtgacactgatgcgggcattatattatgcaggaatagaaataagatttgttccttacacaaattacagtataaattaaattgagaaaaattatactgtaatgtctaaaattttgccaacaatagaataacactaataaaaaaaattatcaacaaatgaattgagggacaggcagccagaattgtaagaaaatgtaattaggctgtagtataaagtgtaacagttcggtcattcattccttagtttcataaccctgccagcaagctgtcagtcgctgctacgcagcttatgtttatttcatttggaaaatgaaaggctattcagctataaaaaataaattaaaaataaagtaccttgaaaaaacttgcttaatttgtcgttttgttatatgattatcaatgatagaaccgattgtatgtgagagttacataatatgaaaattgagtgcatacttgattttctgctgtataggatatatgtgatagtaggtcggtttctaaataaagctgatattgcatcagtgaaaaacggacaaggaggaacttatttttatggcaaagaaagtagttttagcaggcgcttgtcgtactgcaatcggaaaaatgggtggaggattaagtactactccggcacctgtattaggttcaatcgttattaaggaagctcttaagagagcaaatgtacctgcagatcaggtagatcatgtatatatgggatgtgttatccaggcaggtttaggtcagaatgttgcacgtcaggcttcaatcaaagcaggacttcctgttgagacaccggctgttacagtaaatgtagtttgtggttcaggtcttaactgtgtaaatatggcagctcagatgattcaggcaggagatgctgacatcgttgttgcaggtggtatggaaaatatgtctatggcaccttatgctatgatgcagggtcgtttcggataccgcatgaacaacggaaaacttgttgatacaatggtaaacgatgccctttgggatgcattcaatcagtatcatatgatgattacggcagagaatgttgcagatcagtggggacttactcgtgaagaactcgatgagtttgcagcaaacagccagcagaaatgtgaaaaggctatcgcagcaggtgcattcgatgacgagatcgttccagttgagattaagacaagaaaaggtgttacagtattcgataaagatgagggaccacgtcctggaacaactgctgagagcctttcaaaacttaaatgctgttcaggaaaagaaggcggcgtagttacagcaggtaacgcatcaggaatcaatgatggtgctgctgcaatcgttgttatgagtgaggaaaaagctaaagaactcggtgttacaccaatggctacatttgttgccggagcacttggcggagttgatccttcaatcatgggtgttggacctgttgcatctacaaagaaagttcttgcaaagactggtcttacaattgatgactttgatgtatatgaagcaaacgaagctttcgctgcacagtcagtagcagttggaaaggatcttaactttgatctttctaaacttaatccaaacggtggtgctattgcacttggacatccggttggagcttcaggatgccgtatcctcgttacacttcttcatgagatgcagaagatggatgctaagagaggtcttgcaacactttgtatcggtggtggaatgggctgctcaacagttgttgagagagactaatccattcgcctgtacgggtgtcacggatgcctaaaaagcattaaaaataaatattgccggatatcctgaattttcgggatattcggattaatatgtatcttaaaaaggagaaaatatcatggattttattttatatgaagtaaaagatgcagttgcaactattactatcaatcgtccaaaggcattaaatgctttaaacagccaggttcttgatgaacttgatgcaacacttgatgccattgaccttaatacagttagagccgttatccttacgggagcaggcgacaagtctttcgttgccggtgctgacatcggagagatgagcacacttacaaaggctgagggcgaagcattcggtaaaaaaggaaatgatgtattccgcaaacttgagacattaccaattcctgttattgcagcagtaaacggttttgcactcggtggaggatgcgagatttctatgagctgtgatattcgtatctgctcagagaatgcaatgttcggacagcctgaggctggtcttggaattacacctggatttggtggaacacagagacttgccagaacagttggtgttggtatggctaaacagcttatctacacagcaagaaacatcaaggctgacgaagcttacagaataggtcttgtaaatgcaatatatcctgctgaggagcttatcccggcagcagagaaacttgcagctacaattgcgaagaatgcacctattgcagtccgcaattgtaagaaggctatcaacgatggtcttcaggttgatatggacaaggctatcgttatcgaagaaaaactctttggtgactgctttgagacagaagaccagaaagcaggaatgggaaacttccttgcacctaaggatcagaaagttaaggttgttccatttaagaactgctaatttaaagtattaaaaagaaacatgaatatgtaagaatatgtttgcgtttctgaaaaatgatttttaaccggctgcaaagtggtagtgtcatatagcagccggaatatctgacaaacagataaatataatattatggaggttatatcatgaaagtaggcgttattggtgctggtactatgggacagggcattgctaaggcatttgctcagacagaaggttttgaagtagctctttgcgatatcaagcaggagtgggctgaaggcggaaaagaaaaaatcgctaaaggctatgacagacttgttcagaaaggaaagaagactcaggaagaagttgatgctatcctttcaagaatcacaccgggcttaaaagagaacctttgttcagactgtgatcttatcgtagaagctgcatttgaagatatgcaggttaaaaagactacatttgctgagttagataagattgctaaaccagagtgcatttttgcatcaaacacatcaagcctttctatcacagagatcggcaacggacttacacgtccaatggttggtatgcatttcttcaatcctgctgaccgtatgaaacttatcgaagttatcgctggtgtaaatacacctgctgagactgttgactctatcaagaagattgcagagcagattggaaagactcctgttcaggtaaatgaagcagcaggattcgtagtaaaccgtatccttatcccaatgatcaacgaagcagcattcatcaagatggaaggtgtttctgacatcgccggaatcgatgcagctatgaaacttggtgcaaatcatccaatgggacctttagagttaggtgacttcatcggtcttgatatctgccttgctatcatggatgttctttacaatgagactggtgacagcaagtatcgtgcttgcccacttctccgtaagatggttcgtggtggaaatctcggtgttaagagtggaaaaggtttctatgtatataatgctgatcgtacaaagacagcagttgatgcacagtaattgattatataaattatgaaaggtggtaaagaaaggcatggattttacattaagtaaaaagcatgagatggcgagacagcttttcaaagatttcgctgaaaatgaagttaaacctgttgctcaggagactgatgagacagaacattttccaatggaaactgttaaaaaaatggcaaagagtggtttcatgggtattcctattccaaaggagtatggtggacagggttgtgatattttaacatatattatgtgtgtagaggagctcgcaaaagtttgtggtacaacaagcgttattgtttcagctcatacatcactttgtgcagatcctattcttacttatggtacagaagagcagaaaaagaaataccttccaaagcttgcaagtggagagtatatcggagcatttggtcttacagagccaggtgcaggtacagatgctcagggtgttcagactaaagctgtacttgacggagatgagtgggtacttaatggttctaagtgcttcatcacaaacggtgaggttgctgatgtttatatcattattgcttatacagacatcatcgaaggaaagaaaggcagaaagattaagaaattctcagcattcatcgtagaaaaaggaacaccgggattcacattcggaacaaaagagaagaagatgggtatccgtggttcttcaacatatgagcttattttccaggattgccgtatccctaaggatgcacttttaggacctcagggcaaaggtttccctatcgctatgcacactcttgatggtggacgtatcggtatcgcagctcaggcacttggtcttgcagaaggtgcacttgacagaacaatcgagtacacaaaagagagaaaacagtttggccgtactatcgcacagcagcagaatacacagttccagcttgctgatatggctacaaaggttgaagctgcaaagaatttagtttacagagcagcacttaagaaacaggaatttgctgacggtgcaaaggtatcttactcagtagaagctgctatggctaaactttgtgcagcagaagttgcaatggaagttacaacaaaagcagttcagttacatggtggttatggttacatcagagagtacgatgttgagcgtatgatgcgtgatgctaagattactgagatctatgaaggaacaagtgaagttcagagaatggttatctcaggtgcattacttaaataatatcgtaaataaaaacataaaccaaaaaataagacaaggagtgacaaagctgtgaaaatagtagtatgtgtaaaacaggttccagatactaaaggcggagttaaatttaacccggacggtactttggatagaggtgctatgcttgcaatcatgaaccctgacgacaaagcaggtttggaagcagcacttagaataaaagatgaatatggtgcagaggtaactgtacttacaatgggtcttccaaaagcagaggaagtacttcgtgaagcaatcgcaatgggtgcagacaagggtatccttgtaactgacagagttttaggtggtgctgatacttgggcaacatctacaacaattgccggagcacttagaaatattgattatgatcttatcatcacaggtcgtcaggctatcgacggtgatacagcacaggttggtcctcagatttctgagcaccttgacatccctgtaatctcttatgctaaagacattaagatcgagggagacagtgttgtagtagagcgtcagtatgatgacagatatcatgtattaaaagctaagatgccttgcttagttacagctctttcagaattaaatgagcctcgttatatgactccaggcggaatctttgatgcttacgatgctgagattacagtatggggcagaaaagaccttaaagatgttgatgattctaatatcggtcttgcaggatcacctacaaagatcgctaaagcttctgacaaagttagaaagggagcaggcgagaaggttactcctgaagatgcagatcaggcagtttcatacatcatggacaaattaaaagagaaacatgtaatctaaaatttataaggaagtggtgactaaaatgggtttagaagaatataagggtgtctatgtctttgcacagcaggtagacaacgaattaagcggaatcgcttttgaattgcttggaaaagcaaaagaacttgcaagtgaccttggtacagatgtaacagccgttcttatcggttctgatgttaaaggtcttacagatgaattagcagagtatggtgcagacaaggttatcgttgtagatgatcctgagttaaaagagtacagaacagagccatatgctcatgcattatcttcagtaatcaacgagtacaagcctgaaatcgtattagttggtgcaacagctatcggtcgtgatttaggacctcgtgtatcagctcgtgttcagacaggtcttacagcagactgtactgtacttgagattggtgatttcccaatcaatgcaattcctggacaggaagataaacagaagcacaatcagcttctcatgactcgtcctgcattcggtggtaacactatcgctactatcgcttgccctgacaatcgtccacagatggcaacagttcgtcctggtgttatgcagaaaatcgagcctgtaaagggtgcaaaagcagaagttatcgagtacaatcctggatttactccaaacaacaaatatgttgagatccttgacatcgttaaagatctttcagatacagttgatatcatggatgcaaaaatccttgtatcaggtggtcgtggagttggaagcaaagagaactttgcaatgcttcaggatctcgctgatgtaatcggcggaacagttagctgctcacgtgcagtagtagataacggatggatgccaaaagagttacaggttggacagacaggaaagacagttcgtcctaatgtttactttgcaatcggtatttcaggtgctatccagcacacagcaggtatggaagagtcagacatcatcgttgcaatcaacaaagatgagacagctcctatcttcgatgtagctgattatggtatcgtaggcgacctcaacaagatcgtaccaaagcttacagaagctttaaaagaggttgtaaaatagaccgagcttgttaaagcgagggatgcttcttgactttcaatcaagaagagacaatttataattatattttggtagttctttaattcatatataaaggcggcatatccggttttgggtatgccgcctttttaattgttgcatgatttttatatttgaaaacttattttttattccatatccgttaggtataatgatatttgttgtaataatgtcaaaaactcaatagaatttgtttataataaatttaaaaaattctattgagattttttatctattatagtataatatgttaggtttgtgcggaaaaaatatggaaaatgataacaaattcagtatatctgcattagcttagtttttacagtgaaaatgttgtggctgagatttttagaaattaataatatacaggggagttatgtatattatgtttgtcagactgcaacttaaaataaataggttactattggtattatacaaatataataggaggattgccatgcgtggaattgacacacagacaaagaaaatcagggaacaggtatttgaggaagtagcacgtgctgcttatagtacaggagatgtaagccacgagttagaggaaataccatacaagataacaccatcagatgttccgctttaccgtgagagcatttggagagaaagagctattgcatcagaaagagttcgtcttgcaatgggactttcactcagaccattagacagaccggtacatataacagagggatttgcagagagtaatatttctgaaaaatattatgagccgcctcttatgcaggttattccatcggcttgtgatatgtgtgaggacaacaagattgaagtcagcaatatgtgtcacggttgtgtagcacatccatgtatggaagtctgtccaaaagaagctatctcaatggttgacggacacgcatttgtagatcaggacaaatgtatcaaatgtggcaaatgtatagctatatgcccataccatgcgattatcaagaaaatcagaccttgtgccgaagcttgtggaattaatgctatcgagagtgatgagcatggtcgtgcaaagataaatgatgagaagtgtgtatcatgtggtcagtgtatggcgagctgtccgtttggagctattgctgataaatcacagatattccagatgatcagagctatccagcacggtgatgaagttatcgcagagattgccccggcatttgagggtcagtttggagctgatgttacacctgcacaggttatagctgcattaaaagaatgtggatttaaggatgttcatgaggttgctctcggagcagatatcggtgcagtatcagaagcacatcattatgtaaaggaagtagtaaatggagatcttccgtttcttcttacatcatgctgtcctgcatggtcaatgcttgctaagaagtatttccctgatattatcgacagtgtatctcaggagcttactcctatggttgcaactgcgagaagtatcaagaagaaatatccaaactcaaaggtagtatttataggaccttgtgcagctaagaagcttgaggcatcaagaagaactgtgcgaagtgatgttgattttgttattacatttgaagaattaaatgcaatatttaaagcaaagaatattgattttagcaaatatgataagggtcgttcaatgcatgaagcaacaggagcagggcgtggatatgctgttgcaggtggagttatcagtgcaattgagcagtgtatcgaagaatactatcctggaacagaagtccagacggagcattgtgagggtcttgcagactgtaagaagatgcttcttcttgcaaaagccggaaagaaagacggctgcatgatcgagggaatgggctgcccaggcggatgtgtagcaggtgttggaactattcttccaatcaacaaggctaaacttgccgttgctaagactgttaaagagtctacaactaaacttccggcaaaagatttgcttgaaattgaattaccttaa

SEQ ID NO: 994 - DNA, 21998 bp, unidentified
  source 1..21998: mol_type = unassigned DNA
ctttcctcctaccttcgtttcgctgaccagaacgttcgagccgttcttgtcctgcaggatatccaaggggtctatgcccagctcacggctgatcagctccagcacgcgcgggccgcagaagccgccctggcagcggcccatgcctgcaccggcgcggcgtttcacgccgtcgatggtgttggcgggcacctcgctgtggagggctgccaaaatctcgccctcggtaatggtctcgcagcggcagatgacccggccataggcgggctgttccctgaccagtgccgccttttcctctgcggaaagctccttgaagcggatatggcggcggccgtccttgtaatcggccttttctgcgcccagaacaccgcgctctttcaggatagcaactgcctcctcagcaaccgccggggcagcggacaggccggggctcttcatgccggcaaggtcgatccagccgggtgcttccggctcttcgccaatgataaagtcgtccacgtccagattggcgcgcacgcccgcaaagctgcggatggattcgccgaagttgatgctgggcacgctgcgctgggcagtggtcttgacaaattccagaccgctgctggtgcaggaggtgtcgttgccttccaccggctctgcgttggggccgacgagcaggttgccgtgcacggtaggtgctaccagcacgcccttgcccagcgcgttggggcactggaagataacgtggctcacgcgggtgccctcgctcttgtccagcaggtagtactcgccccgggtggggatgatgcggaagttggcgggctctaccatggagtgcaccttgtccgcccagataccggcggcattgatgacgcagcgagtctctaccgtgccgccgggcacggtcaggcggtaaccgccctcgatggctttggcatcggtcaccttgcagctgcggcgcagctccacgccgttgcgcactgccacctcggtcatagccagtgcgtactcccacgggttcacgatggcggcgctgggtgcccacagtgcgccgcagaccttctcagagaggctcggctccatggcaagagtctcttcccgggaaaggatcttcatgccgggcacgccgttggcggtgccgttttcgaacagatgctgcaggtggggcagttccttttcgtccagtgccagcaccagcgagccgcactgcttataggaaacatccagctttgcgcagatctcctttgccagtgccacgccgcgcacattcagccgtgccatgcgggtgccgggggcggggtcgtagcctgcgtggagaatggcgctgttggccttggtggtgcagtctgccacatcgttttcggcctcaaggatgaccaccctgttgtcgtagcgcgacagcgcataggcggcagcagcaccgatgacgccgcagccgatgatcgcgatatcatacattgttcttttcctcctgtccgttctgccttggcctgcgggagccgggcatctgttggttgcacaaaaaaagagcgaaccgaaacaaaggcaactgcccttgtccgtttcgctcatatctcttgaaacaaacagcacttgtttgcttttatgataccctgtccctgcacaaaaagcaaggtgttttgcactttttgtgaaacccttacaaaaaacacccgccgcttttgcgcagaatgcggatcacatatcccacaccgcctgattggtggtggaaatagcggtggcaccggcttccagagccgccatcacatcctccttgtccgcgatcagcccgccggtcagcaccggcaccttggccttggcgcagacgcggcgcaggatcttgggcatagcgccgggcagcagatccagacagtccggcaggtttgcggggatcttgtccagactttccagcgcgatggaatccagcaggaatacccgcaggatggcagccagccccagctccttggcgcggcggatgaaggactgccgggtggagatgatgccgtccgcttcggtggtattgcggatgaagtccaccgctacctccttgcccgccagcccggcaataagatctatgtgcaccacggcaaagcgccctgtttcgtggatgcggcgcacgatggaggagatattgcagatatctccatataatacaaagaccacccggatattctcgttggtcagcgcgctgcaaagtccggcatcgtccttgacggcagcaatgaccggcatttcctgaatggcgtccatcagctcctgtttcatgcttttcctcctgcacacgaaaacgtcttttacagttaaagatattatgaatgctttgacagataaaatcaatgattttcagcaaaaattccggtgaaattgcggcagcctccgcaggcagcgccatcatcaaggatatcaacgccatgcagggctttggcaacatggatgtgctgtgcatggaaaggtaaactgaagggctgctgcaccgcgatgtgcagcagcccttttgtgcagcggacgcatattgaccagcagagctggacgggcagaccctgctggtgcccggctttgccccggatgcccttgcactgctgtgccgttttttgcaggagcggctgaagttctgaaaaaaagaagccgctgcacaaaacgctgtgcagcggcttctctcagaaacgcattttacgcggccagagccttttcaatgttggacagaatggtgtcgtgatcctcagcgcagaccagaactacctcaccggtgggcgctacggtgacggtggcagcctttgcaacaaggtactgatcctccagataatgctccatggactgctgttcgctggcaacataggcttccagtgcagcctttactgcatcggtcttaccctcggcgggctttacgatggcaacagcatagctgcgcaccatcatgctggaaatgctggcggcaaaggcggtgtactggtcgtcctccagattcagcagcggcatcaggatatcccggatctcttcgtccagctggtcggccttgtactcggagctgtaaccgtcaatggcggtaaacttgccgtcctcgcccttggtaaagatcatatcgtactcgttgtcctcgtcgctgcgggcatcgtggatgatctgggagtagtccttgggggtggagctgtcggccttgctgccgccggagcagcccaccaaggtaaacagggtcagccctgccagcagggcggcgatgaatcttttcatagtattaaagttcctttcatagtgctgtgtgtggaaggtgcagccggggcgcacacgctacaggtagtgtgtgccggttttgggctgctattctggatacgaatcactgcacagcagaattgcagggaaaaagtaacagttttatgaacagtgcccgcttacagcatcaaagcgtccagatcgccgtggttcaccggggtggacaggatgatctgggtgctggtagtgcccagcttctggaactgcagaatcagatgttccagctgtgccatgctgccgcagctgaccttgaccagaaaggtatacgcgccggtaacgtggtagcactgcagcacctcgcggctgttctgcagcagctccagaaaggcatcctgcttggagggagccaccgaaaggctgatgagcgcatccacatacatccggtctgccggacggttcagcgtgacggtatagccgctgatgatgccgtctgtctccagcttgtggatacggctggaaactgccgggctggtaagggatacctgctctgcgatttctttgacgggcatccgcgcatttttggccagaagcgtgaggatcttgcgatcgagatcgtccatataaaagtctccttaaaaaatatgttggattgtataaaattttctgaaagtaaagtttttatgttgtgcaaacccacggaaatggaataaaatttcgtttctgaaattctatgttaattatataaagtttttgcgaaaaagtaaagtattattttaaagcaaaatccaaaaatattgtttgacaagaaaagaaaaacgggtataatacatcatgcaaggcagcgcactgcacaaaagcctgccgctgatattgagattcaccactttatatactttcccacccctctatacacaaaaacccgctgccaggcgggtttttgtgttttatgcgtttttgggaaactatacagcatgaccccgcgttttcacgcggggtcatgcttttatgcagaagggttttacagaaaacgaaggaaaaattattctgcgtacagagagatgatgttcagcacgatctcagtgcagcggtccatccgctccacggtggtgcactcgcacacgccgtggaagttgaagccgccggtgcccagattggggcagggcagaccattccagctcagggtagcgccatcggtgccgccgcgcacgggcacctccaccggctccagaccggccatgcgcacagccttgcgggcggtctcaatgaggtggaagtggggcttgatcttttccagcatattgcggtagctgtctttgatctccacttctacggtgcctgcgccgtacttgccgttcaggtaatcggcaatgtcctgcatattgtccttcttgaactgcagtttggcggcatcatggtcgcgcaggatgtagcccagctttgcggtggtgacgtcgccgtacatctggcacaggtggtagaagccctgacgcccatcggtggtctcgggacgcgccatcacgggcagagcgccgtggaactccatggcaacgttggaggcattgatcatggtgtccttagcggagccggggtgcaccgagaagccgtggatggtcacggtggcggcagcggcgttgaagttctcgtactcgatgtcaccggcatcgccgccgtccaccgtgtaggcaaagtctgcaccaaaaccggggatatcgaacagatcggcaccctcgccgatctcctcgtccggggtaaagccgatgcacagcttgccgtggggacggccctcgcggataacggtctccacggcggtcatgatctcagccacaccggctttatcatctgcacccagcagggtggtgccgtcggtggtgatcagggtctcgcccttcatggaggcaaggaaggggaaggcagagaccttcatcaccttgccggtggcgggcagcaccacatccccgccgtcatagttctcgtgcaggatggggttcacgttctcgccgccggcatccggggcggtgtccatgtgggcgatcagacccagcgcgggcttttcctcgcagccgggggtggcgggcagggagccgtagacgtagcagtgttcgtccacccgggcatcctccacgcccagagccttcagttcctccaccagcttgtgagccagatcaaactcccgcgcagcggaaggatgggtgccggactccgggtccgaggtggtgtagaccctgacgtaatcaagcagtcgttcataggcgcgcataataaagcacactcctttagcaatattgaaggatcacagcccgtgatccagcttctatcataccccgtttttcctgttttgacaaccttttttgcccacttgggacagaaagcacgggcgcaataacaaaattcaacgtaaaaagttgtccgtcagtcataaacgtgctacaataaagacacccttataaagaagcgggcgcaccgcacagcagaaagatcaggaggagattttatggcagtcaaagtgtttttctacaccctgcgcccctacgatgagcagggcatcgtagaggaactggcaaagcagtatggcatcgagtacggttatactgaggtgtatcccaccatggagaacgcccagctggccgcaggctgcgatgcggtatcggtgactccctgcgatatgagcgcacccatgctgcagcgcttccacgatcttggggtgaaagccatctgctgccgctccatcggctacgaccatatagatctggaaaaggcacgggagctgggcatgaagatatccaatgcggattatcctcccgagggcgtggcgaactttgccattatgctcatgctgatgagtctgcgcaaggcggggcacatcctcaagcggggcgaagtgcaggactactccctgaagggcaagctcggacgggatatctcccactgcactgtgggcgtcattggcacgggacgcatcgggcagactgtgctgaagcacctgtccggctttggctgccgtctgctggcctacgacttgtaccagagtgaagaggtaaagaagatcgcggagtatgtgccgctggacaccctgtttgccgagagtgatgtcatcaccctgcacaccaatgccaccgaggaaaaccatcacctgctcaacgccgaagcctttgccaagatgaagcccggcgtgaccatcgtgaataccgcccgcggcaagctgatcgacagcgatgccctgctgaaggcgctggaaagcgggcaggtgggtgctgccagtctggatgtgctggaaaacgagaacggtctgtactattacgaccgcatgggggatgtgatcccgaacccggaactggctgcgctgcgcgcgatgcccaacgtgctcctgaccgaccacacagccttctacacctacgaggctgtaaagagcatggtgctcagtgtgctggaaagcgctgccgcctttgccgagggcttgcccacccggcatgatgtgactgaccgctgagaaatggtgaaatgcaaaaatcggacagaccgcggtctgtccgatttttgtgctatttatccatagtatcccaacgcaaattggtgctcagcccagacagacgcccatgcggcgtgccacgctcagcagctcgcagttttcaggcacattgcgggtcttgccggcaatgtctgccagacggttctcggtcacccggcggttcaccatggccacggtcacgccgtagcgctccacctccaccagctgtgcggcatagctgccgaactgggtggcaagcacacggtcgtaggcgctggggctgccgccgcgctgcatatgacccgggatgcacacgcgggtctccatgccggtctttttctgtaccgcctgcgcaatgcggttggtggcggtggtgccaagccctgcctcagcacgcttggccatccagtccttgcgcttcatgcgggcttcctcggtgttgatggcaccctcggccacggcgaggatggagaagttcgagcccttcttcgcacggcgctccacggcctcgcacacgcggtcgatatcgtagggcagctcaggcagcaggatgatgtccgcgccgccggcaatgccggaatacaaggtaagccagccggccttgttgcccatgatctcgatgcacatcacgcggctgtggctgccggcggtggtgtggatgcggtcgatgacgtcagtggcgatgtctacagcggtatggaaaccgaatgtcacatcggtgccgtagatatcgttgtcaatggtcttgggcaggccgatgatgttcagcccctcctgtgaaagcaggttggcggtcttatgggtgccgttgccgcccagacacagcaggcagtccagcttggcagccttgtaggtctttttcatggcggcgaccttatcaatgttgtcgtcctccaccacacgcatcatcttaaagggggtgcgcttggtgcccagaatggtgccgcctaaggtcaggatgccgcggaagtcgtcctcggtcatctcgcggtaatcgccgttgatcaggccgctgtagccgttggcgatgcctacgatctccacgttatcccccatgcgggcgtacagtgcttttgcaacgccgcggatggtggcgttcaggcccggacaatcgccgccggaggtcaggataccaacacgttttttcattcaaaagccctctttccttatcattcaggcaaagccgaaccgcccggcaaaggatgccggagcgcccggagtcctacctttttatagtattagagtattccgaaaggggagtgctgtcaagagaaaagccaaaaatttacaagcctatgtacaccgggcggccgctgcgaaaacttttgcagaaaaactgaaaaaacggttgacaagcagcccgccggcgtgtataatatcccttgtcagcaacgcacggcgcggctgacacaaccgaatattggggatttgcatagtggtagtgcggtagactctgactctacttgtgggagttcgattctctcatccccaaccagaaaaccgcagtcgccttccggctgcggtattttcggggcatagcgcagttggtagcgcgcctcgttcgggacgaggaggccgtgggttcaaatcccgctgctccgaccaaaaatgcacgttgattcgctaagaattttcgtgcttttttctttattcggcagaatgacgagctggttttgaaaaagtgccaaaaattatttcaggcgcaaacaggaaatctgttggaggctgactctgacagacttttttgtaaagctgaacgaggaaaatgtcgaggacagttccaccgggtggtgggactgtctttttttttgcgtggctgctggcaagcagaagttgacgctggattgacaacctattcgagcatgggggatcggctgggacgtttctccttaaaataagcgtgttgttgaaaagaaacgcttcatgcaatgtttttatctgagaaaacccgctctgtttatattgatttccctctgcatccatgataaaataacaggagaattcgtacaattatgtcgaaaatgattgcaatggaagatacccttacggagatctgaatactccttgtgtcagctgtatggcagatggttataaacggagccgatgattggcttgacaaaaagtgcccggaagaagtcaggcaaaaacagtaattgcatcataacttcagaacgagcgaaaaagttggaaaagataggaattatgtgggatactatggagcaaaagaagggcaatcggccatgaagaaggttttgctgatcgcaacaacacggcttaccatggacggtttgacagagatcctgctccgggtagcccgcatagcggcacgggaatatttggtgggctttgcactgggtgaaggctgcagtgcggatatccagccgcagctggaagcgatcggcagcgtatatcagctgccttcccgtaaaaaaaagctgccctgctatatggccgcactggcagcattggtcaagaaaaaaggctatgaagttgtgcacatccacggcaacagtgccacgatggcatttgacttgctggctgtatgggctggcggcgcgacagtgcgcattacgcattgtcataactgcgcgcaccagcctgcccttaagcaagcgacccttggcagactgctgaaccgtttggttacggatccggtggcgtgttcgcgtgcggcgggagagatgctatatacccggccattccgggtacttgtcaatggaatagactgcgagcgtttttccttttccccgtccgtacgagaacaaatgcgggcgaaattggggctgcaggactgctttgtggttggccacattggccgtttcagccagcaaaaaaatcatacccggcttttccgcatcttcaaaacagtcttgcagcaaaagccacaggcaaggcttctgctttgcggccaaggagagaatttcgaacaatctcagcaggaagccaaggcgcttggcattgcggagatggtgctgttttgcggtaatgtgaataggccggaagattatctgcaggcgatggatgtatttgtgatgaccagcctgtttgagggattgcccattgtgggtgtagaagcgcaggccagcggtctgccctgcatttttgctgacacgatcacgcaggaagtgaagatcctgccgcagactcagttcctcgcacttacacagcccgatgaagcatgggcagagcgtattgtccagacaaagccgatgaaacgcagccttgcgggacattgcgtagagagtgctggatttgcagaagaaaatctggacaggcaggtctgtgcgctgtatggaatggaggaacatcattttgcgaatatcagtggtcgtgaccacctataacggaaaaatgcatctggaaaagcagcttctgtcgttgttgcagcaggagcgtgcaccagatgaggtgctgatctttgatgatggctccacggatggcacaattgagctggtacagagcttcatccgcaagaattgtctggagagctggcagttttatgtcaatgccaagcgcaaaggctggaagcaaaactttatggagggtctgcgaaaagccgcaggggacattcttttcccttgcgaccaggatgatatctggtacccgaggaagcttgcagaaatgaccgcagtgatggaacagcacccggaaatcaaactccttgcctgcgattaccgtgtgctctacgagcctggagccctaaaagcaacggtttacaagaaaacacctgcagaaacgcagggcctgattacaagatatggatttaccaaacatttctttatgaacccttatccgggctgtacttatgcggtgcggcgcgacttttttgatgcggtcaaagagctgtggtttgatggctcgccccacgacgaatttctatggcttatggccgcagtgcaggacggcgcatggttttacaaccgtgtgctgatggattatgtgcggtattctgataatgcatccggggtgcgctacaaagatgttgccctgcaaaaagaaaacctgcgctatatccacaaacagctttgtgccctgcaatcttttgcggcagagcactcggatgctgtgccggtagaacgctgcaaaatgcttgctgcggcgcagatctggtgtgcaaagcggcagaagctcatggaaacacgcagtccgctccgctggctggcactggcgccgtggtgggggtactacaattcaccaagaaactgcctgagtgatttgtggctggtggtgtttgggagttttcaacgatagaaatgaaataggaactgatttacttatcagaggaattgagctatgctaaataaaatattatcggtaatagttcctgtttatggaacagaaagatatattacaaagtgccttgattcagcacttcttgcaaccaatggcttagatgctgagattataatcgtcaatgatgggacgaaggatgccgcagggaagatagcacagaaatatgcattagaatattcgagaaagattcgttatttcgagaaaaaaaatggtggtctagcagacacaaaaaattacggtctgagtcgagcagaaggcatatttgtgacatttcttgatagtgatgactatgttgatgtggaaatttatcgagatatgttgtgggcagcagaacaggagaatgccgattgtgtagtatgtgatatgattcgagaaaatgaggacaaaagttgggtcatgtatgaccattgtgcagcgctgtctcgcgatgatatgtatcagaaatttatcgatacttctctcatggcaagctcttgtaataaaattatgagaagaacattgttagaaggattacaatttccagtaggaatgaacaatgaggacattacggttacaccgattgcaatggggcgtagtgcacgaattgcgtatgttcccaaaggtatgtaccattatgtacaacgtgaaaattcaattcagaacgtaaagttttcggagaaacggtttgttgtggttgatgcagttagactagcattggaacgagcagctgatatgccgcagtcgcgccaagaacagcttaaaggctcgttgtacgtattccaaatccttgcagttgcattatatttaatccgtaaggaagctttttttgaccgatattatctgataaaggcatatattagacgagtaaatgaaatactcccggatttttttcagaataaagaagtatgggagtatacagcatggggaaaccgaaaaaataatctatttcggaagatcagtgttttcttactagagaaaaaaatgtttttggtttgtagtgtattttggcaggtagtaaattttctgaaaacagaataaagaaaggcatgaaattattatgagctggctaaaggatgtaagaagcattatacaagatttggttacagataagaagatgctttggagattatcaaaaaatgatttcaaagcaaggtttgctagctcgatgctgggaatcgtgtgggcatatgttcagccattggcgacgattctggtattctggtttgtttttcaggtaggccttcgttcaccggacgttggttcacttccgtttattgtgtggtatactccagcttttttggtatggacattctttcaggataccctgagtagtatgacaaatagtatccgagattatagctaccttgttcgaaaggttaattttcatacatgtctgattccatttgttaagcttatatcgggctgctttgttcatgttgtgttcattgtttttatttttgtaattaatataatctacggcgttccgctttcagtatacaatgttcaggttctttactattttttgtgcacaatagtattattgattgggcttggaatgctctgtgcaacgattacgccatttgtgggagatgtgcctaatattgtttccgtagtattacagattatgttttgggcaacaccaatcgtttggaacgagaatattctttcacccggagtagctagtgtaatgcgctggaatcctatgtactatatttgcactggatatcgcgcaagtttccaaaaccagatgcttttttggaaaagacctgaaacaatttggttttgggttggcgttctatgtttggttgtgtttagtatgcatttgttccaaaaactaaatcgagattttgtggacgttctctgagtctttctaagtttcatgataaattaacgaaaatgtaggagaaaaactgctatgagtgatgctagcaatactactgttgtaattaagacagaaaatctaggaaaatcctatagattatatggtgataatgctagtcgattgaaggaagctattgacccttttcgccgtaagagacatactgtccatcatgcactgagtggtattaatctggaaattcataaaggagaaactgttggcattattggcgtaaacggtagtggaaagagcactttactcaaaattctgacaggagtagttacaccatcagaaggaacgttgaaggtagaaggaaaactttcggctctgttggagcttggagcaggttttaatccagagtattctgggttggaaaacatctatcttaatggcacgatgatgggattctctacagaagagatgaaaactcgtgtaccagaaattgttgcttttgctgatatcggagatttcattaaccaaccagtcaaaacctattctagcggtatgtttgcgcgtttggcgtttagtgttgcaatcagtgtcaatcctgatattttggttgtggatgaagcactaagcgtgggtgacatattctttcaaacaaaatgttttaagaaattcgaagagtttcgacaggcgggcaaaacgattttatttgttagtcacgacttgagcagtatcaatagatactgtagtcgtgccatattattaaacaagggaaaaatgattggggatggtacgccaaaggaaattattgacttgtataaaaaggtgattagtcaccaaatggtggcagatgccaaacggcgttcgagaaagcagccggaaaaggatacgcagaaaaaaacagtgtggaaaaagtcacttatttgtaacccggacttgaatgagtatggaaacagaaaggcagaaattgtagactttgctattttggatcgggatgagcgcattacaaatacggttgcaaagggagaaatatgtactatcaaattacgagtagtattccatgagccactgaaagacccaattgttgcaattactattaaaaaccaacaagggcttgatatcgctggaacaaatacagatttggagaattgtgaatttggaccggtggatgctggtgattgctatatcgtaaccttcaaacagcgtcttaccattcagggtggcgaatatctattgagtttcggatgtactgaatataaaaatgactatttagaggtctgccacagactttatgatgtaacgaatttagttgtaatttccaatgtgcgaaaaatagggttctacgatatggaagcagagtgcatagtggaaaaggatgaagatatcgattaataaacaaaagttgggagatatgtatggcagagtttgatttaacatattatagtggtacggacgaatattcggatggagatgaaagtgaaaattatttgcttgccatgaacaaggctggcaaaacgttagacgacattccaactaaggaatgcacatggcccgttttttaccatatgtctccgatgcgagagaatatttgcaattggtatccatttagaaaagatgcaacagtactggaaatcggagcgggttgcggcgcgattacaggaattttatgccaaaaagcggcacacgttacgtctattgagttatctcatcgtcgtgctatgataaactacgagcgcaacaaaaaatattccaatttaaccctaatggttggaaacataaacgatattccgatggagcaaaaatttgattatgtaacactgataggagtattggaatacgctgggcgatttaccaaggaggaaaagccgtttcaagcttttttggaatctgtaaagcaatatctgaagccggacggtatccttttaatcgcaattgaaaatcgtttggggctcaaatatttctgtggtgcagctgaagaccacacaaaccaaatatatgagggaattaataactatcctcactacagcggcgtaagaacattttccaaagaagaaatgaacaggctcctagatgtttgtggtctttgtcatcgtcagtactactatccttatcctgactacaaacttcctgaggaaatcttcacacaaaattctttacagcacaataagattccgtatattacctacgaccaggatcgattctcacttttttgtgaagcagatatgttcaatcagctcaccaaagagcatattgtggaccgattttttaactccttttttatagaagcttctatgcaggaaattcggcacgaaagccagccagaatattgtaagctaaatcagaaccgaaaacctgagtttcgcacaggcacctatatttgtaaaataaatcaaagaaaggtagtcaaaaagactgctcttcatccagctgcacaggcgcatctccaaaaaacaattgcagctagtcgactctcctatgggaaaattcctgcagtgcaaatgatagagactcctgaaggagccatgtatccctataatgatgcacaatctttggaagaaattgcagaggatttatttaagaatgatttcaacaaggtaattgatttactgagacaatatacgaagcaactgagatacgatgaagcactgacgacgtacgacacaccagcatttacacagtggtttggcacagtaagactgaaacaggaaaaggttttgtgcatatgtaatgcaaatgtcgactcggtgttgtcaaatgtattgaatacagaagatggcttccttatgattgattgcgagtgggtgacagattttccagttccagttgatttcctatactggaggattgtgtattctctttttgtacgtataccagaactgcgccagcagatatctatggaaaaatgccttcagctattggatgtgaattgtgaagagataccagtgtttgaggcttgggaggaacatttccaaaaggtatatgtggtttcagaaagtcgaggccaagctaagaaaaaccagcttcttgtgctggaatatggaaaagagcaacggttgaatagcgaaattgctcgtctaaatcaaagcttggatacgttgggactacagaacgagattcaatcccatcagattagggcgctgcaacagcaagttgctgcacaggaaaaagaagttctgcggcttaaggagcgtgtgaattatctcgttaattgcgtgtacgctggtgcacaagtagtggaaagaatttctacgtacaaagtgtttaaactggttcatctggaaaagagaatcaggcatcaacttttttctttgcgacacgaagaacgatgggcattttggcggtggttatggggaaatcttcggggaaaagtatgcactgatcatggttacaacccattgtttgaagtagtggatgcattgtatggactaggtgataatcaaggggaagtaatccagatcgcagaggactcgttctgggggaggtctaaacagattgatatcatgactcctgggcatacgctgtatttagcaaagcagctggcaaataatctgcggcgtataggttttaagtgtgaaattcacgatgaacaattctgcaattttgaagatattccctatattgtaatttgtgcacagattatgaaacgactgccgcagcgttacatttgctatcaaatggagcaaacaatcaacagcagatggctgactgagcagtatttcacgattatgagaaatgcatatgcggtttgggattactcgttggtcaatatttcctattttagtcagtatccagagttgaaaaagaaactctattatgtgccgcttggtataacagaagaaagtgtgatttattctctgccagaagcacagcaggattatgatattttgttttatggtgatgccaactgcgaccgtcgtaggaaatttttgcaggagctacaaaaagaattttcggtacgggttgagtcgaatctatttggtgaagcaatgcaggatgcaatccgtaaatcgaagattgtaatcaatatccactattatgaggatgcactgttggaaaccacacgcgttgcagaaattctttcactagggggcagtattgttatttcggagcgaagcaatgatcctgacgaggataatcgtatgagtcctttagtggattttgtagaaattggaaatatagaagcaatgaaagcgcgcattcgttggtggctggaacacccggatgagcgtagcaaaaagctgaaggaaaaccgaaaaatactgctactgcaactaggcgatgcaaatttctatttctatcgctttatgcttgctaataaacagatgggatttgatgaattttacaatttaacccagcagtttattcaggtgccacagaatgcgagatggtgtctgcatctgccagaacaagtggagcgtaaggatgagtttgcaaaggaaaataaatttcagtttgctatattcccaggattgagatatcctattggctgggtaggctgtgcattgagttataaatatatgttcaaaaagctgcaagataaaggcgtggactacgcaattatttgcgaggacgatgtgctattcccgcaggaatttgcacaacgtttttccaacattgaggagtatctttctgctctgaaaaaatgggatgtaatgtccggctttatggcagatatcagcgataatgtggtcgtgtctcaaatggactgtgtgaatggtgatacgatgttgactatcaacaaaatgatgagtatggtgttcaacatttataaccagcgtgcaattcaaattggtgcacagtgggatgaaacaaaccacaatacttcaaataccatcgaccgatattttgaatcatttgaccttaaggttatactggattttccatatctggttggacacaaggaaaatctgcggtctatactttgggataagaataatgcagagttatacgatgaacttacaaccaacacgatcaacaaaattaaacatttgatagagcaacaaaaacaagatgctttaaaagcttaaattaatgtttgccgcgtattaaactatggcaattcaactttttaatgcaacggcgttgaattgtatactgcatatttgctgttttcgtggtacgctgatttcttgccttgcggtaaaaatataataaaaatcgtacgatctttattctcaagcagcaggacttgaacagggcagaccgctgtctgcaaaaaaagtggctcagaaacaccgacaggtgtttctgagccactaatattatatcgtttccagcagtgcgggcagctgggcaaggtcgtcgatgacatagggactggccttttccagccgggcgcgggactggtgtccgccggtgtacagcacacagaccgcaccgatagctgcagccaccgcagcgtcgtggtcggtgtcgccgaccatcacgcaggccgcaggatcaatgccggtgcggcgcagatagtcggtgccaagctgcactttgcttacgccgtaaatgtccgcaaggccgagcaactcggtaaaaaagccttgcagaccccgggcggatacctgctcgatcaggtaatcacggcgggaggcagaaagtacagcctgctgccagcccatgcgggccagcgtttgcagggtgtcaacggcgtgtgccgttacagcgcagccgggcacaccggcgttgtagtgctccataaagcgggcggcaagctccgggtagggatgccgcgcaaagtcgaacccggcgcagcggtagtagtcctcgatgggaaagccgaacagctcccggtaggcagccagatcgtaccgctgggggtagccgtgggtctccagcatccagttcaggcagctgtgggtaaaatccacatcgtccatcagggtaccgttccagtcccagaagatcataccgttcggctgcatggaaacctccttgtgttattccgttgcaaataccttgcgcagtgcggcgttgctctcgatcagctttaccagcacgacgcccagcacggtacagctgatcagctcaccaatgcccaccgagatgccgttggtgatgcaggccagccagatgggggcgctggacgtggggtccgggaacatcacggcgatctcgatgccgatgatcaccgcgttgaacagcaccgggggcaggctggcggcaatggccagacccttgaagcgcacattgcgcagcttgtaggtgaccagacaggccagcagggtggccagcgtgccaaagatcacatccacgatggtagagcccagcaggtttgcaaggaagcagcccagcacaacacctacgatgtactcggcaccgaacacgggcagcaggcacagagcctcggccacgcgtacctgcacagcaccataggagaggggctgcaatgccagacacagcactacatagatagctgccactacaccgcagtgcaccagcttacggacggaagaattctgattcatgataatactccagcggtttgattttgaccgcacaggaaccgccagctcctgtgggttttgcccggcactgctcgagtgatgccggggagcctaaaatcctaagttgctctttgaggatactgcacaaaaaagcacagcagaaggaagtatatcacaaaatcggacagattgcaatgggaagaggacgattaaaacttgcccgccgcgctgctctgggcgtattcatgtaaaaatggaataccggagcgtccgcagacgctccggtattccgaaatttcaaataatgattccgctgaaatagccagagcgaagcggaggctattaaaatcgtgtgttaccctctggggtggccggtatatgtcagcgctatggtatcggggccggtgttggcagagaccacaccgcccagctcaaatacggccagcggcggcttgccaaaggctttgcggcaggctttttccagatcctctgcctgcgggatgttggtgtggccgatcatatactcaaaatcctccacatccccagcgcgcttctggcacagatccaccatggcgggcacgactttttcgtcgccgcgcaccttggcttccaccttggtcttgccatcgatcagggtaatgatgggacggatgcccatcagctcgcccatgacggctgcggcggcagagatgcggccgctctttttcatctgcctcaggctgtaaggccccagcacgacctccatgcagttcatctgccgctcaaactcgtggatgacgtggcggatctctgcgccgttttgcagcttgcgtgccatctcgcacagataccagccgaacaccatagaataggtgtggggatccagcagatggatgttcagatggtgctccgggcgctcttcccgcagcatcccctgcgccatcagggcgttgttataggtggaggagccggacttattgatgggcacatggatgacatccgtgtagccctcgtccacatactggcagtatttttcacagaactggatgggtgtgatggcggcggtagagggcacaccctttgccgcgcgcatcttatcgtagaattcggtgttggtgcagtccacacgctcaacgtagtccacatcatccagcaggatgtggaagctcatgatatcaatgccgtacttttcggccatctcctgcgggatatcgcaggaggaatcggtcaggatcgcgatcttgctcataatttccctcatttccattcataatctcgtaggtggccgtggtccagcagctccggaaaatcccactgccgcagcacctcgtacacgcccaccgccacgctgttggaaaggttcaggctgcggcaggtgtcccgcatgggcatccgaatgcagtgctcctgattttccgcaagcagcgcctccggcaggccggcatcctcgcgcccgaacaccagataagccccgtccgggtattgtacatcggtgtagcgctggggtgccttggtggtaaagtaatagtaagggccgttgttgcgggcaaaaaagtccgcaaggccgtcgtagtaggtaatgtccagatagtgccagtagtccagcccggcgtgctttagttttttgtcgtcgatggcaaaacccatggggcctaccagatgcagacggcaggcggtgcaggcgcaggtacgcgccacgttgccggtgttctgagggatgcggggctctaccagaacgatattcaaggtcggtttgttcatcataagatgccctccggatcctcccgcaggggacacagacggggcagcagcggctcgaaccacacgccgaagcgggtgtcctgcgtgcagggcgtgccctgaatagccagcgaaacaaactctgcggcgttatcggcagcggcgctcagggcgttgccctgcagcagcgagccgatgagcactgcgccgtacagatcccctgtgccggggaagctgcggctgatatgcagctttttgataacgaaacgatccgtgccggtaccggcacagccgatgtacttgcccagcggcaggccggtgaccaccgcgttgggggccagcggctgcaaagcatctgccagcgcctgcgcggcggcatcgtccagctgctcggtcacgggctgctgctgcaaaagcagctgtgcttcggtgtagttgggcaggatcaggtctgccgcgcggcacagattgcggatgcgctcgatcagcgccggggtaacagtggaataggccttgccgttatcgcccatcacggggtccaccaccttgtaggcggcaggccacagggcaaaggctttttcagccagcgctacctgtgcttcgccgcccagatagccggtatagatacaatcaaattgcagttccagcgcctgatagtgctccagcgcggccatgccgtaggcgctgccgtccagccgggcgggggtgccaaggccgccggtgtgggtggaaagcaccaccgtgggcagtgccaccggctgaaagcccatgaccgacagcacgggcaggatcactgcaaggctgcaccgtcccacgccggacaggtcgtggatgcaaaggatcttttttggttcaacgggtttttgcaaataggaaaacctccttgccgaaaagccgcgcgcagcggcctataaaaagcatcatacaacagtataccacaaattgctgcataaaaaaagcgcataccagattcttttgcggaaataatagcactgcaagccctgtcatgacaggccgaaaggagaaattcagaatgaaacagcgagaaaattctgccgca

SEQ ID NO: 995 - DNA, 10532 bp, unidentified
  source 1..10532: mol_type = unassigned DNA
tcagaaaatacttgtatcagtgatctgaccgtttgacaagctgttgacgagaccacgcatttcctctttggagcgaatacagtgtgccgagtcgattatctgctgtctttgaagcggatccagcttagcaaagtaagcatatgccgcaggcacctgagcaagagccatagacagccccagcggcaattcctgcccgtgagcaaaagagttgtttttcatttttatcacctccgcatatattatttcccaggcaataaaaataataaatccttacgatcttatatgtgatactgcacaatttatcacatcgtaatttgtgcaaacaaatgatttattttttaatttggcaacatttctgcaattgttgcatttttcatgcaacaaaagtggtgattttcgggataagtataaggatattatcccaaatcgaatatcctgcaaggtagcagtgtatgaggacacattctgagggcgtgagttaggtgaacacgatgagaggttctgatcgcacagaaaagcacttcctgcaccttgtttgaagcttgaaaatcgaatataaacggctgaaacacgaaccccacggcaacaaatctgtaggggcgaacagcgttcgcccgtcttggtcgcccgtcaaaccctgcgttatccgcacaatttactgcatttcacaaaccatgtaggggacggcgccctcgacgtcccaccaccacaacgttttgcattattgtttattccacaaaccatgacaaccacacaacgcatggtaggggcgaacagcgttcgcccgtttcgttccccccactcaacttcatgaaaaatccaaacctcgcaactcccccgaaacgggctgtcgtatttctgtgagcttgcgaacagaaatttcgccaatcccctacagatattcgtgcaagttctaccaccacaaaatcgctccgctgggtcattccttacttcataggaatattattcttttccaaatcagttgacaatcttttgttaatatgatataattattttgttaattttttgtcgatttatcagttaatctgaggtgtattaataaatggataatctttctaatataagtgtgataaaagatgttctcgcaagacataatttcactttctccaaggctctcggtcagaacttcctggtgaatccctccgtttgccccaagatagccgaaatgggcaatgcaaaaaaaggcttcggcataatcgagataggcacaggcataggcgttctcacaaacgagcttgccaagcgtgccgacaaggtggtggctatcgaaattgacgacaggcttatgccggtccttgcagaaactcttgcagaatatgacaatgtgaagataataaacgccgacgtcatggaaactgacctccataagcttattgccgaggaatttcagggcatggacgttgccgtttgtgcaaatctgccttactatataacctcgcccatattaatgatgctccttgaagaacgtctgcccataaagtctgttactgtcatggtgcagaaagaagcaggcacacgtctttgtgcccctatgggtacaagagatatgggagcagtcacagtggcaataaattatttttctgtaccgaaactgcttttcaacgtatcacgaggaagcttcatgccctcgcctaacgttgacagctgcgtggtgaggtttgatatccgtgataagacccccgagggcgtgacggacgaaaagttcttttttaaagtcgctaggggagcattttcacagcgaagaaagactctctcaaattccgtatcatcatcaatgggtatagataaatctatagtaaatcaggcgatagagcaaagcggcctgcctgcctccgtccgtcctgaagctctttccatggaacaattcataaccttttccgaagcccttagaaagcttatctaattgtaggggagtcgcacagtttctgcaagacgtcccgttcttcggatatctcaaattaaaaattattacgcaaacattgattgtgttttttcaaaagatgtatgggagtggctttgagatctgtccgtaaatttggtcagtatttcaatttcaagcccatattgcgacacctttcgcttgatagtcctgctaaaatgtaattattacattttggaaacataggacgtgataagcaatggaaaaaatacggcatacggcaaaatttcatacctcaggtaaaacgaatgtacttatggctgttttatcggcggcagcagcgtttgcggcaagcttcggaaagatcttaggcttcccatcgtcaatgaacgtggcggtggcagtgctttcgggaactaatgtgatacctgcttttttaggctctgcacttgcatattttgtaagcggaacattctcagagggtatcgttcagctttgtgcgatacttgttataggggcggtaaggcttgtgatgccctctgctgaccataaggacgaccccgtttttgtgtcgctcctcacaacaggagcaatgcttcttttcagctgtgtaatgtcggtggcaatgccgtcggatacatatacggcttcactgcgaatgataagctcgctcatgtgtggctgtgttgtttttattgcactgaccgtaaaacgtcaaagaaaccgaagcggtgtttttgaccttacaggaataaacggagttttcacagctatactttatattatgtttatctcgaccatcactgccgcaccgctccatgtggtgaatctgggcaggatagcaggcactttgtttatgcttatggcagtgcgaaagtatagaaatataggcggtgcagtcgttggtgcattgaccacctgcggtgtactcctttgtgctccgtcacttgcgagaaatacacttttgcttgccacgtcaggacttatctgcggagcttttctgcaattcggctctcttgtgatagtgtttgttttccttgcagtttcacttgtgagccttgtggcaatgggcgtgaacggtgatacattttcaatgtttgctgatttgcttataggctctgtgctttttatcgccctgcctgttcctgtgataaaaagggtggcaaaaaaagtggtgggagtgaaaaattccgttgaccttgtagggcagaccacttcttcaaagctcaacatggcttcgagaactctgggcggtatcagaggtcagcttacaatggtcactgcggcgatagataaacgctcaaaggaagctacactgtcaaagcgtgtacgatctgttgtttgtaccgattgcgatatgtactcagtgtgcagtaagcgttgtgtacagcttgatgacagcttttcaaagcttgaaagcatagtttgtacatataataacctcagccttgacgacgttgaaaagcatttgggtggctgtgtgagaaagtcccttctttgcaaaagcttcaatgaattgtataccgactttgtggcagaacgtgccgacagcatgagagttcgtgaaatgcgtgagtttttaagcgaacagctttcctccatggaggatatcttatccgacctttcttttagggcaggtcaggtgagaagcgttgatcctcagctttcagcaagagtaagggagcatttctcaaaccttggctatccaaatgtgaaagcctgcgtttacatagacgaaaatctttgccagcgtgtggacgttttcataactgcgcagttcaggggtgatcttgtaaggctgacggctacgctttcagaaatgatagattatgaccttgatatgcctgtgatagtcaaggtggataatataaccagaatgtcctttgcggaaataccgaaattcacagttgatataaaaagcttttcggcttcgtcaagcggagaatattcgggggacagctttgaagtcttcgattcaagcgtcaacgaaaagtatatcgtcctttcagacggcatgggaacaggaaaaagagcaagactggattcattgttttccgtaagtcttgttacaaggctcatacgatcgggaatgtctatgcagacagcccataggcttataaattccatgctgagagttaagggctgggaggaatcttttgcgacccttgatataatgcggctggagcttaatggcggaacggtgcagtttctaaaatcgggtgcggcgcaaagctttcttttccgtgacggcggtcttaaagctatcggcggacaggcttttcctgctgggatacttgcggagtgtacacctgatgtgagcgagcttaagctctttgacggggacgttctgcttatgacctcagacggtgtcgaggacgctacagcacgagagatactccgctgtaacggaatgaacgctcaggagatagtcacggcgcttggcgcaaaggcgcttgctcagcgaacaggaggcaggcgtgacgatataactattattgccgcaaaaattttccttcgtgacgagaatgaaaaatgaatgtaaatgactttgccgacttttgcctgcaattttttacttttgtatactttgactttactttttctatgttattatataaaatctattgtgcaaaatatataaaactatctgttgaaatatgtgcgaatacgagaataactactaaaactattgcaaaattgttcaaaaaagattaaaatgtaagtatgaaacaccgaaattattcagcggttttcacaaaaagacaagggaggctgaattgtgatagatattattccaaaggattatgaactgccgctctatcttttccacaatggcacaaactgcgaaacatataagtttcttggctgccataagggagagaaagacggcatagaaggatattattttagagtctgggcagcacacgctgagggcatttctgttgtgggagatttcaatgactgggacgaaaatgccactccaatggagaagatagacgactcagaggtgtgggaggcttttgttacagggcttaagacttatgatacatataaatactgtatccacggctgtgacggcaagacccattataaggctgatccgtacggcacacacatggaggtcgctccgaacaccggctcaaaggttttcgatatagacgattatctttggagcgataaaaagtggatgaccgagaagaagtctaaggatatctacaattgtcctatgaatatctatgaggtacatctcaattcatggaaggcttgtcctgacggaaaatatttctcatatgttagatttgcagatactataatcccttatataaaggaaatgggctatactcatatcgagcttatgccgctggcggaatatccttttgacggctcttggggctatcagggtatcggctattttgcgccgacttcacgtttcggaacgccttatgacttcatgaaaatgatagaccttttccatttggcaggaataggcgttatccttgattgggtgcctgcgcattttccaagagatgaggcaggactgttcgagtttgacggaggtccgtcatatgaatactctgacccgaaaaaggcagatcacctcacttggggaacgagagttttcgattattcaaagggcgaggtaaagtcattccttatctcgaacgctctttactggatagaaaaatatcacgttgacggtctgagagttgacgctgttgcgtctatgctttatcttgactatgacagacgtgacggagagtggacgcctaacaagttcggtggcaaggaaaatcttgaagctgttcagttcttcaaggatctcaataccgctgtgttcggaagaaaccctaatacccttatgatagccgaagagtcaacttcatggcctatggtaacaaagcctgcgagcgacggcggtcttggcttcaatttcaagtggaacatgggctggatgaacgatatgctcaaatatatggctcttgaccctattgacagagcttttcatcatgatatgctcacgttctcattcttctatgctttctctgaaaactttattttgcctatctctcatgacgaggtggtgcatggtaaggcttcattggtaaataaaatgtatggtggagatatcgacaataagttcaagcagtgcaagctgttcatggcttatatgatggctcacccaggtaagaagcttctgttcatgggtgctgattttgctcagttcagagagtgggattacgagaatggtctggaatggttcatggtggacgaatatgagaaccaccgcaattatctgaactactccaagaacctcaatcatttctatcttgaccaccctcagttctgggagagagatttttcttgggagggctttagctggatatcaaatgacgatttcaagcagagcatcatcatcttcagacgtttcgacaaaaacggcggagaggtcatcgttgtgtgcaacttcgttcctgtggaaagaaagtcatactgctttggcgttccttactggggcagctatacagaggtgttcaactcgtcttctgttgacggatccccttgcacgaacggcactgttaaggcggtagatgttaagatgcacggctttgaccagtcagtttgcatcgatattcctgcgttctcttgtatgtatttcacggtgaagaaagaggaaagacctgtgcctgagaaaaaggcagagggaaagaaaaaaacaaagacagcggctaagaaaactgctgtcaagaaagccgctaaggcgaaaacaactaagaagtccacagctaaaaaggctgagtaatatagacttaataaaaattggtgggtgaattaattatgttcaacaaaaaagaatgtgttgcaatgctgctggcaggcggtcagggaagcagattgtatgccctgacacagagcgttgcaaaaccggcagtacctttcggtgctaagtatcgtatcattgattttcctctctcgaactgtatcaattcaggtatcgacacagtgggcgtgctgacacagtatcagccattggtactcaatgagtacattggaaacggtcagccttgggatcttgacagaatacacggaggcgttcatgtgcttcctccttatcagacagcttcaggcgctgattggtattcgggtactgcaaacgctatttatcagaatatcgcttttgtagacagatatgaccctgagtatgttgttgttctttcaggcgaccatatctataaaatggattacaacaagatgcttgaatatcacaaagctaagaacgctgacgctactatcgctgttctggacgttccaaaggaagaggcgtcacgtttcggtatcatgataaccgacgaggacgacaacatcatagacttcgaggagaagccaaagaaccctcgttcaactcttgcttcaatgggtatctacatattcacttggaagaagctgaaagcttatcttatcgctaatgagaacgacaaggaagcttcaaaggacttcggcaagaacattattcctgacatgagagaagcaggcgagaagcttgtggcttatcgttttgacggctactggaaggacgttggaactatcgactctctttgggaagctaatatggaccttatcaatcctaacattcctatcgatctttatgacacaagctggaagatatactcaagaaaccctgttatgccacctcagagcataggcaagaacgctcaggtacagaactctatggtaacagagggctgcgttatcgacggctctgtcgagttctcaatgatctctgacggcgttactgttgaggaaggcgctgagatactggattctatccttatgcctggcgcagttgtcaagaagggtgcaaaggtcgagtatgctatcgttggcgagaacactgttatcggtgagaacgctcagatcggtgcaagacctgaaactatcgaggacaaggactcatggggcgttgctgtagtgggcaataatctgaccgtttctgacggcagtgttgttgcaccaaaggcaataatttacgagaatatctaagaaaggaccgagtaaatatggatgtaaatatgggtaacgtactgggtcttgttttcgctaatatgcacgacacgactcttggcgacatgacaaagaacagaactatgggttctgtaatgttcggcggaagataccgccttatcgacttcccactgtctaacatggtaaacagcggcataagcgaggtcggagttataacaaaatctaactatcagtcacttctggatcacctcggctctgcaagagagtgggatctggcaagaaaaaagggtggactttacattctgcctccattcggcaacgttgaaagcactctttacagaggcaggatcgaggctctttatggtgcgatgagctttatcaagcattcaagagctaaatatgttatcctttcagactgcgacgttgtcacaaacattgactacaagcctatcgttgcggctcacatcgagagcggtgctgatattactgctgttgcacacactggcgtttacagctctgatgatataaagacttcaactgtattcaacgttgacgctgacaagaacgtaacctctgttcttatcaatcctgacatcagcggcacttgcacaacgagccttaatgtgttcgttatgtcaatggatttccttattgaaactgttaatgacgcaatggccagaggaaatgtaagctttgagagaaatattcttcaggagaagtgcagagagcttaagataaagatctacgagtacgataactatttcagcaagctcaacagccctgaaagctactttaagtcaaacatggctctgcttgaacctgagaatgcacgcaagctgttcgttccaaagcgttctatctacacaaaggtaagcgacaatgctcctgttaagtacgatctggacagcaaggtatcaaattctcttattgctgacggctgtatcatagagggcgaggtagagaactctgtactgttcagaggcgttaaggtaggcaagggtgcaaaggtcaagaactgtatccttatgcagggcactgttgttggtgacaatgctgagcttaactatcttatcacagacaagaacgtttctatctgtgaaaaccatatccttacaagctcgccacagtatcctatgtatgtaggaaagggagcttctgtataaaaaggtcgcaatgacttaggaaagagggttcggatatgaacatactttatactgcaagtgaggctttgccttttattgcttcaggtggattggctgatgttgcaggctcactgcctgcggctatcaatgccgagggtcacgattgcagagtcgtgataccttattacagctctatcaggcaggagcttaaggacaagctgacatatgttacgaatttcactgtgccggtggcatggagaaatcaatactgcggcgtttttacaggcgttgtgaacggagtgacttattatcttttggataatgagtattacttccagagaaacggtctgtatggcttttatgatgatgctgagagatttatattcttctcaagggcagttctcgaactgctgagatacatcgactttaagccaaatgttataaacgccaatgactggcagacggcacttgttcctgtttattatgatattttctaccgctatcagcaggggtatgaggatatcaagacggtatttactatacacaatattcagtatcagggacaatatggcttagaacttatcaacgatattatgggcattccgctttatcatacggatctgctttcatatgacggtgatgtgaactttatgaaggctgctattgaaacggctgacaaggtgacgacagtttcgccaagctatgcttgggagatacttgatccatggtattcacatggtcttgacagggagcttgtgaacaagcaatacaagctttgcggaatactcaacggaatagatcagaagatctatgatcctgcaactgatcctgttattgctaagaattatagtttgaatgacaagacgggcaaggctgtttgcaagcacgctttgctcagcgagcttggcatggcacatggaaaagagcctgttatcggtatcgtaacgagatttgtttcacacaagggtcttgaccttatcaagtatgtgtttgaggacatcatcaggcttggctgcaagtttgctatacttggttcgggcgagaagatatacgaggactttttcagcgaaatgcattatcgttatcctgacagagttggtctgaccattggttttgtgcctgagctgtcaaagaagatatacgctggtgcggatatgttccttatgccgtcgcagagcgagccttgcggtttggctcagatgatcgctctgagatatggtactatacctatcgtaagagagacaggcggtttgagagacagtatccatgacgcaggcgacaagggcggcaacggatttacgttcaagtcctacaacgcacatgatatgcttgacgctgttgttagagccagggcgtactatgatgacaagatgaagtggggcaggcttgtgaacactgcgctcaagcagaatttcagttggacaaagtccgccaaggattacattgcactttacaacgacattcactaa

SEQ ID NO: 996 - DNA, 21251 bp, unidentified
  source 1..21251: mol_type = unassigned DNA
ttcttttattatatcctctggcaatgattttatcctcatgcacaatcacacagccaatcggcgtttccagtttgtcatacgcctttttcgcctgtttcactgcctgtttcataaacgactcatcgcttgtcatcgtgattcctcctgatcccggcaaagtttcctctaacactggcagccgcacatcgcaccgccgcattttctaagtgcagtcatgcgcctgcactgctcccctgcctgacattcataaaagcacggcaattgtcctgcccagtaagcgccatttctgccaattccgattcctaccacagcatccgcgtgggcaattgtctcatcgtccggcaaaaacaagttacagacggtagttccgtttttgtcaaaagtgacccatccgcaggagaaacactgccactctctgcctgtgcagtaaacggcacataccggacattcctccggtaaatcctgtgtgtccaaaaaaatcgtcagcgttaatacctgttttctccgctctgcttttacataaccggctgtcacagagcaatccggattttcttcccgttttctcacataaaacactttccgcatatagtccgacataatcactgcctcccagtcattttttacactatatgcttgtttcattatgcgtattacttttcgtttccgactgctaacacactgtcgtagcacgcctttttcttgtgactttcatcgaacaaaagcgggtaactgtcttcgcctttaaaggatgtcagccacgttacatcatccgaaagcccccagaatgtaacgctcgtcacattcgccttcccttcgcggtccgctttcacaatcgtctcaaaaaattctttataacggtctgccagtttcttcaaaccttcctccgaatcatcggtattatgcatatccacttcggtaaattgaatctccaagtcaccaatctcactgtacttttgcatcgcgtcagaaatcatgccggtatccggataattcatatcccagtgactctggaatcccacaccgtcaatcaatttcttatcatacaattttttcacaagttctgcaatggtacttactttgcttggcatatactcattgtagtcattataaaataatttcacatctttatctgcgtattttctagcaaatgtaaacgcatcctcaatgtatgattcatcgccgtaaatttcataccacaaactggaagtgcggtatccgccgccgtcgtcacacgcttcatttaccacatcccacgcatagacaacgcccggatatttttcctggcagaaactcagaacttttttgatgtaactttccattctttttttcatagtttccttgtcaacctttgcatttccggcatcatacttctcacagaaaaaccattccggcgtctgattgtgccagacaaggcagtgaccacgaagcacaagcccgttatcttttgcaagtgaaagacactccgccaaattttcctcattaatcgccggcatgccgtctttgctgttttccgacgcccgctggtctaaaattgcctccggcttcatgccattttccatcgtaatactgttgaaattttcaagaatgattttctttgtttcctcgtccttcaactgatacggattaattgcaaccccaactttaaaatcctttttaaatgcgtccttcaaattttttgcctcttctttctgttcaatttttgaactttgttccggtgttgtctccacggcttttttctccgccggagcaccacaaccggttaccagtaacatagccgcgaacactgccgctgctaatctgcctgcttttttcatcctgcttttcctttctttgctgctttgctataataaaatccttttaccgcaccctacttacttaatatgaaaattatattttagattgggggctgtgtcaaatgttcgttgaagttttttgagtttccgtaaataagcaagaatagtttgcgaagagtgggcgctttcgctaaacaaacgcgtaggagtataatttttcaattcaccaaataattgagagcagcttttgtaaaatagacctgcggttccgttgcaactcttttcccttgatttgtcccatagggttgcatttatcaagtttcatctgaagaaattagccgtcaaaggcaactctttcgatccgcttccgccttttaggttgcaatttcttcataaatcttcttgattagatttgtatgcgacgcaaaaaggcaaccctataaagcaaattaagggaaaagagttgttttgaaaacacaagaagctgctcgtttcttgctagttgacatcaagtgctcgtatctttttggtatccagtaattcagcagaaatgctttgtggctcgtgggttttgagtacgtcggtatgaggcactggtagtttcagtgcccataccgctacgcactcaacgagcgggagcacccacgagacacaagcatttccgctgaattacggaaagccccaaaaagtaccaacgaacacttcccccaaaactgtttctatcccaacattgacttttgatacaatacctattaaaattgttcttatgaaaattgcaacggagatttgataacatgcaaggctccggattggaggaagaaatgaagaagactattttgacaggagaccgtcctaccggcaaacttcacgtcggtcactatgtaggctccttgaaacgccgtgtagaattacagaattccggcgaatatgatgatatttacattatgattgcagatgcacaggctttaacggataatgcagataacccggaaaaagttcgtaaaaacatttcggaagttgctctggattatttatcctgtggacttgacccggagaaatcgaaccttttcgttcagtcgtatgtctccgaacttacggaacttactttttattacagcaacttagttacagtttcaagattgaaacgaaatcctacagtcaaatcagaaattcagatgcgtggctttaatgcaagtattccggttggtttctttacttacccaatcagtcaggccgctgacatcactgcatttaaagcaacgaccgtaccggttggcgaggatcagctgccaatgcttgagcaggcacgtgaaatcgtccgcagttttaacactacttacgatgaggttttggttgagccgaaagcacttttgccggaaaatgaaatttgcagccgtctgccgggtaccgacggcaaggcaaaaatgagcaaatcccttggcaactgtatttatctgtccgatgagccggaagatatccgcaaaaaaatcatgagtatgtacaccgatccggaccacatccgcattgaagatccgggaaaattggagggaaacacggtatttacttatttggatgctttctgcaaggatgaattgtttgcagaatacctgccagattacagttgtttacaggaattgaaagaccactacactcgtggaggtctgggtgacgtgaaggttaagaaattcttgtactctgttattatggaggaactttctccaattcaggcaagaagaaaagagcttgaaaaagatattccagccgttatggaaattttgcacaaaggaagtattaaggcaaaagaagttgccgcgggtactttgagcgaagtaaaacatgcaatgaaaattgattactttgattaatgtttcctgcataacgaataaaacaaaaggagcagttatccatgtctcttacgtgtaaacacggtgttacatggagagctgctcctttttattttgaatcttttcttatttcttaaattcgttttatctggtttgcaactgtcggtgcaacaactgctgcaatcgcaattttaatcaaatcgcccggaataaatgggattacacaaagcgccattgctgcgccaagtcctgttcctgtcgaatagcagaaccacatcgtaccaaatgcatatgcaatcgcggtaccaataagcattccgacaacgcagaaaacaatatttacaatcttcttatccttcttaacctgcatcaaaagaccacatacaattgccatgaaaataaatccaattaagtaaccgccagtaggaccggcaactttaccaaccccgccttcaaatccggagaataccggaagtccaaccagaccaagcagcaagtatacaatgtacgtgatggttgcccgctgccagccaagtacatataaactaaagtaaatcactaagtttgtcagcgaaatcggcaccggaccaatcggtacagcaagcggtgcaagtacacaggtaagcgctgcaaataacgccattatcaccatatctttcaggttaaaaaagtttttttcattcattgttcatcctccgtttttcaaatgtaaaccttttatcttgtcatagtatacatttgaaaatcggaattgtcaacctttatttacattccacaaattttccttctttgtcaagtttaagcaccgcatgattatcccacttgccatcctcctccatatggagcgtgacatctaaatatatatttttagaatttgattttggcaaaactttcatatccatacttgttcctacacagttccagcccaaatcctcaaacagggtatctctctcatcctgattctcaatgcataccgttctttttcctttttccacacataaaatattcacactgcttttattatagaaaaactctttactgccaaattttccggcacttgtatactgcttttcatacgctttccatacgtcatttttatcaaaaatctttttaccctgcgggttcttcacaataaaattatgatttttaaaatcaagcaaaacacttgcatcacttgttttattatcataatcgtgttccattgctttcacaagaatagtctgcgttttatcagaacattcggcagtacctttttcaaaattctgataaaatacttttaaatccgcatatgaatataactgccaaaattccttttcgtaaaagtcttcatttttctcccaagactcttcaattttaaaatcagaaagactcttacatgatggatacggaaaagaaatatacctttggttctcgttcatatatttcggatactccaaagtaagcacttggttttccagacacaaatacttatgtttcttccctttctcacttctttcataaaggacataagaattgttattcttaaaataacgcgccgccttatattttgtgtgattttcatccagataatcagttaattccacaaaatacgacggatttttcttttgaaccgttttgagattttctttataagaaataaactcccaattctgaccaaattccgaaacacagccactgccagtgccaaatctgactgcctgaacagaaaaatctttttgcttcgtatcccagcgctcaacggataattttatttgtttcaaatcttttggattttcccttttccagcttgtgttttttattttttgtaccataggactgctagttgcttcaacactttttggcgttgtttctgctcctacctccaacgccttctgcggattttttgactgttcctttgtgccagtcccacatgctgataaacaaagtacacacgcacacgccagcaaaatttcttttctcataagcaaaacctccctacttcactcttttcccacggtaataaatctttatctttttattatttttaacaaatggctttttccaattgttataccgttttactttatgcgaaatgattagctttttcagtttggcttttgccacaactgcatctccactaatcttttttattttggcagacaatttcaatacgctgccctttccaaagatgtaaactaattctcctgtttttttctcatacaaacatcttttgtggacagaaaactttttattcttttttgccactttcacagacttaatgtttgtgtttacaaatgctaccgcctcaatattttttacatttttcggtattataattttctttgcatccggcattacctgaaccagatctttttccgtcaaatcaattaccatgttattagaaaatgataatgtatctccctgtaaatgttttgtaatataagtaagccctgccagtttgtcacaaccagtaaatacttctttcgcttccacttttacttttgctgaagtatctatttttctaagattcttgcatcctaaaaaggtatagttttgcaacgacgccaactgattcggcaaatgaatcgtttctaaagatgttgtgtatgcaaatgcagccgcaccaagatacgttactgtgtccggcatcgtaatggatttaatattctttttatatgggcctgcataatgccatggttccaacatatcgccccacaatgttacctccgcatccaaatggtaagaaccatccggtccctgtataccaacacttccaagattctgttttgccaaaatctccttatatccactagttgctccaactatcacaaccggcgcattttcaactttatccggaatcactaccctgatattcttcttgtcctttgctacatctgctttaaaaatccagctttcttttttatctttcgataaataagcatgataggttgcatcctgattggtaatcgtatattccttagaaacatcccagtaatccaaccgctccatcgcagaaatctccgctgcatttgaaacatttgctttcaagcacagtaccaaaaccaacattgtcattgataatataaattttttcatacgcttttcctccttaaaattatttgactgtatgaaattccgttcaaactgccactccctacttcactcttttcccacggtaataaatctttatctttttattgtttttaacaaatggctttttccaattgttatagcgttttactttatgtgaaatgattagctttttcagtttagctttggttacaaccacgtcttcactaatctgttttatttttttcgacaatgtcaacgtgcttcccttgccaaacacataaacaagttctttttccgccttccgatacaaacatcttttatgaaccgcaaaatatttgtttttcttcgacacttttaccgtttttaggctagtgtttttaaacgccgtcgcctcaatccatttcacgctttttggtattgtaattttctttgtatccggcattacctgaatcaatgttttttccgtttgattgacaaccatattaccggaaaatgtaagtatgtcattttttaaatatttagtttcatgtgcaagccccggcagcccattacagtagccaaaaacattcgcagcctccactttaaattttgccggaaaatcaattttcttaatatctttgcttccgaaaaatgttccatttttcaaacttgtaagtttgtctgacaaatgaatatattttaagtttcccattgcaccaaaagtacaagatcccatctcgcgaattgtatcaggcatcacaacggatttaacattaagtatttccaaagtcgggcggctgtcggcatcacaataatcaaacattgtcacaccaaataagttttgtggccacgcagcttcttccccctgatataaatctgcactatatcccaatctcacaaccggcgcattttcaattttttgaggaaatatgatatccagcattttctctttgtttaacaaatccgctttaaaaatccagctttcttttttatctttcgataaataggcatgataggttgcatcctgattggtaatcgtatattccttagaaacatcccagtaatccaaccgctccatcgcagaaatctccgctgcatttgaaacatttgctttcagacacaatgcaaaaaacagcaaaaacatcgacaccaaaatctttttcattttcataaaatcactctccttactttcatttacacgtccattaatcatgtaccttgtacttatataacgaatgataactggaaaatgttgcaaaagtaaggaatttttttacgacattcccaccagcaaaaccgccaccatcgccccggcaaaagttgccaccaatgcaccggtaagtgtataacgcgttttggtcacgcgcgccgtcataaaataaacgctcatggtatagaaaatggtttccgaacaactcataagaactgacgctaatgtgccaagataggaatctgttccatatgttttgtatatatcaagcaaaagaccggttgccgccgaggatgagaacattttcacgataaaaagcggaagcagttcgcccggaaaatgaaggatatttacaaccggtgcaaacataccggcgagccactccataaaaccggactgccgcaaaactcctacaccaatcatcaaaccaattaacgtcggcagaattttatagaccgtcaaaaatccatctttggctccctcaataaacgaatcaaaaatatccacttttttgcacatgccatagccgacaagatagagaatcacgaatggtatcatgcaatctgaaatataataaaggacttccatttaccgctccccctttttctttgatacttttcttgctattacagaaaaaataacaccggctgccgtcgatacaattgtagccaccagccccatgccaagaattgaagcaggcgaggcagaaccatactggcttcgatacgctataatattaaccggaatcaattgcaaagaggaaatattgataatcaaaaaagtacacatatccgcactggcaatgtggcttccatgatttaattttttcaattcttccattgcctttaaaccaaccggcgtagccgcccatccaagcccaagcacattgctaatcatattggcggccatatattcatttgccttatgctcttttggcacgcccggaaataaaaaggcaagaaccggtcgaagtgcttttgtaagcgcatcgataattcctgccttttttgcaatattcataagtcctgtccacatggacatgatgccaagcatcgtaatacataaagtcactgcttcttttgacgaatccagtgctgctgttccgatttctccgattttgccggttgccgccgcaaacaaaatcccaatgagaatcataaatccccaaagtttattgagcatacgcacacgcctttttcttttattgtatgcggcaggaagataaacattcccacaaaatcaaaaatcgctgttaatcagcggtgttccaaacacaacttttgtaacatcctttttttcatcataagaaaatgcagccatcatatttatgcgtctgccatttacctttttggaactttcaaatccgcttgtatagccgtatgcgacatagtaatccgaactgctatcggaattactgttcattacttctcctccaccaaactgacgaaaaagtttgtccgccattgtttgctgctccgatgcattcagcctgccatttaccacaccttccatcacacgattgtcactatttatatttcttgtatcagcagccgcctcctgagttgatgctttcataatatcactttttgcaaatgcctgttcaaacgcagtctgcgaaacataccatctggttaatacagtctgcaaaatcacaatagcccacagaacgaatgccgcaaaagccgctgcaaaaaatttcttcttacccaaataaaatcatcctttccaaagtcatccacttgtgactttcttataggatttccgattttttgaaaaatatgcaaaaatttcagttgtttttttatctgttacaatgttttttaattgcaataatcaagcggaatcttttgcgcatcgtaggcgttttcactcattgagctgcgtaacagcaggggcattgaccagcttgcccgcataaggaattcctcttttgtcaaaactaattatgatataatgagaaaaaaagagacggttaatttcaccatgaggaatgttgaacaccgccggtgcgcagagggcgtagtctgccctcacgcaccgctgcgtgtgttctctcagcggaagcgattccgaatgggaaattaaccatctctttttattaactattacatcataattatttatcactcgtagcggcaaaaaatcacacttgaattctgtccgccaaatccaaacgaattactcattgccacacgaacctctttttcaattgccttatgtggaacataattcaaggatgcacatttttcatccaattcatccagatttaatgttggtggaacgacgccggtgcgaatacactggatacatgtaatcgcctcggtaataccgccggcacccatcatatgtccggttgcgccttttgtggaagtcacagccatttcgccggcatgctctgaaaaaagttctgcaatcgcattcgtttcaatcggatcacccataccggtggaagttccatgtgtattaatataatctacggattcttttgtaatacctgcatgctcgattgctttttccatgcagaataccgcaccaattccttccggatgcggacttgttacatggtagccgtcagtgcagttggaaaatcctgcgagttccgcataaattttagcgccacgttttttcgcattttcttcggtttcaataatcagtgcgccaccgccttctccaatgacaaaaccatcacggtctttatcaaacgggcggctcgcctgctgcggattttcattattggtggacaaagcatgtgctgaagccagtccctgaataaacaatggggataatgcggattccgttcccatcgcaagaacggcgtctgcctgtccggacatgattaacatgcaggcggtactgattgcgtcaccaccggaagaacatgctgtgctcaccgtcagacttggaccacgatagccttttgcaattgccacttgggctgctgcctcattgccgataattttcggcacaaagcgcgggctgacttttttatgctctcccttgcttaatccatcctgcacttctgcaatcggtgaaataccgccaagcgccgtaccaacaacgatacccatgcgctccggtacagcaatctcctctccggcatccgcgattgcttccatcgctgctgcgtaaccatactgcataaacacgtccatttcacgcgtcagtttctttggcataaagtcttccgcattaaaatctttgacttcagctgcaatttttaccggcagctcctcagtgtcaaagcgggtaatcgcttccacaccgcattttccggccgcaagatttttccaataattctctacgccaattccaatcggtgtcacagcacccattccggtgatgacaagccgactattcgttgtcttcattttcattccagtcattctccttgatttcttttctacgaatcttaccacttatagttttaggcaattccttcgtaaagtcaagtatttttggccatttatatgacgcaatattctttttcaaggatttcataatctcactccgcagtttatccgttccctcttcaccgttggcaagaacgatacttgccttgattgcctgaccgcggattgggtccggcacggaagtaacggcacactccaaaacgtatggaagtttcataatttcattctcaatttcaaatggtccgatacgatagccgctggacttaattacatcatcggtacggccaacataccacagataaccatcctcatcaaagtaagccgtgtcacctgtgtgataataaccatcatgccatgcattctgtgttttttcctcgtcaccgtaatattccataaacaaaccatttggcgcaccatcttctgtgcagataacaatttcaccctcttcttccggaccggcaagtgttccatccggcagcataatctgtacatcatactgtggtgtcggcacacccatggaacccggtttcggtgttgtaccaacaaggttaccaattgtcaatgttgtctcggtctgtccaaatccctccatcagtgtaagtccggtttttgccttaaatttctcaaagatttccggattcagtgcttcgcctgctgttgttacattctgcaaagaagacaaatcgtactggtctaatttcaaatgtaccattacacggtaaaccgttggcggtgcacagaatgttgtaattttgtatttctcaatcatatgaagaatttcttttgcatcgaaattatcaaaatcataggtaaaaatacatgcctcgcacagccactgaccataaattttaccccacaaagcttttccccagccggtatcggaaatagcaaaatggatgccgtccgggtcaacctgatgccagtatttcgctgtcacatagtgtcccaaaggatacttaaagttatgggttgtaattttcggatacgaagtcgtaccggaagtaaagaacataatcgatgggtcatcaccatggattgcattctcaccatgtggtctgcggaaatgacttgaaaaatattttacttccttgttaaagctgcgccatcctttgcggctggcaccaaccatgattttcactttcagatttttgtagctgcggcacgccttatccacttcgcgtgaaaccgggccgtctgccgtacaaagaatcgcatctacattaccggctttaaaacgatattcaaaatcggatttcagtaaaagatttgttgccggaattgctactgcaccaatcttgtgcagtgccaaaatcgcaaaccagaactggtagtggcgttttaacacaagcattacgcggtcgccttttttaattcctaaaaactgaagatagtttgctaccttagaagaatagcgtgccatatcataaaaggtaaaggagcgttcctttccatcctttgaaatatgaagcatcgctactttgtccggagctttctttgccatcttgtctactacatcataggcaaagttaaaattatcatcatttacaaatttaatatcctgcaaaacaccgttttcatcttccttaacctgaataaatggtgctgcaatatcgccttttgaaagtgccatttgcgttcctcctatatcaaatcctgcaaattgtttttatgttccatgtagttttcaaaaccacatcatattgtaaacaatacatcacgctttctctattgtcaagaaaaacaacgcaaaatcgtgatatttaatatattttttacacttccagaagaatccgtttgaatttacccttataatatgatagaattatgttgacttatgtacacagatgaatggaggattttgtttatgttcaaaattgttgaaaaaaagtccctgaatcctactgtcagtaaaatcacagtagaggctccattaattgcaaaaaaagcagagccgggacagtttattatcttccgcgcaaaagaagatagcgagagaattcctttgacaatcgcggattttgaccgcgaggctggaaccgttaccattatttatcagattgttggtgccggtacaatggaattagacaccttaaaagaaggtgaatacattcacgactttgtaggcccgcttggtgttcctacccacacagaaggattgaaaaaagtagcagttgtcggcggtggtgttggctgtgccattgcttacccgattacaaagaaactgcaccagatgggtgctgaagttcacgccatcgttggattccgtaatcaagacttagtaattctcgaagacgaattcaaagcagccagtgacaaactcgtcatgatgaccgatgacggaagttatggcgaaaaaggtctggtaacagatgcattggaaaaattaattcaggatggaaatgaatacgatgaagtcattgccatcggaccattgattatgatgaaattcgtatgcctgacaacgaaaaaatatgacatcaaaaccgtcgtcagcatgaacccgattatgattgacggaaccggcatgtgcggcggctgtcgtctgacagttggcggtgaaaccaaatttgcctgcgtagacggtccggatttcgatggacatctcgttgatttcgatgaagcaatgcaccgtggaacgatgtacaaagaatttgagacacacgcccgcgatgaatattgcaatctactcaagaaaggggaaaattaatcatggcagagagaaatatggatatgaataaatgcccaatgccggtacaagacccggatgtccgtaataaaaactttgatgaagtagctcttggctacacctatgatatggcagtaaacgaagctcgtcgctgcttaaactgtaaaaacaaaccttgcgtcagcgcctgcccggttcagattaacattccggcatttattgagcgcgtagcaaatgaagatattgaaggtgcttttgcgattctttcagaatccacttcccttcctgctgtctgcggccgtgtatgcccacaggaaaatcagtgcgaaggcaaatgtgtccgcggcatcaaaggcgagccggttggtatcggacgattggagcgtttcgttgctgactaccacagagagcactgcacagacgcaccggttaaaccggagccaaacggtcacaaagttgctgttatcggtgccggcccaagtggtcttaccgttgccggtgatttggctaaattaggatacaaagtaacaatttttgaagcacttcaccttgccggcggcgttttggtttatggtattccggaattccgtcttccaaaagcaattgtgcagaaggaaattgataacttaaaagcaatcggtgttgatgtagaaaccaatatggtaattggtaaagtattaaccatcgatgaaattttcgaaatgggtaacgaagcaatcttcgttggttccggtgcaggacttcctcgttttatgaacatcccaggtgaaagtttgaaaggtgtttattctgcaaacgaattcctgactcgtatcaacttgatgaaagcttaccgcgacggaagcaaaacaccaatccagcacgcaaagaaagtcgctgttgtcggtggcggtaacgtagctatggatgctgcccgcagtgcaaaacgtcttggtgcagaagaagtttacattgtataccgccgtggtatggaagaacttcctgcccgtaaagaagaagttgaacatgcagaagaagagggaatcatctttaagacattaaataacccggttgaaatccttggcaatgacgagggtatggtatgtggcatgaaatgtgttgagatggaacttggcgaaccggatgaaagcggacgccgtcgtccggttgaaaaacctgacagcgaatttgttcttgatgttgacagcgtaatcatgtccattggtacaagtccaaacccattgattcgctccacaactcctggtctggaagcaaataaccgcggatgcttaatcacaaaggatgaatccggtttaacaacccgtgataatgtatacgccggtggtgacgccgtaacaggtgccgcaaccgtaatccttgccatgggtgcaggaaaagctgccgctaaggcaattgatgaggcgctgagagggtaaataataaggctattcttacgataaaaaaggaaaaactgcaaaccgactcgaaacagagaattcgcttcacgaattatgtttctcgctggtttgtggtttttccttttttaggtaagtctagcttattgtattcctaactctatcacccattccacccgctcccagtcctaacagacaccagaacacaggcgctgttactaccatagaatcattaaacatcccggcaaagagatatcctaatacagaaatcaaaattgcccgtataaaatactctttctgcgtatggcactttcctttggctgccgcaaagccacgctttaaaaaaatcacaaaaaatgcaagcatcagaacaagcgagaggcaccctgtctcaattcccatctgaagataataattatgtggcttcttataataagttgtcaacaaatcatactgatatctggcaacataatcattatgcgggaacacaaaaccaaactggtcgggccccgcgccaagcagcacataatcttttaacagcggtatcgttcttgaccacacaaaaccacgaagcgatgccacctcgttcatccacgatggcagtgccgtttcggcgtgaatacacaaatcccattttccgtttgcattgagataataatacttcccatccccacgctgattggtaaaccgccagacactctttttgtacttcatttcatagccataaacggtcttttcaccgtccgcaaatgcattcttttcaaatgaaaatgctttccactttctatccggtgtctttttaagcgtgatattttcaccgcttccctctatgacaaaagaataatttttctttttatagcggattttcacatggttattcttcgtttcaatataagataactttttacttcctttggtagaaaaccgaacctgctgccattttccaaaaatatcccctgtgatgtaccagttgcagaaaaataaaattgcaagcacagaaacaaagacgcatagaattttccttttgtactgacagactttgttccgatattttacgccgccaatacaaaacgaaaccagtaccgcaagcgtgccggtccgcgactgcgaaccaaaaaggcagaaaatcagcagataaaaaagcacgaaccaaatggttctctcccgctttttacccgcctcatggaaataaacaatcattgccaccgtcaccggcagaagaagcgctacatagctccccacatagttccaatggtacaaagttaaatatataaaatgcgaaactctcgcctttctcccacctagaaactctttcacaaagcccattgacaataaatcaaatccaaagaactgcgaaataccaatcacgccaaggattccaattgagacaccaagtatttttatcagtatggaaatattttctgttttattcacccaaaaaaactgtaaaagaacacaaccagatacgaaagtattacgaaaagcccctgcatattgccggtcatcccgcgaatactcaaaaaagggtgttctgcgcgtaacgacgaaacaatcgccaaaaatccatatcccagtaaaaaaagaaagtactttggaatttcatgaatctgccgccaaaagcgcatacgagccaaaatcacaatcataaaaaggtagcaaaaaaacaggacaaacaatttaccatacaaaaagaaatctgactcaactgcatttgcgggaagccacggttcattctctgtgtatgttttactgtttatcctgcctacaacaaggggcagaaacgcaagcaccaaagcaattggtgctaacgttatccatttgtcccattttttcatcatattccttactgtgcagcttcagtagctccttcttcaacagctccgtcagtctgagtctgagcgtcctgctgaacaggtgtcatatcagcttttcccttttccaaaacaacttccattgtctgtccatttcccaaatctaatttgtatgtgagcgtcttcttgtctttgtcatatgccatggacatgtaaatttcatctttaccttccattttaacttcaattccgtcagaacgtctctcataatcaaattttgtctcaccgtttgcagttaccattgtcattttatcatcttctgtaatatttacatttacagttgcctgactaggatcaacgccaagggatgctgcatattcatcaatcgtcataccattgattgtctttgctgtccaatcacctttgatgtcgtcataagaaataccacatcctgccaaacttaacatcattacaaatactaatactgctgatacaatctttttcattttctaaatcctccaaattttaattttttattaaatattgttatttactttcatttgccataacaagcataattccttttgtaatctagtcggaatgtaaatctgttcacctccccgtaaaataatttctgttttggtaacatctttaatatagcccgcattgatgtaatagcttttcccgcaggtaacaaaatcaccgtcatccggcattttttcttttgccctcgtgagcgaacaatttgtccgaaaatccccatgcagcgtatgtatcatcgttgcatgcccacatgtttccatgtaaatgatttcgtctaagcaaaattttttcattgtgcggtctaccataaatgatatgttttttttcatttgataaaacatattctgaaaacggttcagcgcacaatcaacctgctgctgcacaaacggctttatcaaaaagccatcggcatatacggaaaaggcatccattgcatagcattcagatgctgctgtcataatcatcttctgattactctttctcccctgaagtttttttacaatcacagggtcttttatcttttgctccggaaggtttacaatcataagactcggtttgtttaccggaatttcggataacatattttcgaccgagctgaattcttttatgcttacttgataattgccacgcagatatttatctacgcacttttttatcgctgaccgctcttttgcggattcatcacataaataaattcgcataaaacccctcctcaaaagattccgtgctcccaaaatatcatactttgcggataaatcctacgctttctgtcaaaacggtaaaaaaaatgcagaaacggtaaagtctctgcattttttataaatttcttttataactccggcttaatctcgccatttttcaaattcaggaaggcaacgtccgacatcgtgctcttaccggtaatatccgttacttcataagtaaaggcatattttccatccggcaaatctttttctttgaattcataactttccttccatgtaaattcatcgtctggcatttcctgaacctcattatttccttccatgctctgtgcgtaatagacaatagctactttatcgcccttctccaatggccgcatatcttttcccgcctgtccggattcatccacaccggaagttgcaccaagaatatagaagtcttttgcctcataatcataggcgacactcaaatagctgtcttctccatttaatttaatcggaaccgtatacaaattataatcatcgccctcataaactaactccatgtaacattctctgtcattaatagaaccccagacgccgcggaagttatcctggaatacacctttttcccagtcgcactctaagtcgttatcttttcctaaaaagacaattgcttttccgtcgtcactgatataagcaaaattgaaagcaatgctttgaatactatctaattttgacgggtcaatattcaactggatgtaatcattttcattaattgacatctcaaggtcaccgtcaaatccgcttacttcctgtacttcgccgacaccactttcactcaatgcctcatcggatatattggcaccgatggaataattgacaaaggaagaataaatattctctgcggcaatctgctggtaacgggctgctgattcctggtcaccgtcataggaataataaaccgaaagtccacttgcatgacggcggtagtctccgtttattttataaacaatcgcatcggaaagtgctttttcaatctgcgctttgctctcaccaatcagcccttctgcattctgtgccaaatgccctaagtcaaccatgtttgtgtatccttctttgtcattattaccaccataattttctgccttcgtggcacttctggcaaattccgcgcatacagaagaatctttttctgcttttttcaaaacgaccttacccatattctgcaaggcttcaattattgccggtgtcttggacaaatcggttacggaaagtgtaatttccgcatccgttcctgcttgtttacaaccttgtttaaaactgtcgcagatttctttaccaagttcggcaccgttcatagccggattttttgcaagtttagaaagccatccgctgtacagccatccatttcccggttctgtctcctcagacgctaccatgtaggacgcataattctggaatacattcgctgtatctaccgttgccatcaggcaggtatcaaaaccaacaacctcaaacggctttttgtcaccgtagacatctttcataacagcggaaagttcgtctaataccaacgaatccatttcataattttcatcaaaagatacaccgcttacacttccaccaccatgattccagaacaacaacatcttatggtctgccggatagttttcctctgcataattgaggaatccctttaacgtctccggatcacccatgcttgcctgctcagtttcatcttttaaagtaagtgtatctccactgtactcataacgctgaatccggtcggtttttacctgatcattctgccactttgacgcaccacccgtctgaattaccacttttacgttttccggaagcttaacctgcatcatttcatttagatctgctgttgctgcaccgtaattgctctccaaatcgctgccacacagataccaataaacaacccaagtatcctccttactgaaactctgtttggcttctttctcttcgtccgcgcagccggtcattgaaaataacatacacaaaaccagcacaagcgccgtccatttttgatatttttttatctccatcttaaaatttctcctttctgctcatttcttcattgtatcggctctttctaaatcctgcaacaaaccttgcagaattgtgggcaaagggtgaaaaattgcttgacccttccttatgaatttgttaaaattttatataggtaaatgtcgcaaaatgataggaggcagcaatgaatatcgcaattgtagatgactcagaaagcgaccgccaattactacaggaattgctaatacgttatttcgatataagcggaatcagtattacgatttacccgtttcagtcgggtgaactttttttggcagggctttctcaccattcctttgaccttgtctttctcgatattttcatggatgagattaccggtatggacgcggcacacaaattattagaagcaggctgcgactgcacaattatttttttaacgtccagccgcgaatatgcactcgaaggatacgaagtaggggcttttcgttatttgcttaagccacttacttacgacaagttggaagatacattaaatccctttttacgcaaatttcgtggggaagcaaggaagcttccacttatggtagagcggacaccgctgtacattccttattcggatttgtactatttatcatcggtgatgcgccagacagaagttcatttagaaaaaaaggtgctaaaacagtcttccgccattaattttcaaaaaacagtcgctccactccttagtgattcccggtttttcctttgttccaaaggcattatcgtgaatttacagcatgtgagtgaatt

SEQ ID NO: 997 - DNA, 6328 bp, unidentified
  source 1..6328: mol_type = unassigned DNA
atggacgtattaaatagagtaccggttcgcgagcaggaaccacaggttcgtgcggctaactttgaagaggtatgtttaggatataacgaggaagaggcaaaagctgaggcagcacgctgcttaaactgtaaaaatgcgcagtgtatgaagggatgtccggtatctatcaatatcccggcatttatcgcacaggtaaaggaaggaaactttgaggaggcatatcacattatcagtcagtcttccgcacttccggcagtctgcggacgtgtctgcccgcaggagagccagtgtgaaggaaaatgtatccgcggaatcaagggtgaaccggttgcaatcggtaaattagagcgttttgttgccgactgggcaagagaaaatgatattaaaccgaaaaaagcagagaaattaaacggacataaggttgcagtcatcggttctggccctgcaggtttaacctgtgccggagatctggcaaaacttggctatgatgtgacaatctttgaggcacttcatgaggcaggcggcgtactgatttacggtatcccggagttccgtcttccgaaacagaaggttgttgctgctgaggtggaaaatgtaaaagcactcggtgttaagatcgagacaaacgttgttatcggaaaatctgttacaatcgatgaattaatggaaaacgagggatttgaggccgtatttatcggttccggtgccggacttccaagatttatgggtattcctggcgagcaggcaatgggtgtattttctgcaaatgagttcctgaccagaaacaacctgatgaaggcatttaaagatgagtatgatacaccgatcaaagcaggcaagaaagttatcgttgtcggcggcggtaacgttgctatggatgctgcgagaactgcaaagagacttggcgcggaggtacatatcgtataccgccgtggcgaggaagagcttccggcgcgtgtggaggaagtacatcatgcaaaagaagagggcgtgatctttgatctgctccagaacccgacagaaattcttgtagatgagaatggctgggtaaaaggcgcgaaagtcattaagatggaactcggtgaaccggatgcatccggaagaagaagcccggtagagattccgggatctgagtatgagatcgaggcagataccgtgatcatgtcacttggaacttcaccgaacccgctgatctcttccactacaaagggacttgagatcaaccgcagaaaatgtatcatcgcagaggaagaaaacggtgctacctcaaaagccggtgtatttgccggtggtgatgccgtaaccggagctgcaactgtaattcttgccatgggtgcaggaaaagctgccgcaaagggaatcgatgaatatctgagcaataaataatagaccagtgatggtaaaaatgccggagtcagtggaaactgctgatgtccggcattttttcttaaaaactttttttataaaaatttcttaacacatctaaaatattccttaaatcttatccaaaacctactttttttcaaaaatattggttatacttgtaagcaaacttatgatgaattgtaaatgagtcagagtgacagtgatgaatactaagaggtatagctatatggaggaaaatgtgaaccagacagagaaagaaatggcagaaaacgaaaaacagaatcagacgggaaaagaagtggcagaaaatgcagaccgggaacagacagaaacgatccggggactgaccgcacagcaggtggcagagcggaaagaaaagggtctctggaataaaaaagcggagtcggcgacaaagacgacgaaagagatcgtaaaatcaaacgtatttacatattttaacctgatatttttagtgatcgcgttattgttaatcggcgttggtgctttccgtgacctgacttttcttccgatcatcattgcaaatacattgatcggtattgtgcaggaaatccgttctaaaaaagtactggatgatctttctattttaaacagtcctaaaacaagggtgatccgggatggcagtaaaaaggagattcccgcggatgaactggtactggatgatattgtggagctttctgcgggtggacagataccagcggatgcggttgtgttaaacggacagttaaatgtcaatgaatcacttcttaccggtgagtcagatgagatcgtaaagaaaagcggggacgaacttctgtctggcagttttgtggtgtcaggaagctgtcttgcacgactgacaaaggttggagaagagtcttacatatcgaaattgacccatcgggcaacccagacaaaagaaggggaacagtcagagatgatccgttctttaaaccgtctggtacaggcagttggtattgtaatcattccgatcggtgtggttctttttgtgcagcagtttgtgtatgcaggtactcctttgcgggacagtgtaacaagcatggtggctgcgatccttggtatgataccggagggactttatctgttagcaagcgttgctatggcggtaagtgccatgcgtctggcaaaacagcaggttttaatccacgacatgaaatgtattgagacgctagcgagagtggatgtactctgtgtggacaagacgggaacgatcacagttcctgacatggaggtagatacttttgttctcacagaagatctgatgaaaacggttccggatggagatgatggtaccagggtttatgtcgatgcaggagacagggaagaacaggaacagaaatatcgacaggtcagagaaaaaatcgctgaatttgctgtaaacatgaatgcagataatgcaacgatggaggcggtcaaagcatactttaagacagggaataccgtgaatataaaaaaagcagacaaagtgtttgcattttcatccaaaacaaagtacagcggaatcatttcagagggaaaaagttatgtgatcggggcacctgaatttgtgcttcgggaggattatgcagagtacaaagaccgaatagaagcgtatagtgagaaagggtatcgtgtccttgtgtatggcagatatgagggaattttagacggacagcagcttacggaaaaagtattgccgatcgcgtttatcatgctgacaaatgcgatccgggaaggagcaaaggaaaccttttcctattttacagagcgtggtgtggagatcaaggttatctccggggataaccctaagactgttgctgaaattgcggaaaaagcgggaatctgcggcgcagataattatgtggatgcatccacgttgacaacagatgagagtatcgcacaggctgtagcaaaatatcagatttttggcagggtgacacctgatcagaagttaaagtttgtggaagcgctgaaagcacagggaagaacggttgccatgacgggtgacggtgtcaatgatgtgctggcattaaaagatgcggactgcagtatcgcaatggcatcgggaagcgaggctgcatcgcaggtggcacagcttgttcttttggacaatgatttttcaaggatgccctctgtagtgatggaagggcggagagtggtaaataatatccagcgctcggcaagcttatacctggttaaaaatattttttccatgctgcttgcagtattttccatgatctctatgatcaattatccactggaaccgtcacagatttcgctgatcagtatgtttacgattggaattccgtcttttgtgcttgcattagagccaaacaaagaccgtatacagggacattttatgacaaatgtattgttgaaggcattgcctgccggacttaccgatttttttgctgtcagcagtctggtattgttttgtcaggtatttggtgtgaacgaagaggacatttcgacatcctgtacgatacttgttgctattgttggatttatgatcttatatcagatcgcaaaaccgatgacggccggacaccgggtactgatggttggaatggtcgccggctggctgttctgcatgatatttgtcagccacttatttgcaatcagggatatctcagggcagtgtatgatgctgactgcggtatttacggttgcagcggagtccattctgcggtatctgtcgaaatttgtggagtggatgcgggaaagtcttttagtgttaaaaaagaaaatacatcaggcaacagcatgaaagaggacaggtattcggtaaggataaaaaccggataaaaaacagccgctccgtttttaaagcagagcggctgtttagcaatcaatttttgtgaaaatgaaatgttgcagttattccagattaaggtgttttttgatgataaccatgcacacgatatagaaaacaacacattcgatgatcgaaaagagcgatccggaaaacagcatagaggaaacagttgtgctgaatgtaacgttttcagtggcattataagttacaacattgacgttgttcatgacaccaaaatatccggtaagtaccaggatgatcgaggatacaatctgacctgacatgtaaaagacgattccggcaccgatggaagctcctactttatgttttgtaaagagctgaccgatagaaccgcttgcaaataccatcaaaaggtactgtaggcaggataagatcatggcaaaaatcatataaatgctaaacgtatggagagacatgccaaacagattctggaaatctaccatgagcatatcaaaatctgcatcaaaggaaaatcctctgtttgccgcacagcccagggcgaagatcgatacaaacataatgatcagggagagcatcagccagcatagggaaacgagcagttttacattaaaaattgacatctggccaaccggcagtgtgtgtgtcaggtatccctgatcagaatacattgtcttataaaaatgtacacacatatatacatagcttaccacgaaaagtgcaaatacgccgagtacataaaataccatagctgctgtaaagaagatctcctgtaactggttttctgtgccggcaggatcactgtcaccgtacatggcaatacagccaaggatggtaacaaacgccataacgccatagatgatgaacattaacttgtatgtgtttttaaattcgtatttaaataattttcctaacatctgaatacctcccggaacagtgcatcgacggatttcccctcctcggcgcggatatcgtccacagaggatgagagacggatctgtccgttctgaataaaaataacctggtctaaaatgttttcgatatctgcaatcaggtgcgttgaaatcaggatggaagcggacggatcgtaattggttaagatcacgtctaaaatgtaatctctcgcagcgggatcgacacctgcgatcggctcatctaaaatatataattctgctttgcggctcatgacgaggataagctgcactttttctttcgttccctttgacatgctttttagagaatcatttggattgatatttagtttttgcagcatatcataggcgcgttcgctgtcgaaatcttcataaaagtcctgaaagaaggcgatgatctctttcacacgctggttcatattcagataactatgatccggcagataggaaatgtggcgtttgctctcgacaccgatcggattttctttgtaataaagggtgccggaggtcggggttaaaagtccgttgatcattttgatcagtgttgtctttccgctgccgtttggaccgagcagaccaatgatatgtccgctctcaatcgaaagatcaatgtggtcgatcgctgtttttccactgaaacttttggtgagatctttgcattcaagtaatgtgcccatcatttttctcctttcatggtctgaccgatcatagccagaatctcattttcctgaaagccgagctgctgcataaatgagagcagttctgtaattttatcttttgcaagtgttgattttaattcatcgatcatggaagtgtcctccgtaataaatcgtccggttgtccgctgtgagaaaacaagaccggttcgttcaagttctgtgaaagctttctgcatcgtgtttggatttaccgctgcctcggcggcaaggtcacggacagaaggcagtttgtctccgggtttatatttgcccgaaatgatatccatttcgatccgttcgacgatctgtataaaaataggacggtcggaattaaggttccatgccattgtatcacctcgtttctttgtactagtgaaataatacaataatacaagaaaagtgtcaagagatttttttgtaaagtattctgattttatgacgatataaattacataacaggagaaagctaaggatggcgtctgattttcaaggaatgaaatacccggaaaaacaggcgccat

SEQ ID NO: 998 - DNA, 18267 bp, unidentified
  source 1..18267: mol_type = unassigned DNA
  misc_difference 1334: note = a, c, g, or t
  misc_difference 1335: note = a, c, g, or t
  misc_difference 1336: note = a, c, g, or t
  misc_difference 1337: note = a, c, g, or t
  misc_difference 1338: note = a, c, g, or t
  misc_difference 1339: note = a, c, g, or t
  misc_difference 1340: note = a, c, g, or t
  misc_difference 1341: note = a, c, g, or t
  misc_difference 1342: note = a, c, g, or t
  misc_difference 1343: note = a, c, g, or t
taatgtatattgacacaatgtttttaatattatatactcatagtaggtattaaacatattttattattattaagggggcaatcacaatgaaaaaaagaatttcactatttttagcaacatctcttatttttagctcatttgcatttacttatggtgcaactgaaaacaatgctactacttacaacagcgttgtaagctctattccaaaaacagttactaaaggtatttctaagacatcaattaacagcatagtttatggcacaagtaacaccggtgttaaagacatagatggtattcaatatataaatgacacccctcttactttaactatccttcctacaactactattgaaaaaacagaagttactataaaaattgataattctaaattttcagctgactctttaaattctgaaccttttgtatactctactagcaaaacacactatggatatgattatcttatgggggataatttagtatcatctaaaggctatgacaaaatattagcacagtatgtaaaaggcgaaggtgaatacaaattaccttataaattggaatacgttgacgaaacaactcttaagctttctctttatcctattagtggagaaaatactttcactcagaatggtaaagctacatcaaatattgcagaatatgttgtaccattaccggtttcagcaacagaaaatgagaatgtaaaattaagtatctcaagtgataatgaagccatttcccctttggaatatacagttccaaacaaaaaagatattactgttactaaattttcaaaagaagatataacaaaaatgaatgataaccctatgtataaagactatattttaaatcattctgaagattttcctacatttgaagattattataattttgtgatggaccctagtattagtccaatgcctcacttccaaccaagatagaactaatttcatattaatcaagattataaaacattaagcaaacaaaacaatagcctcccttgaaaccaaaggaggctatttactatttacccaatattttatttttaataacaaccaacataaataaaggtaaaaccatcattctgcctattcttgttggctgtgttataagtctgtagaaccattcaagacctaatttaatgaatatcttaggtgctctctttacgttaccactcataacatcaaagctaccacctacaccaatagcaacctttacattaaggtttttgatgttattatatatccatttttcctgctttggaaatcctataccaactaaaagtaaatccggctttttctcgtttatatcagctataatcatctgttctttttcannnnnnnnnngaaatagccgtcagccacgcctacaattttaagaccatagtgctttttctccattgcttcctttgctctttcggcaatttccggagcaccaccaaagaagtaaactgtcttgtttgtgtccttaataagttcaaaaacaccctgaacacagtcataaccggctactcttgattttattgggttatttgtaaattttgaaccgtatataatacctataccatcaggaatattcatagctgactcatttaaaatcttcataaattcttcgtctttttgagccgccattaccatttccggattaggtgtaaacaccatagcttttccactttgatgaagaaactttacaattctttcctcagcatctcctggtgttatattctgaaacggaacacctaaaattttgcaaatactcataatacacctctcgactaattacttaatgctgtaaccgcccttaactaagaaccaagcagcctctgaaacattaacacctctgccgtcagctcttggaacaataagaatatgattagctactgctgttgcaccggtttttaagtttgcaccggttgtagcatcaacaacgccatctacaccagctgtgtaaatagtacccttaccggaacggagtataatttcactaccctctgcaccgtagagaaccttgccaacaggaactgaaacaggcacataagatgaacctgatgcctcagtagtagcactaccggtatttatcatatttataacctgacttattttgtcatcaacataactctttgatgcaactgggtcactagcagaacctgcatcagctgcaaaagcagtaccaacaacagcaacaactgtaacggcaatagcctgtaaaccaataatcaactttcttttcatggtcagttaccttttcctttctaccaatttatcatacacaatactatttcttgttttttctaattatatcaaactgttgagcaagcataacatcattttgtcctgctctttgcttcatcaaatcagctttaaacttcaatctagccttatagacttccatattttcaaaaacatcatttatttgttcattaacagcctttacgttaataggagaatgtcttacatctcctgcctcaaccatatcaagctctttaatgtaatattcaactttagggtcataaataataccaagcattggtacatttttgacagcagcaaaaatcaaagtgtgaagtcgcatactaagcataatatcaaaacagcctactatacccaaaatctgtgatggagtataacgtttctgcataatgtatgccttttctttcatataggacataacctttttagataattccaaatctctaggatattccataggaagaaatacaactgtcttaccctctgcaatagcattatcacatacttttgccactttctttacataatcatctccgccaaaagccttagaccagtttctaacggaaactgcaatcatctgttcattatgaggaattttctcctcgtcaagtaacttccaagcctcgtcatctgaaatagattccaaattaaaagctgggtcagcagtaaccataatattaggttttgtaacacctatactctttaaatctgcctcagacaatttttctcggagagttattacgtcaacagtatttacaaccattttcacaagtctgcgattaagtttaccacttaccggtccaataccgttggcgtaaagcataactctctttctgaaaaacttagctattttaataatagtaagatagtacataagtgagcgtgtacttgtgccattctgcaaaagagttccaccaccacttaaaacaatatcgctgtgcttaatagcagacagaacctgaagcatattaaacctctgtacagagttgataccatattcagtttttgtaaattccggattatagcttaaagctgtaatctccacatctttcgccatagcacgaatattggctgtcatagcttgaagaatagcttcatcaccacaattgccaaatccatgatagcctgctattaataccctaatcataggactaccccacaatatattatttattctcagccttattactgctgtaccacatagccattataacacctacaaatatccagaatacactggccattaaaggtgtttcaaatacattttctacccagttgtgggtaataacaccacaaagacctgccataatacctgtagcaagttcctttccctcttttgttaatggggaacggagtgttctaaagctgttgataataacactatacataagcattacaaaggaactaaagcctacaataccactttcaacagctgtctttaaataatagttatccatatagaatgtctttacaacacttaggtctactaagaaacttgtttcatggttcatagcaacagcaccaccaaactgaccaagtccaacaccaagccatggataaaattccaaaattcttaaacctgtaagccaacgtacaagtcggccacctcttaaagaggattcaatatattcaggactaagcatatagccaattctgttgccaacacttggtacaagtgctactacaagaactgccaacacaatccctggaataataagtcttttgtctttaagtaaaatataaataccgatagcaagtacaaaacctatccaagcacctcttgagaaagtaaacacaaggctggctgccatcataagggctaaaaagccaaagataaacttgccaccttttttctttgaagaaaggcacatagaaattgacataggagttgccaaagtaagtaatgaaccaaaaacattaggacttgtaagaatagagaatactcttgttctaacacctgcttcgttttggtcaacccaacctgccggcatttctacaccaataatatactggaacacaccatgcattgccataatacctgtgacaataacaaatgccatggttaccttccttgcactcttttctccatttacaagctgaagaactacaaaataccaaagtatatactgtacaatagctctaaagccttcaagagaaatagagtaatcagtggaattaattataagtgcaaaaagcattacacctataaagataattataggtaaatccattgatgtaaccttaattgtttcaccatttctggcacttatccacttgtatatccaaatcaaaataagaactacaagataaagctcatcccaagctcctgccaaagcctctgctaccaatctcaaagcccagtcaataactgcatagcctgtcaagacgcatatagccacatccggagaggatacaatcattatataagctgtaataccggctactaagccaagaccaacaaccggtcctaagaaaccaaaggcaagaccaatcaaaagacctaatataagtattaaaactgctcttatattgttcacaatttcaccaaccattccggctattcaagggaagaaacaacccatttcacaaactttactaccaagctgttctgaataacctcgttaaaaaccacaccgaagctgagggctataccaaaaataaaaacagctacacacattcctatagtaataggtgtgcaatcacctttcataatcaatgctacaagagaaccaataggtattgccataagcaaaagacctgcaccataggcacggcttttacaatccttacctactgcaaccttagcaaaattacaaatcttgctattgtcaacagccggcttaaaggctctgtatatagcaccaaaaggcttgtccacaattctgcctatagccattacaaatctgtaaataagactactctggtaaaaaggctttttattcacatatttactgcaaatatggtggacaaaactacctctccaacttctataaactgcactaacaaatttttcaagcagactgcatctataggcatttccaaaagtgtgaacaacacacaatatagcccttacaagaatactgccttttaaaacaccgagcataagcacacctcactattcgtccttaaactcaatacctctgattttacagtttgtttctacagtctgtgttttaagaatatagctgtaaccaactcttacttcctgattgcctactttaagtataactgacttaggattaactttttccttaacaacaactgtaacatctttccataaaggatgttcgctgtaaccagccttaccttctgaattagtaccaacataagcagctggagcaacatcaacagaaacaacttctgcatctgtaaaggcattgttagcaacaagcttgtcgcctatatttaagccttcagcaacttccggtacaacaagagaagataaaagagtaacatagcaatactggtcaccgtcagcaccagcttcgctattatcagcatttaacttcttagagcttactctgataataccagcagctgcaatagcaacgattaagactaaaacaataaggtctacaatgtttaccttaccaaaaatcttgccgttttcatcaactaatttcactttacattctcctttataatcttttcataaattttcttatgggtatttgccatagcctgtgaagaaaagttttccttagctctttcatagaagttgacaccgtatcttatacgaatatcatctttatcacagagcatttcaacacattctgccagagccttactatctccggactgaacaaggcaaccactttctccatcaataatcatttcaggaataccacctacagcagtagctactgtagcacacttgcaccttgcaccttccaaaagagcataagggaaactttcagaataagatgtcagagtatttacgtcaatatacttgtaataactgttcatcattacagggtcagtaacctgacctgccatataaactctattttcaagtttattttccttaataaagccctgacactgttgccacatttctccattacccaaaataataaagtctatatcctcacgtttatcagcaataatctttgccatatctaaaaatacatttacaccctttacagcaaaaagtctagctgcaatgccaacatattttttattcaaatcatgaggaacatttatatttttgaaaaatgtatacatatcataagtctgaagttcttgagaaaaatctataccattgtatataacgtcaatacgttcttccttaaaacctctaagcataagcatatatttaaaagcctttgttacagccaaaatatgcttataacgtcttaaagcaaaggcatttataggcgtataaatcaactgttttctcggattatccttaaaatccagcttataatcactgtggagagttgtaatcataggtacttttacgccacctcttatgaaaagagaaatataatttgctctagcaccatgacaatgaaccaaatcacaaccacagttatttataaatttcttaactttactgagtacagataaatcccatcttttttcctgtgggattatagtaacgggaatacccatttccctagcttcctcagtaaaaacgccctccataatacacagtagctctacctcaatattcagttttctcagattatccaacaaggtgagaacgtgggtctttgccccaccggaatctcccccgctgataaagtggagtatcttcattagagtcacatcctagtacattttatcaaaaacctcagctaacttttctgttagcttttttctttcaaagccctctataacgcttctgtttggattaaattcaagtttgccctctacccaagcgttatagtaattgagaatacattcctttattgcctttacatcatctgtatcagcaacaatacctatgccactttctcttacaaggtcagcagcacaaccctttggcaatatagccaataccggtctgtttgtattcatatattcaaaaatcttgcctgtatagaaagcatcagagcctctgccaccaccctcaataaggacaaggacatcactagctacctgatgttctatacaaacattgtgaggcacataacccacaatttcaaactgttcttttaagccaaaagagtcaatttgagcctgtaatttatctttgtgataattgccaataagcttaacaagaagtttattgccatcaattttgccttctgactttaactcacttaaagccttaaagaaattgtccggctttcttcttccgtataaagcacctgtataaaccattgtcaacttgctgttgtttggtttttccttaggcataccctcaaagtcctctacatcataaccattagggatagtaaagaaattatctccggttaatttattatttctaataaaattagctctcattacaggagtgtttgtaacgcacatatcagctgtagttacaacctcgtgttccatttccttttccctcttagttctgtaggcaccgtgaggattatctaaagtataaggattgtttgtccattcatctctgaaatccacaacccactttatgtcagggcgttttttcttaatataaagaccgagaagatggtcgctgtaaggtgcagaagtagtataaataaggtcaataccctctttatcaattacatccataacagccttttttgaaaaatgttcccaaagtctagctgtatcaggaatcataaacttaccaagaaccttaccaggtatacggaatataccctttgcctcaacacattcgtaaggcttagttctgtatattttaactccgtcaggaatatcctttaaaagagtttcatcttttaaaggcatatttccaacttctctggtaaatactactggttcatagccaaaacagcgaagatgttttacaaacttaacacttctctgtacacctgaaccacccattggtggaaactggttggcaattatcaaaacttttctcattgtccgtcacctaataaatagtagtttgcaccagctgctgtaaccttttccttatcccagaagtttctagtatcaaggatattctttacgttcatttcagctgtaagcttagcaaaatcaacatctgcaaactggttgtggtttacacctaaaactacaatatctgcacccttaggagcttcataaatatcataagacttttcaagcttttctttagcgtgagggtcacaaaccttaacagtagcacccttttcttcaagcatagaccaaaggtgcataattggactttctcttacatcatcaatgtttggcttgtatgtaacaccgtaaagtgcaacagtcttaccttcaagaccacctaaaatagtgtcaatcttgttcataacgaattctggcatagaatcgttgttaagtcttgcctgatgaataagcttagcattcttagacttttcaactaagaaccaagggtcaagagcgatacaatgaccaccaacaccaggacctgggcttaaaatattaactcttgggtgctggttagcaagcttaataacttcccaacagtttacaccgagttcttcactcatctttgcaagttcgttagcaagagcaatgtttacatctctgaaagtgttttccataagtttgcacatttcagcagtagttgaagttgtaatgaagatttcaccttcaacaatactttcgtaaactttcttaacttcttcacttgacttctggttaataccacctacaatacggctgttagttctcaattcttcaagaactctacctggaagaattctttctggagagtgggcaactaaaagttcttcgcctaattcaagaccagtttcctttaaaataggaagcattaaatcttcaacagttcttggaggagaagtagactcaagaacaacaatacagccctttcttacgtgtggcactaatgctcttgtagctgactctacatatctcatatcagctgtcttatcttcgttgataggtgtaggaactgcgataatgtaaacatcgcaatcgtcaggacattcagtagtagcagttaaattgccgtcagcaacaaccttctttactaaatctccaagacctggctcctcaataataatttcgcctctgttaagtgcgtcaacagcctttttgtttaaatcatagccaataaccttatgaccctttgatgcaaacatagcagccgttggcaaaccaacataaccgataccgattacacaaatacttttcatttgatttatcttcctttctttgaaattacttttttattatcttattcaaaacgaggttagcttcatttttaacctcaccagaaatatataatactaatccgtatactatcataccacaaaatacaaataaaaccaaattaattttgttaaacggcataaaaattttcaaaatatatattgccaaatacattattccggcagaaagcaatattctgaaaagacttttgccctttaatttccatcttaactgacttcttgtgccatatcttgcaagcaagaaataaacaaagaagccaataaatgttgtaacagatgcaatataatagcttcccaacaattttattaaaataagatttaaacctacatttacagcaccacctataagtgagcgtttaaaaatagcctttgtatttgctgtaagttcccatggcttaattgaatattcagtaagacctaagaacatcataccgaaagctacccagaacataatagagtgaccctctacgtatgcctgttcgaaaagtgctgttgccataacatcagaaacagcagccacacctactgtagccggtactgccaaaagaagatacattctaacagcctcgcttataagtctggctgtagcgtccttatctccttctgcccaagtacgaagtattgtaggataacttcctctcattacagatgcacttaaaagagtaaaggctgtagcaataagagaatagtttgtctgataaataccggcagctgatgcaccaagtacagcagtaataatataaatatcagacttgttgagaactgaagtagttatcatattacccattaaaggagtgccatagtccttgagttcctttaaaatttcttttgaaccctttccaccctttaaatacttgaatattttaagtcttgtcataccaataagtgatgtaacaccgtcagtaataaagtaacttaagaatatccattcaactctacttccaaagagcttacagaaaagccacataagacctaacttaccacaaacagtaataaggcttaaaagcaaattaagtttagcctctcttacagctgcaagcatagcaatcataagctgtgaagtgttgtaagttataaaccataaaacacctaaaatcataagtgcatagctatagttttctgtaaacttagcaacaaccggtatattaccaaagaaagttttaacaactaatataataataagtgctattaaggcaacacctacatttacacttttccaagctgaaaatactgtagagtaaaattccttttgctgatttaaaatatcgtatttgtttacgtatctcaaaacagactgtacaagccactgtatggctaccatacctattgtagtaatggcaatgtttactgttgagtaaagacccatttggaaagtcgcaaaaagataggtcattacagacattgtaactacgcctacaacgccctctataccctttgctaacatataaataaccgtatcttttgccattgcaccttttttacttgttcccatattttttcctttttcctaattattttacgtttacaaattcgtaatacaaatctttatcattaccctttaatttgagatactgtaaattacttgtatttcctatacctgcaaggttaatgtatcttacaccgtcctttatttctgtgtaattgctttccccaactgatgaaataacaattacattcttgttgtactgatgagctgctgtttcaaaaatatcgtgaagtgcatctctttcctttgtgttgtaagaacctgaaccccaaaggtatctatccattaatactacaacattctttttgcttaaattgtccataaagtcctgtaaatacttgtactgttctggatttgctgatgccggactaccattaccggtagcaacatttacaaatgagaacttgtttgtgccatttgtagcataggcatttttccaaattactgccggaacacctgtagtattgcttacatttgtagcacctgcaaaggcaatagccttagcaccgttagacatctgtgtaagaactttacttaatgtagttgaattgccaccacttgaacgaccaaaagcagaaaccacttcatagtcagaaccagtaacactgtctaaatcgcaattccagtaatcctttacactgccaccacttgttatgcctgaacctacatttgtaggagccataactcttaaattatctacataaactgtacttgttaaattgtcggttgttgtattaagtgctgatacatatattttatcaagagttactggtgatgtcaaatcacttggtatagcaacctgaccttcgtgccattcgctgtcgtccattgatgtagtaaggtcaatattgtaactcttgcctgtgttatcctttactaaagctctcaaaagtctgcctgagccgtcacccttgtagctataaaggaagtctgttgtattgtcagggaatacaataggcttttgttcaaaacttgcataaacagactgagttgttgtagagtttgccttaaatgtagcacttattttaagtgagctattaccgtcagaacctacaccggaaattacatttgaactaccggtaagacctaaatcctctggatagtaatacattgtcatatttcttgctgactcaaaactgtttatggcaatatatctcttaccaacaccaatagtgattgaagaagatacaccctttgctgtagctgtaactttggctacaccttcgctttttgctgtaaacacaccatttgaaactgtaccaactgatgtatcatcaacttcccagtccatatcgctagtatcggcatttacgtcataaccgtctttatttacaaacttaacagaaagatttgctgtttctcctgtgctaagggcatatttatctgctgaaagtcttaaacctgatacaccctcaagaactgtaacatcaatagttccacttatatctccatatttaacagtaattgtacccttacctgttgtactaggtgtaaagacattatctgtccatttaccgtcaatagttgatgagaaagataatttcgacttatctacattcatagcctgtaacttgccgtcataaacttccacatttattgtgtttcctaagccttggaaaagatagttcttctcactatcctgaacatatggctttactctacttggaacaccactttgaccagtagcttcaatacctataccattggcaacagctctcaatgaaccctcacttggtacatttacaactgaaggagaagttgtaccctctttctgtacaaccattgttgtagagccaccaccgtcaaagtgaatagcatcataagcaccgtattctttcataatcttggcagcctctgcatgagtagcaccaataccgtttttacgaccgtcaatacaaacaatataaatctttgacttgtccttacttacaccaaccattgttcttgggttacgagcattctgaccaataataagaccctgtgaaacatattcgccatttcttaaaagctcgccaccaccacttataccaaagtcaatattgtctattgtctttgttggtctgaatacaaaggtttcattttcgctaaaatcagcactcataccaactgaaaacttgcttaaattggctgccgctgtagccttgttcataacaataataaagccgtcttccggaatatctacaacttccttaggtccagcaatctttgtaataaccttgtttgatacaactattttagaaagtgttgaatatgttgcatcaagctgtttactgcttgtcattgtagttctgtcaaaatatacaggctttgaaaaatctgtcattttgtttttagcacccatagcaagagaaacgccacctgctccataaaagcctattgtagactttacatagtcaataaaaggcacaccctcattatcaatataaatacctgcatatttgttctcactaccgttgtagtaattctgagcagataccatttcaccgtctttagcaacctgacccatactagacataggattgccagagccaaagaaatcaccatttactgctgcaataacattgttgtctgtagccaacttaggtacagtagttttgatacctacactgcctacagactgtataacctttaaagctgtatcacttgaatttgcgtccattgtaagtacataaacgtccatccaaccagccttgtaaagtcgactgcttttttcataggttacaccttctgcaatagtctgtatatcctttttttcgtaatatacaccatcgcctaaggcaaaggcattcattggcatagcacctattgtcataactgtagccagcacaacacctattatcctatgtagccttttatttttatgcttcatattaaaatctcctattctataataaatccgtcatcaattataaccctattacatagcaatttcaattaaatacagacattttaaaataattgtaaaaaacacaaaacaaaaaagactgctgtcactttacgcaacagcaatcttctcaaaataatcattatttatttttaatttggcattaaaaatgttgaatccaaagccttttgtaaaatataagaggcatcttttgatgtcaactgtccatcattgtctacatcaacatatttcatataattttctactacatcttctatagccatcttatcaccagtaagcactttctgtaaaactaatgcagcatctgtagcatctataacaccactattatcagcatcacccttaataggtattgtgatgtatattttctttgaaccttcaggatacttttcatacttatcagccacactgtcttttacgcaatacacagtaaaagacttacaagcaaaaaacgcatcctctcctatacttgttacactttctggaattattatataatctaaatcatagcagccttcaaaggcataaacttctatcaatgttactccgtcaggaatttctatactttttaaactgacgcaacgagaaaacgcattataccctatacttgttaatttttcaggtaacttcaaagaaactatacttctacaatgttcaaatgtactttcttgaatgctagttattttttccggaagcactattccagttaaactctcacaacgataaaaagctccttttccaatacttgctaaactatcaggaattgttatgtttatcaagttgtaacaatcactaaacgcataatctcccagttctgttacaccatctggaattgttatacttttaagacttctacaatttaaaaacgtagacttccctattctttctacactgcttggaattttaacgttctctaattttgaacaaccataaaatgtatattcttctatttcagttataccattaggaattactatatctgctatatttgaacaccctgaaaaagcatattctcctatacttgttacattttctggaattgttacatttgttaagtttaaacactttgaaaaggcattttttcctattcttgttacactatttggaattgtaatacttgtcatattttcaaagtataaaaattcataatcccctatagatgttactccatcattaataataacagttttaacatttccacttataggtaaaaaaacagagtcattataattataaccataatcataatcatacatatctccactgccacttatagtaagcacaccatcgctatcgaaagtatatgtaacattatcaccacatttaccactttcaacaataccgtcagcctgaacagttacagcctcatcaatattttcaacagctggactttcctttgctgatactccctctacagcctgttcttcctgtgcaactgtagtctgttcctctgttacttcttcctgaacagcctcactttgtgtaacttcttctgttagttcttctgagctttcttcaactgtttcttctgaaacagcttcttcctgtggcacaatttcttgtgacacttcctcctgaaccacttcttctgcagtttcctgtacaggttcttctgcataaactccacttaaacttgtagctgtcattattgctgacaatgcaacgcctaaaattctctttttcattttttacgcccccttaaaagcaccttatctttatagaaatatgacatttttcgacaaatttctttttttatcttatgttaatattttaacactagtatctatattttgcaaacatatttaacgtttttcaaagaaaaatattttataaaaaaaagactgttattgaatttaatcaacaacagtctttaaaattaatcatttacatgaagtctaaccatagctcttttaagtgcattttcagcacgaactacgtctaagcccacatttctttcagaaagtcttctttctgctctttcttttgccttttctgctctgactttatctatttcgtcagaccattcagcaatatcagtaagaatgtttacaccctcgccatcaacttctacaaaaccacctaagacagcagctcttttttcctcattttctgaaattttcaatttcaaaacaccgtaatctaatacagtaacaaggggttgatgtcctgccataataccaatatcgccgaccttagtacgcataataaccatttctgcctctccgtcatacataatacgggaaggagtaacgattttaagggataacttattcataatctacccccttactttttagctctggcaactacctcatcaatagtacctgcgttaaggaaacagctttcaggaatatcatcgtgcttaccctctaatatttccttgaaacctcttacagtttcttctacaggaacgtaaacaccaggaatacctgagaatacttctgcaacgtggaaaggctgtgacaagaatctctgtatctttctagctcttgctacagttaccttatcttcttctgataattcatccataccaaggatagatataatatcctgtaattcattgtacttctgtaatgtagcctgaacacctctggcaacttcatagtgctcctgacctacaacggctgggtcaagtattcttgatgtagactctaatgggtcaacagccggataaataccaagctctacaatagctcttgaaagaactgtagttgcatcaaggtgggcaaatgtagtagccggagccgggtcagtaaggtcatcagctggaacatatacagcctgaacagaagtaatagaaccattctttgtagatgtaattctttcttccaacgcacctaattcattagcaagtgttggctgataacctacggctgatggcatacgacctaaaagtgcagaaacttctgaacctgcctgtacaaatctgaaaatgttatcaatgaataaaagcacgtcctgattttctttatctctaaagtattcagccattgtaagacctgtaagagcaattctcattcttgctccaggtggctcattcatctgaccgaaaacaagggctgtcttatcaataacccctgattcctgcatttcataataaaggtcattaccttctcttgttctttcgcctacaccactgaatacagagtaaccaccgtgttcagtagcaatatttgtaataagctccataataagaacggttttacctacaccggcaccaccgaaaagaccaatcttaccaccctttgaatatgggcaaagtaagtcaacagcctttataccggtttcaagcatttcagcacttgtagcctgctgtgcaaagctaggtgcttttctatgaataggccacatttcttctgttgttggcattggcttatcgtcaataggttcgcctactacgttaaacattctacctaaggtttcacgacctacaggaactgaaataggcttacctgtgtcaatagcgtccataccacgctttaaaccgtctgtagaactcatagcaatacactttacaacatcgtcaccaaggtgctttgatacctcagcaacaatctttctatcgccatcgtgtatttcaatggcattattaagggcaggcatatgccctccggaaaattttatatccaatacggcaccgataacctgaactatcttgccgacattttgttctgccatattttcactccttaaaaaattttaacttaccctatacagctaagtagatatatatagaattttattctaatgcgttactaccacttacgatttcagttaattcctgagtaattgcaccctgtcttgctctattgtaatgaagattaagagtatcaagcatctgggtagcattatctgtggctgaatccatagcagtcatacgggaagttaattcgcatacggaggactctactaaagcaccgtaaataactgtattaatgtattttggaataacatatgctaatactgtttcgtcatctggctcgtaaatagtaagtgtaagattatccttttcactttctcccaaactttctgtatccaaaggtaaaagacgcataaccttaggttcgctggctattgtagaaatatattctgtatagacaagatatacttcgtcaacatccccattctgatacatctgtgttattttttcgcctattgcccttgcatcttcgtaagtaggtttttctgaaattccagtatagttctgtgcaaagtcacaacccttattctttaaaaattcaaaaccttttgaacctacggtaatgtaagaagcactttttccctctgtaatacctaaagctgttttacaagcatttgtgt

SEQ ID NO: 999 - DNA, 11709 bp, unidentified
  source 1..11709: mol_type = unassigned DNA
  misc_difference 10017: note = a, c, g, or t
  misc_difference 10018: note = a, c, g, or t
  misc_difference 10019: note = a, c, g, or t
  misc_difference 10020: note = a, c, g, or t
  misc_difference 10021: note = a, c, g, or t
  misc_difference 10022: note = a, c, g, or t
  misc_difference 10023: note = a, c, g, or t
  misc_difference 10024: note = a, c, g, or t
  misc_difference 10025: note = a, c, g, or t
  misc_difference 10026: note = a, c, g, or t
ctatttgatatgtttttcttccagtttcaataataattctctcagtaccttcaaggctaccgctgtagacgctccactggcatccagaagcggtgacagttcattgatgtcgcatcctacaatatttaactctcctacctttaaaatcgcatccaaaagctgaaggaaggtcacgccgcctgcctccggtgttcctgttcccggaaatacggaagggtccaatacgtccaagtctaatgtgaaatacaccggcttgccttttaacttccggattacctcttccagtccttcaaaatcaaacttatgggtaatcacatgttccttaccccactgaaactctgaccggtctccactgcggataccgaactgatagattctgtcatcacccacaatatcccatacgcggtgaagcactgtggcatgtgacagggtagcacccagatattcttctctcaggtcagcatgcgcatcaaaatgaatcacatgcagttcaggataatgtgctgccacacttctgactgcaccgagagtcaccagatgctccccgccaatcattaatggcagcttgccagcctgcattacctcttctgtaaaagctgtaatatccgccaatgccttattggtatcgccaaaacacagctccagatcgccaccgtcaaatacagccgcatcttccagatcaagatcctgataagggctgtaagtctccagtccataagattctgctctcatggttctgctggcgaaacgtgttcccggtctgtaagatgtcgttgaatcaaaaggcgctccaaagattacaatacgggcttcgtcaaattccttatcgcatccaagaaaagtctctacatttctctccattttctccacatcctgtttaattaaaatttttattttccacatcctcaagcatttcttccacataatttggaagtgcaaatgctcctgcgtggatttcttcattataatatctggtctttagaccatatgctttccagtcttctttcctctgatccttgattggatgatacttctttgaggcgaatccaaaaagccagtgaccggatggatacgttggaatatgcgcctgatataccttggcaatcggaaaagactctatgattctcttatgtgccctctgcatcgcataggcatcatcaggataaaaaggactctcatgctggtttaccataatgccatcggcttttaatgctttattacagctgccatagaattccttggtaaaaagtccttcacccggtccaaaaggatctgtagaatccacaaggatcagatcataggtatccacatacttcctgataaagcgaagcccatcctcataataaagcttcacccttgggtcctggaatccacaggctgtctgcggcaggaactccttacacgcctttaccacttcttcgtcaatctctaccagatcgatctcttctatctgcgggtatcttaccagctccctgactgtgccgccatcaccgcctccgattaccagtactttacgaacactaggatgtactgccatcggcacatgtaccatcatttcatgataaataaattcatccttttctgtcagcatcatatagccatccagtgtcaggaatctgccaaattccttagattcaaaaatatcaatcctctgaaactctgactgactcgtatagagctgcttatctacctgtattgagaacttcacatgttctgtatgattctccgtaaaccacaattccatatttatctactcctcactaccatatatttttagatatttttgaaacgcaacattacatatacagaattgtaaagctttaataaatgcataaacaggcactgtatagccgtcacatttcacaattacctaatatatgtttttttcacatttatcttgcagcggaacgaataccttccattacattgagtcgatttacttccatatcttccggtcctgtcatggaacagcctttttccttggcatatacgatataatccagaatatcctgtgtgatcaactcgcccggtgcaagaatggggattcctggtggatagcacatgacgaattctgcacataccatgtccttacagtctgcaagaggcagagactgcttgggtgcatagaacgcttcctgtggagagtaaataacccttggattgatatattctgcggtcatctgtcctgccctgtcttttttatacaatcgcctgatctctgccagcgcacttaccagcctctctatatcccttggtctgtcacccacagatacatacgccagaatattaccgatatcaccaaattctgtctgaatatcatactcatcacgcagaagatcataaacctctattcctgcaagtcctaccgccagtgtatttacagaaagcttcgttacatcaaaatcatatacagaatcgccatttaccagttcacgggaatatgcataataatcaccgatctgattgatttccttacgggcatattctaccatctctgttactttatcaaaaatcccctgtccatgcagcgcaagattccttctggaaatatccagactggacatcagcagataggaaccactggtggtctgtgtcagattgatgacctgccgcacataatcctcattgatatccggtcccattaacaggaaagaagactgggtcagggatccaccagacttatgcatgctgaccgctgccatatctgcccctgcctccatagccgtcattggtaaattcttatcaaagtaaaaatgcgttccatgggcttcatctaccagtactttcatgccatgggcatgggcaagctgtgtaatgccttttaaattagagcatatgccataataagtcggattgttgaccaatacagcctttgcgtcaggattctcctcgattgccttttgcaggtcagatatcctcatgccaagggcgattccaagctcgtggtccatatcagggttcacatacaccggaaccgcaccgcacagaatcataatattaatcacacttctatgtacatttctaggcagaatgatcttctcaccacgcttgcagacagacaagaccatactctgtaccgcagatgtagttcctcccaccatgaaaaaggcatgggctgcgccaaaggcatctgctgccagctcctctgcttctttgatcacagaaacaggatggcagagattatccagcatcttcatggaattgacatctacactcaggcatttctcacctaagaatgcagtaagatccggattgccttttcccctcttatgccctggcacatcaaaaggcaccagtctctgtgtcttcattctctctaatgcttctaatacaggagccttactctggtctaacttcattttcacattatctccattcgttaaaagatattggtaccgctgaatatttcaatcatttcctgcctcagattgttgctgatctgcagacgggtcttaggtggaatctcataaatatcagagttgaacagataattctgtaaatccagctccttgatgagcatcttggtatggaacatattcgcctgatatacattgatatctaccgcatcatatctatccaaggtattcttatcaatgtaatcctggatagatgtcatatgatgatccatgaatatcttcttaccttctacatttctggtaaagccacgcaccctgtaatccatcgtgataatgtcggagtcaaagctgccgattaggaagtccagtgtactaaggggtgtgatttcgccacaggttgccacatcaatatctacacggaaagtcgcaatattcgtttcaggatgatattctggataagtatggactgtaatatggcttttgtccagatgtgccacaatctcatcattatgattagatagatgcagcgtatcttcaaaagccattgctgcactggctgcgctgtcacagcctgacggtatcatattatcctctgctatgagaaaggtcacgctcgctccctgtggctcataatcctgcttggatacattgagcacatgggctcctatcatttctgtcacatggaacaagatcttagtaagacgctctgaattgtactgctcatcaatgtaagcaatataatccttctgctctcttgcgctttttgcataacagacatcgtagatgttaaagctcagagattttgttaaattattaaatccatataatttcaatttgccttccatgaatcttacccttcctcatatatgttttatacttttcaaagcctcatttacaaaataagacaagtgagtaccgcaccgatactcacttgtcaatcttttcacatattatatacagtatgcacaggaaaaatcctatgcgccttatgatacagtgattagagtctatatagcaaaattcgtttacttttactactcttattgattttcacaagtgggtcgtgcgtatagcacatggtttatagtaaccaacttataaaatacacatagccaatcagatttagctacaaatacggacataagtccaatcaataaggctccaatcgccttaatacttgttgttatattaaatattctcaacgagttttattatagggtataacatactggaatgcaatcccttttttgcaaaattcatgcaaaatctggaaattaccattacagggtcatcagatagtaattaggcaacacaccccatttcaggtaaacgctagttcaatactccacaacagagcacaacatacaaattctgtacaaaaaaaccggggaagcataaacttctccggttttctatccgtttgagcactataaaaataaatttactgattagttagcctttgcagccttagcagcttttaactgctctgtcagcataggaacgatcttgtttaagtcgcctacgataccgtaatcagctacatcgaagataggagctgtctcatctttgttaattgcaatgatgatatcagattcttccatacctgctaaatgctgaatagcaccagaaataccgattgcaaagtatacgttaggacgtacagtcttacctgtctgacctacctgcaggtctttgctcttccagccagcatctacaactgcacgagagcagcttactgtaccgccgatagcttctgcaaggtcatcaagaagcttgaagttctcagcgcttcctactccacgaccaccagatacaaggatcttagcatccatgatatctactgtctcagataagttcttaactactttcaggatctctacatacttgttatcaggtgtgaatccaggattgaactcttcgataacagccttagcaccatcgttcttagaaagcttctgcataacgccaggacgtacagtagccatctgaggacggaactctgggcaagcgattgtagcgattgtgttaccaccgaaagcaggacgagtcatcagtaactgattatgcttctgctctcttccaggaatcgggttgatagggaaatcaccgatctcaagggatgtacagtctgctgtcagacctgtatggattcttgcagatacacgaggaccaaggtcacgtccgattgctgtagcacctactaataaaatttcaggtttatatttctcaacaacagatgctaatgcatgtgcataaggctctgttctgtattcctttaattcaggatcatctaccaggataactctgtctgcaccatatgcagcaagttcatctgcaagattcttaacaccactacctactaatactgctgttacttctgttgataatttctcagccagtcttttgccttcgccgattaattcaagtgcgataccgcttaccttgttatctacctgctgagcaaagacaaacacgcctttatattcttctaaattcatgttgaacctccatatttaatagcacttcgtatgttctaaattaatgcattattaaatcacatgcttctcttttaacttgtccatgatataagttacagattcggaaggatctaaagtaaccttctcaccctgtccttttcttaccttatcagatgctctagcgatctgtgtaggtgaacccttcagaccaaggttagaatcttcaacatcctttaagtctgctctgccccatacggtaatgtcagccttgaatgcatcgaaaattccgcctggtgtcatataacgaggctcgtttaattcagcaagtgctgtgattaagcaaggcattttagcttttaatacatgatatctgtcatcatactgacgctcaacgattacgctgtcgccttctacttcgatcttctgtgcataggagattacaggaattccaagatgctcggaaatctgagggccaacctgtgctgtatcaccatcaatagcctgacggcctgtgatgatcagatcatagtcaaggttacggatagcgcctgcaagtgtctgggaagtagcccatgtgtctgcaccaccaagtactctgtctgttacaaggattcccttgtcagcgcccatagcaagtgcttcacgaagtacttcttctgccttaggaagacccattgtgataacggtaacttctgcaccgtactgatcctttaatcttaatgctgcttcaagacctgctttgtcatcaggattcatgattgtaagcatagctgctctatcaagtgtaccatcaggattgaacttaacgccaccctttgtatcaggtacctgtttaacacatactacaattttcattgttattctccttatcaaacttaatttagggttagttacatcttactttaacagatttgcagagataaccattctctgaacttcgctggttccttcgtagatctctgtgatcttagcatctctcatcatacgctctacttcgtattctcttgtataaccataaccaccatgtaactgtacagccttagttgttacttccatagccatctctgctgcgtataacttagccatagctgcttctacgttgtaagatgtcttatgatcctttgtatactgatcctttgtgcaagctgccttgtataccatgaactgagctgcctgagcctttgtagccatatcagcaagctggaactgtgtattctggaactgtccgatagcacgtccgaactgttttctttcttttacatatgcgattgttctctctaatgcaccttcgccaagaccaagtgcctgagcagcgataccgatacgtccaccatccagtgtatgcattgcgataccaaagcccttgccctgagcacctaacatattttccttagggatacggcaatctgtgaagatcagttcgtatgtggatgaaccacgaatacccatcttcttctcctttgtaccaaagctgaatccaggtgtgcccttctcaacgatgaatgcggagatttcctttgtcattctgccacgcttctcaaccatacctgtgatagcgaagattacatatacgtcagcttctttaccgtttgtaatgaagatcttggaaccgttaagtacccattcgtcaccatctaatacagcctttgtctgctgtccctgagcgtctgtaccagcgccaggctcagttaaaccgaaagcaccgatcttcttgccgcttgcaaggtctggtaaatacttcttcttctgatcttctgtaccgaatgtaagaataggatcacagcacagagatgtatgtgcagatacgataactgctgtagtaccgcataccttagctaattcttctacgcacatagcatatgttaaaatatcgcagccctgtccgccgtattcctttggtacaggaatacccatgaagcctgcttttgccattttctctacagtctctctagggaaaacttctgtctcatccacttcaattgcaagaggcttaacctctttttcagcgaactctctgaacagagctctcgccatctcatgctctttacttaatgtaaaatccatgttaaaaatcctccattatctataatctcataaatccgaccaagggagctgtcctaccagctccctccgccggtcttatattaactcttatttactgtaatcgtagaagccaacgcctgtcttcttaccaagcttacctgcacgaaccatctttctaagaagtggtgaaggagcatacttggaatcgcctgtctcagcatagattacttccatgatagcaagtacgatatcaagtccgatgtaatcgccaagtgctaaaggtcccataggatgatttgcaccgagctgcatagcaacatcaatatccttaacgcttgcaacacctgctgcatatacgttgattgcttcattgatcatagggatcaggattctgtttactacgaaacctgctgcctcgttaacctctacaggtgtcttaccgatctctgtggcgattgccttgatcttctcaactaattccttaggtgtattagcacctgcgataacttctactaacttcattctgtcagcagggttaaagaaatgcatacctactaaaggacggtcaagacctgcacccatctctgtgatagacagagaagatgtatttgtagcgaagatacaatcaggttttacaatgtcctgtaattccttgaatgttgtcttcttgatttccattttctcaggagcaacttcgattaccatatcacaatctgtacagatatcctttaagccagttgtgatcttggcagcgattgcgtctgccttttcctgtgtgatcttttccttgcctacgaggaagttaagattctttaagatcttagccttaccgccatcagcaaattcctgcttaatatcacataagcatacttcatagccatcggtcattgcaaaagcctgtgcaataccggagcccattgtaccagcaccaataatacctactttcattgaaagttcctccttgtattatgaatcatatattttaatttagttgaattagcaattcttgaatggctcttttaccttttccttattcttgtcaaggaagaaagccataccatacttctgatcttctgtctcgaagcagtcaccgaagagcttctcttcgattacgattgcttcatccatatctgcgtctaagccttcgttaatagccttcttgcagttacggacagcgataggagcattctttgcaatagtagctgccatcttctctgctgcaggcattaactcttctgcaggatatacagcatttacaagaccgattctgtatgcttcgtctgccttgatatttcttgctgtgtagatcatctgcttagccataccagcacctacgagacgggcaagtctctgtgttccaccaaatccaggtgtgataccaagacctacttcaggctgaccaaatactgcattctcagaacagattctgatgtcacagctcatggaaatctcacatccgccgccaagtgcaaagccgttaactgctgcgataacagggatagggaatgtttccagcttgcggaacacatcgttacccttcttaccgaaagcttcgccttcagccttggttaatgtgctcatttctccgatatctgcacctgcaacgaatgacttagcacctgctcctgtgaggataaggcatcttacttcgtcaaggtttacagcatccagagttgcgtttaattcatcaagtacctgagaatttaatgcattcaaagccttttcgcggctgatggtgatcttaccaactgcgccgttctgctcatatactatatattccatgttcgaatctccttaatattagtctctctcaacgattgtggagcagcccataccgccaccgatacaaagtgttgcaagacccttcttagcatctctcttctgcatctcatgaagcagtgtaacaaggatacggcatccggaagctccaacagggtgtccaagtgcgatagcaccaccgtttacattcaatacatcattggagaatttcagatcagcctgtactgctaatgactgtgctgcgaatgcttcgttagcttcgatcaggtcgaaatcattgatatccataccagtcttggcaagaaccttctttgtagaagctacaggaccaacacccatgatagaaggatctacaccgccannnnnnnnnncaagagcaccagctacccatgtagccataggcttaacacctaattccttagctttctcttcgctcataacaacgattgctgctgcaccgtcattgatacctgatgagttagctgctgttacgattccgtctggcttgaatgcaggacgtaacttagcgataccttcctttgttgtgccaggacgaggaccttcatctgtatctacaatgattgtttctttcttcttcttaacttctacaggaacgatttcatccttgaacttgccttcagccatagccttctcgcatttctgctgtgaccatgctgcgaactcgtcaagctgttctcttgtaagaccatacttctctgctacgttctctgctgtgatacccatatgatagttgttgaatgcatcccataatgcatcgtttaccatggtatctactaatgtagcattgttcattctatatccataacgtccctgcatagcagcgtaaggagccatagacatgttctccataccacctgcaacaacgatatcagcatctcctgccttgatcatctgtgcagccatgtttacacagttcagaccagaaccacatacaacgtttactgtaactgctggtgtttcgataggaagtccagcctttaaagctgcctgacgtgctacgttctgtcctaaaccagcctggataacacatcccatatatacatgatcaacctgctcaggagctacgcctgctcttttaagagcttccttaataacgatagaaccaagtactggtgctggagttgtgcttaatgcaccgcccattgtaccgattgctgtacgacatgcgcctgctaatacgattttctttgacattgccaattcctccatttgttttaaaagagtttctgtttttcgcttgattgttatttttatcacaatcattgttattattttatcacattgttaaaaaaaaagcaatctatttatccctgatattcgatattttattaacaaatttttatcatattttttgtggattattcagggtgctctgaaatgctgttactcatgcttttttcataggcttctacctcaggatcgcgcattttgtactgtcttttccattcctttgtcgcatcatcacgcacgactttacttctgtgtgcgtgcaaaaaacgtgcaagctggtagaaatctatccatatctcattatcgcactctttctgcgactcatcaaaaataagctgtaagcctgcgtgcagatgtactgtcttgatattattcacattctccgtatcactgtaaccggtatgccccatatatccgatcacatcacctgctgccactacatctccttcctccagaccttctgcataaggtctgttctgacgcagatgggcataatagtaatatcttttcttatcaaaactgcgtataccaatacgccagccgccataccggttccatccaagtgcctctacataacctgactcggttgctatgatcggcgttcccacaagccccatcatatcatgtcccagatgcggtctgcgatatccgaagcttctggctgcgccaaaatcatcataatcctgataatcaaagcccgccgctatgggagaataggccttgagaccatattgacgattccattttacgacaccttctttagtctcttcctctatttcatattcccccagcatgccactcaa

SEQ ID NO: 1000 - DNA, 27179 bp, unidentified
  source 1..27179: mol_type = unassigned DNA
  misc_difference 14947: note = a, c, g, or t
  misc_difference 14948: note = a, c, g, or t
  misc_difference 14949: note = a, c, g, or t
  misc_difference 14950: note = a, c, g, or t
  misc_difference 14951: note = a, c, g, or t
  misc_difference 14952: note = a, c, g, or t
  misc_difference 14953: note = a, c, g, or t
  misc_difference 14954: note = a, c, g, or t
  misc_difference 14955: note = a, c, g, or t
  misc_difference 14956: note = a, c, g, or t
cacctgaagctactgagaagtaaggcttgcctgccaatacgcgctctttcttgtacgtaccggctacaggatgctggaagcgggtcgggttggtagagttacccgtgatagatacgtctacgttttccttccacaggatagccacaccttcgcgcacatcgtctgcaccgtagcattttaccttagcacggggaccgtctgagtaagcggtttctttcactacgttcagttcacccgtgtaatagtcgaatttcgtttgtacgtaagtaaagccgttgatacgtgagataatcatggcggcatccttacctaagccgttcaagatacaacgcaacgggttcttacgaactttgttggccatttcggcaatcttgatggcaccttcggcagcagcgaaagattcgtggccggccaagaaagcgaaacactgcgtctcttcgcggagcagacgggctgccaagtttccgtgtccgatacctactttacggtcgtcggccacagaacccggaatacagaaagcctgcaaaccgataccgatagcttcggcagcgtcggctgcattcttgcatcccttcttcaatgcaatggcagaacctaccacgtaagcccactttgcattttcgaagcaaatcatttgggtttcttcgcaagtcttgtaaggatccaaaccagcttcttcacagattttgttagcctcttcaatatctttgataccgttttcgttcaatgcagccaaaatctgcttgatacgacggtcctgactttcaaatttcacttctctaatcataatctggttcctccttattattctttacgtgggtcaatagatttaacaattccctgttccggttttgtgcggccgtatgtacctgttacagacttcaaagcttcgtctgcgggtacacctttcttgatggcctccatgaatttacccatgtgtacgaattcgtaaccacatacctggtcgtccttgtcgaggaacattttggtgatgtaaccttcagtcaactccaagtaacgtgtacctttggccaaagtaccataaagggtaccggtctggctacgcagtcccttacccaaatcttccaatccggcaccgatcatcaaaccgccttcagagaaagcagactgtgtacggccgtaaacaatctggaggaacaattcgcgcatggctgtgttgatggcatcgcaaaccaagtcggtgttcaatgcttccagaatcgtcttgcccggaagaatttcagaagccatagctgctgaatgggtcataccggaacaaccgatagtttccaccagacattcctggatgacaccttcttttacgttcagcgtcagtttgcaggcaccctgctggggggcacaccatccgataccgtgagtcaaacctgagatgtctttgatctcttttgcctgtacccatttgccttcttcaggaatgggggctggtccgtggttcgggcctttggcaacacaacacatgttttctacttcgtgtgaataaaccataattatactaatttattataggtaatataatgagattcttattaaaaaccttcatctttttgcgctgcaaagataatcaatttttagtatttcattaaaggccgataccaactttttggggctggtttatgatttttatcacttatatgaggtatagggcgcttgggcggatattggggggattgcttttccgcaattttacatgagaatgaaaaaacttttaaaatagaaatgccaaatgaattattttttatatttttgccgaatgattatcccttcttgtaggagcggccatttttgagtgtactttcactttatgtacaaaagcgatgccgcatcggagggaagcaataggcaaaccgaggaacttaaattttcaggaatgtctgtttgtttaatgtaaatatctaaaagccagtaaaatatgtgattttaccggtatggtcatcaagtatttatgagtgagatagtttcatctcgtagggggatgggaagccatgctgtacgttggtatattctggttctgcccgtgaggcacagaggagatccggcccgtgcattgcgtatggaggcaagccggagtgtgaagagggatgaagcgatgttggaatattttgcacctaaatatatagaagtgaaaagaaagggtggggaattcgtgcgtacggaacgacccttgctttacaattatgtgttcattcgttctacggaagccgagatttaccgaagacagcgaagtaccctgcatgcctatagttttttgccgcgcgtgcatagcggtggcgaaagtcattatccctatctttcggatgctgaaatgagaaaccttcgttgggtggcggaagcataccgtggcgagcttccggtgtatgtgccggagtcaggacgcctggtgaaaggcgaccgtgtccggattacggaaggggagtttaaaggagtagaagccgtggtggcagtccagcccggggccgggcataaggatgtcgtggtttgcatagaaggatgtttgtgggtgcctttaatgcgtgtgtctgccggacagtatgaaatcatcggcctgaacgaaagcggcaaacatgtgtatacgaagttgtccaatgaacgtattttccagggacttcataaggcactacggaattatcactcccgtggcggtgtgacggacgccgacctggctttggcggaagaggccttgcgtgcctacggtaagttacagatggatagcgatgtgatgcgttgcaagttggcttcaatcttattgatggctcatacggtgttggggaatcgggaagagaggggcgagttggaagctttttcccgcaccatcctgcctttgctgaaagcggagcaatcccgtgccttgttattggctacgttgtatggttgtacggataataacatgtattaccatgaggctcatactttaatcgtcccatggcgtaaggaacccgatatgaagaaaagcaagcggcaacttttgcagtggttggatgattatgacgaatggttggggcatcggggataaatatttatagccggaaagtttggaatgtctgtttgatttttctacctttacgtaggtgttatggcaaaggcttggatgaagtatccggttggtgtacggattctgagaatatgttagggattcctcgggaatgttgaaaggtacgtgatggaacggaaatgaaataaaagggaggacttggaatggattttttgaaaaggctttatcctattggtatacagacgtttgaaaagataaggaacggtaattacttgtatatagacaagacggaatacgtctaccgtatggcgcattccgactcaaattacatattcctgagccgtccccgtcgtttcggaaagtcgctgttgacaagtactttggaagcctattttgaagggcgtagagaattgtttaagggtttggctttggagaggttggaaacggaatggacagaatatcccgtcctgcatttcgacatgagcacggcgaagcacgtggataaggaacgcttggaaagtgagctgaacttaaaactgatagaatatgaaaacgtatatggccatggcgaaggtgaggaaaatgtgaaccaacgctttcaaggcatcatccgccgcgcctacgaacagacaggccaccaagtagtggtgctcattgacgaatacgatgcgcccttgctcgacgtggtgcatgaagaaaagaacctgcccgtcctgcgtaacgtcatgcgcaatttttatagcccgctcaaagcctgcgacccttaccttcgcttcgtgttcctgacgggaatcaccaagttctcgcaactgagcattttcagcgagttgaacaatattaagaatatcagtatgctgccggaatatgccgctatctgcggcatcacggaggaggagatggccacacagatggacgaggacctggacattttggccggacggttgaacgtaaatcgcgaagaggtcgtaaagaagctaaaagcccattacgacggttaccatttcacctggccctcgcccgacatctataacccgttcagcctgctgaacgccttcgccgacgggcggttggattcttattggttcggcagcggcacgcccacttacttaattgaaatgctgaacagattcggtgtgttaccctccaaaatagggggtaacgaggttgtggcggctgatttcgacgcaccgaccgaacgaatggaaagcatcactcccttgttgtaccaaagcggctatgtcaccatcaaggggtacgatgagatgttccaaatctataccttggacatcccgaatgcggaagtaaggataggtttgatgcgcagtctcataccttattatgtgacacgtgacacgcagacgaccaataccacggtggtcaatttagcccgagccttggtgcgcggtgatatggacgggatgttgcgtctgctgcagaccttcctttccaccgtcccttattgcgaccgcacgggctacgaaggccattaccaacagatgctctacatcatcttcagtctccttggcgcgtacgtggacgtggaagtacgtaccccgatgggacgggtggacatggtgatgcgcacggccaccacgctctacatcgtggaactgaaactgaaccaatctgccgaggcagccatgcagcagattgacctgaaaaattaccccgaacgctttgccctgtgcggccagcccgtggtgaaggtcggcattaactttgacatggaacggcataccctgaaggattggatgattacgagataaaatacactctaccctaagagtttgcaaaaacatccttcatccttcaggaactgtggtaaacatctattatataatatattacagtctgaacgatggaaagcccatctttcagtcccctttcatggctgaaagccgtcaaacgctttgcgccaaacgattttccaatctaagccaaatgatttttcattctcagccgattgattttcagttctctaccaaaggaaatgaaacgcggctgaaggatgcctgaaacatccttcaggttataacttcaaaataatgagtggattaacatgtgccctgaaggatgaaggatgtttttgcaaaattcctgtgtagggaaagcatacgaggaatgatggacttccagtaggaatattttatccacgctgattttctgtagcacctaaaactgtcatgaagttaaccgttaccagattgtggaggcggatcgaatgcaacgtgtattttagtctttactataatggtcgttgataataaaaagatagcttccaatacaatagctctgtatattaggatgattgtagtaatggcaatcaacttctatatgtcgagggtcgtattggatgtattaggggtaatagattatgggatatataacctcgtagctaccattgttgtagtcttttcatttttaaaatcgtcttttagtgatgcgacccaaaggtttatcaattataccatagggaatggcgaacatacccaacttagcaagatattcagtacctgccttaattgttattttatactgataataacggttattgtccttggagaaatattttggatgttttggggggcttcattgaatatacctcaaagcagatatgaagctgcatcgtttactttccaaatagcattggtttctttttctctcagtatattgcaggttccttataatgcggctattgtggcgcatgaaagaatgagcgtatttgctaaaataagtatagtagaggttctgttaaaattatttttgacaatagtgattacaaatatagcattcgataaattgaaaatatactctgtattgatgatgtttaatgctgcggttatattcactatatattttgtctattgtaggacgcattttgattatactaaatatattttttgttttgacaaatccttgttcaagcgtatcctgtcctttactggatggaacatgttaggcagcttgtcgggtacgttgtcagaatcaggggtaagcctgatttttaacgtgttttgtggggtaatattgaatgcctcaataggcttatctaaccaaataaacggtgcattgtccggctttattgcaggctttcaaacggcgttcaagccacaaatcgtaaaaacgtatgcagccaagcaaaggcaagattttcaccggttggtatgccggtcgtcaaagttctcgttcttcctgttcttcttggtttctgttccggtaatatgcaatatgggttatatcttgcatgtttggttggtggaagtgccgcagtatgcgtgtacctttagccggattatcttgttgggatcgcttatcgatgcaatgtctggtgttttttattcggctataggggccacggggaaaatacggaattatcaggttaccatcacaagcgttttcgtattgcacatagtcgtgacttgggttttattggatttgggggtagcgtatgaatatgtttttctctcaaggatattcacaagggggattctgaactttcttgtaggattatacttcttgcggaagatagcgaatttgcaatattctgagtatcttagtaagacttttgtcccaatcgtgaaaggttccttgataccctttttaatagtcatattgttggtatgcttgtttgacagcgattctgtggggaaggtagtgcttaatacgttggtttttgaaattgcttcaatggtgtttattgttaaatatggattgtcttccaatgaaagagataggattttgagtgtaattaaaaataagatcaaaaaatgacaatgcttgaagttttggttggaaacctgttgttgtacttgtttatggcacggtgttatggtaattcctctaaaatgtcgttagtctatatattgtcgatttattatgttattatatccttattagggattatcgtatttgaaaccggaatatatgaaaatgtttttgctgttaaaaataataagtctttttctataataccttatgccttttgtttttattgccttgcaatcttaatatatcctttaagaacagtatcatttaataatatttcttttaaagaaataccgtataataagactacatcgcttatcattaatttgtggattgtggacatggtttgctatatgatgctcaaattgtcccaagccgttatggcatcgagcataggatatggcgagatgtataatatatcagcggtggagggcgatgcaataggcacgttctatggggataactggcttttgctgaagttcaataattttaatgtgaacctttaccattcattttctccatttgtcatgtgttacgcgttgtatggattgatttccaggaaaatgcgacgaagaaaagcatttatgctcatagggctgattctgtttacccaaatattatctgcccttgcattaggctcgcgtggtaatttgttttttgtgttttggggtatagctttttattttatcattttttatccccattttgacaggcggttgaagcataaaagcgtatttgtgatattgtgcttgatagggattatcatggtttattcgattgttatcagttttgcacgtcttgaagatacatcgacagaaacgccattttatagtgtaataagatattttggagaagcatttcctaatttagggaatttattttggggggaggttacaagacatccgtatggcacgaggttgtttccatatctttttgggttgacgtatatagaagagtccgtacaagacggatatgctttttggcaaatgtttaccggagttcctgtattgaatttcaaaacgatatatggcgatttgtacattgagttcggtgaattcttgcctttggttattgtcacatttatctctttgttgttttcattgttcttaggaaaaagaaagatctctttttggaaaatggctttggtatattggtatttcgatttgattcttcaaggagttttcggttttaacaagggtgggcaaggcaatcttgttgtttttatggctgtgttgatcttttcgtttatagtaaaaatatatacgtctaacaggagtaggatatgaaaattttattggtagcaccggtttatttaaacctttataaaatcattaaagacgaattggtggctgagggacattctgttgtttatttcccagaaggtatgttaccgtggaatccctattataggtatccgaatcctataaaaagatgggtgttacggtttctgtttgaacaaagaaacatggggaaaaagtattgggttgatagattgaatgattccttatttaatcagtattatgatttgctgtttgtaattcagggcgtgacttttcacccgtgtgtaacagaacgcatgagaaaatataaccgtttgttaaagactgtgttgtatatatgggattcaaattattcatatgatttttttcgtaatgtcggttattttgataaagtctattcttttgatttcagggatgttcaattattcgggcatgcaaaagttggttttcttccttttttttggtctaaagatttattgaagtatgataaaactaagaataagtatgatttatgttctataggtacgagtcatcatggtcggtttggcattttcaaaaaagtcatagctgatgccaaaataaaaaatcgatcctgttatataaagttgatagcgaggattcctcaaaaattgactttaaaacagcaatttgattttttcgtggcacaagtatttcaagatttggataaaatagaatattatgattttataaaaggtaaacaaaagtatgattttgtcgatgctttgccttatgaaatggaggacattgcccgaatcacagctgaggcaaaggctgttttggatacagacaatccttttcaatgtggaactaccccacgcttgatatgggccttggcacaaaacaagcatgtgtatacgacgaatcaacaaataagcaagttgccgttttataataaagaatatattcatattataaatcgtgagaagccaatcatagattattcattgttagataagcaaataaattcaagagattcagtaatttatttaaggattgataattggctgaagttctttttggaatagaggtgataaattacgtgtgtacttgaaaaaacaaactttaaagaaaatggatgtcgttatttgcatgtctttgaaagactgttggttttttagaaagaacttatatttcatcaagaagaacatcaatcccaatcatatttatgttttgacggacaagagaaactttaattatattccaaacgtaggttctttgataacttgtgtggatgaaaatgaggttgttgacaatctgacgttctctgtttgcaaatctattgtagaaaagtatttgacaacgcaagcttttggttggtactaccaacagttgttgaaactgggatttgctttaagcagatatgcaaaagatgaatatttagtctgggattctgatacggtaccgttaagcgaattgaactttaaagatgaagaagggcatgatttggtattagtgaagaaagaacgtcatgtcccatattttaatacaatagacggattgttccatgctcctaagaaagccccatactcatttatttcagaacatatgcttttcaatgtatccattgtaaaagaaatgctttctttgatagaggaaaaatcccaattcaaacttccttggtttgaacaatgcatcgcggcaaggaaagaagatgtcgttcaggttttcagtgagtttgaaacatacggaacattttgctataattatcatccaggcaagctaaaagtaagaccacttaatacgttcagattaggcagtaaaatatttggagtgatggcttcacgtaaagaaatacaaagtttgagtttcgacttagataccgtatcttttgaaatgagagattatcctgtctcatggcatcgccgttttgtgcagtgctgtatttattggactatacgtacggtcataaaatgccgggtgaagtttggaaaattcccactttgatatatgttctaatagcatgaagattgtagattgtcccaaggtgacagtagtgatagccacgttcaatgttggcagaaccatttcatcagccatagaaagtttgataaatcaaacatatcctaattgggagtgtttggttatagatggaggctcgaaagacaatacgatagatattctaaagttgtataagcaaaaagagagtcgagtagattttatttccgaaccggataacggtatttatgacgcttttaataaggggtggaaaaaagccaaaggagaatggatattgtatcttggagctgatgactttttatttccaagcggaatcgcagagttgatgaaacatagtgacgaagcggatgtcatatacggggattgtgagttgaggtttggccactcaagcaaaataaggggaaatcttccaatcacttgtatcaagtatcgtttgcctgcatgccatcagtcgtttgttatgaaacgttctgtcatagaacgtttaggaggatttcgcttgcaatataaggtttatggagattttgatttgatacagcgtgcgtatattgcaggtttcaactttaaggaaactaaatctgttatatcatctttctttgttggtggggttagttctgacaatatatcagcagaatttgaacgttgccgtgtgatgaaaacaaacaaaagcatgccgttgccagaattattgataataaagaatatttgcttgaagatgacattgaagctttggcatatattcaaatgacgtgggtgaaaggttgggtttccaatcacgtgttgtacaatatttagaacaagaagatatgaacatcgcattaatcattgccggaggttccggcaaccgtatggggcaagatatcccaaaacagtttatgcacgtggacgattgtccaatcatcattcacaccatgatgtgttttcaaaatcaccctgacatacagggtatagctgtggtgtgcctgaatggttgggagaccgtgcttcaatcgtatgcaaaccagtttggcattacaaaattgaagtggatattccctggtggaaacacaggcatggagtccatacacaatggtatttatggattgaaagaggttggatgcgtgggggaggacttggtgctgattcatgattcagtacgtccgttgttgtcgcaagacatcatatcaagtaacattgccatttgcaaggcgtcgggctatgctgtcacgggtatcaagtgtcgtgaggcgatattggaaagtgaggatggctttacctcgtgcacaagcattcctcgtgacaagttgatacgtacccaaacgccgcagacatttaggttgaaaaacatcattgctgcccatgaggaggctaaagaaaaaggtataacagattccgtggcctcatgcacattgatggcggagttgggtggcaaggaaatgcacttggtgcctggctcggaaaagaacataaaaatcactacggtagaggacttggaaattttcagggccttgaggcatacgactaaagaatcttggttgaaatgacttgttatcaggaagagttatcaaactttgcccggcttgatttaccttgggacaacctgagtggctgcaacattctcgtgacaggagccacaggtctgataggagcctgtcttgtaaaggctctcatgctcaatgagcgaaaagattacagcgtctatggaatgggaagaaatgcgaaaagggcggctggcttgtttcaggactttgcctccgacgcatcgttccatttcatccaacatgatgttacttctccattggtatcagatatcgatttccatttcatcatacatgcggccagcaatgccagtcctaatttcttctcccgacatccggttgaagtaattaagtcaaacatgaacggagttgacaatctcttgtcgtatggattgcggcatggcatgaaaaggtttctttttgtatcttccggcgaggtgtatggtgaaagcgatggcagaatctttacagaggattacagtggatatattgattgtatgtctccccgttcatgttatccatcttcaaaacgtgctgcagaaacattgtgcgtgtcctatatgtccgaatatggggcaggcgtggtcattgccaggccttgccatacatacggtccggatttttctgaaaatgacaatcgggtttacgcccagttcatacgtaatgcacttcggggagaggacatcgtaatgaaaagtactggaagtcaatttcgttcttggagttatgtggtagattgtgcctcagccatattgtatatcttgctaaaaggcaaaaacggagaagcgtataacatagctgatgaggcatcgaacattagtatccgggaactggctgaaatcacagctagcatggttggacgcaaggttgtcatggaagttcctgatgaaactgaaaggaaaggatataacccagtatctaaatctgtttattccgttgaaaaactgaaaacgttaggatggcagcctgccacttcgataaaggacggaataagaaagaccatcaatcatctgcaatcaaaaccataatcatgaaaaagtatattggacgcgtattgggcaggttcttagtgaattttgcaatgtctcgttttaccccccccccctatttcgtaatatattactaaacaataggatagggaaagtttcaagaactgcggagatttgtagtgatacctatttcacgggcaagcggattgtcatcggtgaacgggttttcattaacaagttctgcaaatttttctcccacacaaagacgggttctgacatcataataggcgatgatgttgctattgccatgggtgtcaccctgaccactcatacacatcagatatcaagcgggaagcgaagggcagaaagaaagacggtgtttaggccgatagttatcggtgatggttgttggattggtgccaacgtgacaatcctcccgggtgtcaccattggcaggggcactgtggtcggagccgggtcggtggtggtgaaagacttggatgcaaactccgtatacgttggtaaccctgcaaggaagataaggcagttggaaggataagaaagttttttgaatgataatttgagacaacgatgaacaatgttcgaaaagtgcaaatgacgcaaatggaggttctccgggtcttcatggatatttgcgagagacacagattgaggtggtatatgattggcggttcgctgataggggtactgcgtcacaaggggttcatcccgtgggacgatgacatagacataggcatgccgcgaaaggactatgacaagttcgtgagcctgcaagcggaatatccggacgggtatgggctgacttgtcatggcaacacaccggaatggcagttcaacttctcgcaattcattgacaaggaggccgagatagaggtgcttatgaacgaacttccgcgtaagtgccacgtgtggctcgacatatttcccatagacggcctgcctgcaaacgggttgcgcaggtggttccatgtgaagcatatcttgatgtacaggtatttggtgcagattcccaacataaggacgcaggttgatacccacaaggtggggcggccttggcatgagaagttggtcatcagattgcttcatgtgatacccgttggtaagctcgtgtccgtagataaatgcttgtcggccatgcaacgcgtgttgaggaaacatgatttcgacaaatctcggtatgctggtaacatgctcggcaaatatagggaaagggaggtggtgatgcaaaaatggtggggagagccgcgtaagatgcctttcgagaacattacagtgaatgtgccgtcgaacgcagacgctataaaccgtcacatttacggggattacatgaggtggcctgtcgaaaaagatcgagtgagccacgacataaagataatcaagttgagggacacggaatgaaaggcttgttttctacatttaagaagctcggtggatggtcgctactgaacctgtggcacaaggctggggtgctgccatacgccgtggcgcaggtctgtctgaccggtgtatcgcacaagtcattggaacttgtacgtttaggagtgcagcagaaaatactgcataagttgaggaaacggtatttgcttgtactggatgcatttgacgaggaatggaagtctggacagtatgcaacggaacaggaaagttgtccgagggtttggatttgttggatgcaagggattgaaaatgctccgaaattggtacaggattgttattcatctatccaagaatatattacagatcgtaagattgtacttataactgcaaagaataggaaagaatatgtagttttccccgattatatcgaacagaaatatgaggcggggataattacacatacgcatttttcggacttactacgggtagcattattggtcaagtatggcggaacatggattgatgcgacggtgttctgtacgggaggaacaattccaagatatatgttggatagtgatttttttgtctttcaaaatttgaaaccaggggtggatgggcatgtgttgaatatttcgagttggttcatgactgcatgtgcggaaaataaaatggtattggccgtaaggaagttactttatgagtattggaaagagaatgataggttgattgattatttcctccttcatcatttcttttcgatggtcatggatttctatgctgatgattggaagaaagtggttccctttagtaattccgtgccacatatattgttactcaggctttttgaaccttataataaggaatgttacgaggaattaaaacggatatgtcctttccataagcttgcgtacaaacgtactccagaagagtttgctttgaaggggactttttatgatgtaatatttaataaatagtagaaaacggaatgagtatggatactaatcgacaatnnnnnnnnnncccccccatgttaataaagttaaatataacaatatcaatggattgcgtgtgctttcggctgtcgggattgcaataatgcattaccaagcaaacatttctgttaaaccagaattggggtggttctcggataaattgataccatggtttacgtggtttgtagttttgttttttatgattagcggctttgctttatgttgcggctattatgaccgtatgaaaaacggccaaatatcattaaatgatttctattctaaaagatataagcgaatattgcctttcttcggtctgctttgtgtattggatttaattgttgatttttctaaagaaaatttggcgcaggctttcatgaattgtaccttggtgtttaatctgttgccgaattccgatataaaagtgattggagtaggatggttcttgggtttaatctttttgttttatatgctgttcccgttcttcgttttcttattggataataagcgtagagcttggggtatattctgtatatctttaatcattaattccttatgtcaggaatacttttttacggagattttcgtggattttaatccaagtaggcacaacatcctgtattcggctcctttcctgttatcgggtgggttatgtttcctttatcgcgagaggctgcatgagtggtctgcgaagtggggaaatgctttgttggtagtttgtttgatagcaaatggtctgtattttgtttgtcctcaatccgaatggacgcttcatcaggttatacccttgatggtcgtatttacgttatggctgatttatgccatgggggcagaacataaatggttgcataataggataatggattttataagtgacatttccatggagttttacttatgtcatatggtcatgtttcgtgtggtagagaaggttcatttggaaaaaatggttcataatgagagtctattattccttttgacttgtatggccggaataggactggcagtcgcgttctcttatttgggcaagaaagtgattgtccgctacagtcgtttttaatgtttgattgttggttgggacacatattcattgattcttaatccataaacatattatatgaaaatagcatttatcagcacccgtggcataccgaacaactacgggggcttcgagcagtttgcagaatatatctccgtgggattggtccgacgggggcatgaagtcgtggtgtactctccgcatttccatccttaccgggagcctgactacaagggggtacgcataaagcatatttatagtccggagaagtggatggggagttccgtggggagtttcttttacgatttcctgtctttgcgtgacgctttgaagaaggagaagttcgacattatttacgaagcgggctatacgagcatcgttccggcttatatctggtttaatgtgaagcgtatcaagtatccgctttttacgacaaacatggacgggttggaatataaacgtacgaagtttaacaaatgggtacaaaagtttgtattctgggaagagcgtatggcggtgaaacacagtcattatttgattgcagacaatatgggtatccatgattattataaggagaaatacggaaaagaaagtaagtttttggcatacggggctgacgttcatgaggattacgatgtggacgtattaaaggagtacggtttggaagcgggtggttatttcatcgtggtggcccgtctggagccggaaaacaaccttttcatggccatagagggatatttggcttcgaaccagtatggtaagcatccgttagtggttgtgggaaagacgaatacgccttatggagaacatttggtggaacgatatggtcgcgaccgtaacatccgctttgtaggtggtatatatgacttccgtaaactgaactccattcgtcattattcctatgcttattttcatggtcatagtgtgggcggaacgaatccttctttgttggaagccatggcttccggatgttttattttggcacatgacaatatcttcaaccgtgcggtcttgggcgaaaatgccttatattatggttccacggatgcagttacggagatgttggatggaataaaccagatggtatctgcccataaaaaggaatatacggaacgtaatttggaagtgatacggcgtgattattcatgggagaaactggtggatgagcatgaagaatacttcaaatggatgttgtcacaacgaaaaggtggctgacgtttgtccgtagttgtgagaattggcatgaaaaacaaatccccgtgaaaacgatattgaagttttcacggggatttgttttgaggcaagggcggtttacaatggtttcaccccttcagcagtgggaggtatcggcttgatgctgccatctgcgttatattccatcggttcggctacgacagagcggctgtaactggtgccggtaggcagaccgccattatggctgatgaatatccattgtcctttgaagttcacgatggccggatgggttgtgttgctgtttccggctatttctgaaattatccctttcgtttcatacgggccttcaatgtggtcggctacggcgtaggctattttttccggccattcgctggcgtatgtgaggtaatatttgccatcgtgtttgtgaatccacggtgcctcagtgaaaggatggctttcgtcgatatggatgcgtttcacctctccctctgtttctatcatgttgtctttcagtttcacgatgtagcattcgcggttaccccacgtgaggtaagcctggccgtcgtcgtcgatgaatacggcggggtcgatgcaggcccaactgtggtgggaatcgaaacagtccttgttggtgagcaacggcttgcctaaagcatctttgtaagggccggtgattttgtcggatacggccacgccgataccgcaccagttggtactgacataccaatagtatttgccgttgcgttcagccacatgtccggcatacgcctgtttactggcagcccatttgaaatcttctactttcaaggggaccgggtattgtgtccaatgcttcatgtcggtagtggagaacacgagccagtctttcatcacgtaaccgctttggttaccgttttggtcacgtccggcaaaaagccacagtgtgtctcctttgacgagtgcggcggggtcggccgtatggatgtggcggacaatgggattgccttggctttcaaactcgtatttgactacgtagccccacttttcttgcaaacgttgcaattcgtcacgggtcagtgaaatgacggaaccgtggcgcgggaaaaagtctttggtgaacgctttgggttcggagaaatggtaaaggtccgtactggtctggtattcatatcgtccgctggtgtacatgtcgtacatcaatacgtattcgtcttttccgttcagtttgaagatgctcgacccctccacgggcgtctttccggcgtaagcgtccagatacttgaagtcctctttccactttcctttcaggcttttcgaggtggcttgttggataccgtttttgatttccttgccgttctcgtctttggtgttgcctttataaaaaaggtggtaggtaccgtctttttcgatgatgtcgttgtctatgctgccgtatttggcagagaaaagctgtttcggctcgctttcaaagcccgtgaagtccttgttggcgtatgcgtaataagtgatgaggcttttgcggtcgttgcgttgcaaggtaaaataaatcatatattttttggccttgcggtcgtaaatggtctgaggagcccatacccaataagcatcaccgaaatgtttcggataatctttggacagattgattttggcgtgtttccaatgcagcagatcgtccgaactcaggagtacgatgcctgggttttcgttccaaccgtttttagcggtattcatgtccgtggctacgatgtaaaagcgtccgtcttcaccgcgcaggatgtgcgggtcgcggataccgccactttcgctgatggtgtcggaagcgatgacggggcggttttcgttaagcgcgcgccagttcactccgtcgtcgctgagggcgaaacgcaggtgttcctgttgcttggcatctcctcttccttcgaaataggcaaaaagatatccctcaaaattagccggtgtttcggttcgattcggtgttgtctttccgtggctcatggttgtagctaataacagagcggcaatgatggtttgttttttcatgtgactgttgttcttttaagtgtaatgtttttctgtcattttcagcggcaaaactatgaataaaatattgtacaagcaagaaaacgggcgaaaaaggtgttaaatatacacgtgttattccttttagacgtcgttttgtagaacgaagtctttatgaggactttccggttttagccgtaagcgaaatggtccacgatgaagttcggcatccagacgcaaagtcccagtccgatgagcaaggctgcaaagactactaatgtagtcttgtctttccatgacgggaggagtgtggcacggcgcatgcggaggtaggtcagtaggtagccaaacaagatgaggaagatgggaataccgaatgtccagccatgtacccattgttgtgcggtattatggtaaacgaaatcctgtccgatgaaataaaatacggtacagaaaaatgtaaaatagtacatcaaggacatgagcaacacgaggctcagcgttttttggaaaggtttcttctgccaataggtaccgcctaaaatgaacaaggcttgcaggccgtaggcttggaggatggctaagggcaggtacacgtcacattcgctacttaaccatgggacggggaacgacagtgagacttcaggatagaggaaatggatgaaaccgatacgggtgaagtcggccaatacggtggctaaacaaaagatagggaaggatatgatggagattctgaaccatctcacaataaacttctcggcatttgaaaccgggaatgtcaggtcggtgatgtaatccttccggtattttgatgtcttgaaaaaagtgctgcccgcaaaggccatgaagaaatcgaaacacagcacggccgtgaagacaatggaaaaccaacagtcgtctttcccggacaaggcgttctccataatcagttggtagctgttgttgtcggtttccatgccttgccgcacttgttccaatgccacgaccacagagtgcgttttggtgaaatccatccagatgaagagcagggtcatgataccgtaggggatgatgaaataataatagagttgtgcggcgttttcgctccaatctttgcggaaatattggaggaggcgttgggcgtttaatgtattcttgttcatgatgattgtttttaaaggttggacatagtgtcagaggtgtctgacaaatactgccggtaaagggtttcgagttcttccgccgtgatgccgatagaacgggcttgccggaagaaatcgtagagttcttcattcatgaaactttcccttcgaaacgaacggatgcgttccgatgcgcccggttctacgaaataacctatgccacgttgcatgcggatgacagagtgggattgcaggaagtcgtaagagcgcatggccgtattggcgttcacctccaccgtggcggcgtaatcgcgcacggaagggatacggtcgttttcagcgtaccgtccttgtagtatctcatcgcagatacggtcggcgatttgcaagtaaatgggtttgttttccttgaaattcatacgcttttcggattgagggcatattggtatttgaggtcgttctttttcattctgcggtaggccgatagccaaaagagggaggtcacggcaagccaaaaggcatgccataccacttcggcagtcgctgctccgggctgttgggggtaagtgtaagggtcgcctccggcaatgagcgagactccgatcgtcaaaaggaggggcaacaacaggattgggcatttgccgagtgcgcggcgcaggggtgtccgtcccgtttcgcttctggtggaaatggcttggcccaacagactggtcgtgaggagcatcctgagcacaaagccggaggaggccgtatgaagtccggaagtaaagaggaggggacgggcgaagctgtaatccgggaaggccatgttgcaaatgatgacacgggtgatgtccgccgccaaaataataagaacgcctgccaaaatcgaaagaggaacggtatagagccaccatcgggcgaacttctcaaacgtggaggcagggagcagcaagtacctgatgtgctgtcccttgttgtatatgggcgcgttccatagccacggagtgaatataaggaataggaaaaagaatgccgtaacggtgacgatcgcagcattttggttggtggccgtgtctgtgaggtgggcgaacttgtcttccagtatatccgttgggacggtctgtagcaaggtggcgttttccgaatatactttgaggcaagacaccgtgagaatgacagagagtaacaagtagcctgcggcgagggtgacgaggcaacgtgtacgccgggctgtccagtcttcgcggagtaaggccgcgaagcgtttgcggtcgaaacaagaacagttcataagcttaatgtttggggaatttgacataagtgaggtcggttttgaagatatgacggtaggccatgtaccagttgaggacggtgcacagcagaaagaaggcattcatgaggatggggcggaatagccaaaggttgaaggcttctctcagggcattgtgcgaatgtgcgagggcgaaaggcacgaggacgacgagcaggaggacggcggtgcgcacgcttgcccgtttcgtttctgaggtgcagatgaaaacggactgcgcccaaagcatcaggttgagcagggtaagcaaccagtatgggtgcactctgccatcccaatagtcagcgtatggcagcaggtgggcatagtccacttgcgggacgatgagactgcaaagccccacacgtgtgaagtcggcggcaacgaataccgcgcagtaggtcaacaaggcgagtgggacggcatagagccaacggagcagaaattgctcgaaggccgacacgggaaaggtaagcgtgcgggcagcctgggacgtggtctgcaatgccctttgtgtccggcgtgcagtgccgacaaggtagaaggcaagaatcgggaaaaacagggcactcacggaagtccagcttccgtccacgccttgggcgaggtcggccgatatggctttccattcttccacgcgttgggggctgacgtaatggctgagggcattggcgcggagcgcgccgcgtatcgtgtagaagccggaaaacacggtgaggacggcgtaaatcactacggcctgcaatcccaatgctttctgtctttccgtccagtcccagcggcacaaggcgataaaacgtttccggttgaaaaactgtgaatccatatccttttatttttcagcattaaacaaggggcagatggtttccgggtgtgccagagtgccgttgaaaagtaactccaagttgatttccgaatccttgtcttccggattcgggagcatgacgctgtgcccgttgtaggaggggagggcataataagcctctgaggtttccgattcattgtcggtctgcgtgaaatataatttatggcagatttcagttaccgacgcatcgagcagtacgcgggcgttatctaagatgaccacgtggtcgagaagttgttccacgtcttgcacttgatgggtggaaatcacgataccgcgcgattcattcatttcgcggatgaggagtttgcggaattggcttttgccggggatgtccagtccgttggtcggttcgtccatgatgagccacgaggtacgggtggccaaggcaaagcagatgagtgcctttttcttttgtcccatcgaaagttcgccgagtttgatgtcctccggcagttcgaacatttccagattgcggagcaagttgtcgtggtcgaaatgcggatagaaaggagcgttgaggcggacgtactttttcaggttgtagtccggaaggtcgaattcttcggggatgaggaagaagtcgctcaatgtgtccggacggcgcaaacgcacatccgtgccgttcaggcaggcatgtccttcagtcggtgtgaggaggccggtcatcaggtagagcaaggtggactttccgactccgtttttccctaaaagcccataaatcttgccctcgtcgagacggagggagcaatcgtttaatacgcggtttttccgtttggaatatccgaatgagaggtgttcaatggtcatcataaggcaatgttttataaattaattagtgtattagtataatagtacactgcaaatataggacaacattgcggaacgtacaaataaaaggcggaatatttttaggattttctctttttatgctgtttttaactgaagatagggtggcatgttcccaccttggattgtctttgctatcgcgaaaataggaggcggctcggcagtttttcgctcaaaagcaagcttttggcttgcaactgctctcacctttcactatctttgcaaattcaagacgcaaaggaatggaacggaaaataataacaatcagcgatgcgcggttgcgcgaggcggctgcacaaggaatggatgagtttttacaggtcttcatcgaccgttaccgggaggttatcggcggagagttgaatgccgggaacatggggttgctcaatggggagcaaatttcattgcttgcctatgccctgtttcgtgaggaagtgatggacggaggatttatccaattgatacacaacggctacgggccgtttattttcgacaatccttttgcgaaggccatgcggttgatgggggcacatgatttctccaaactggtatataaaggaaagagactgtatgacaaatacaaggaagaactgacgaaggactgttcggacgaagagtttatggctttgttcgaggcgtatccgcagtttgacgacttggacgacgaatttgtggaaatggaagaagaagtcacggctgcattggcttgttatgtggatgaacatctcgagttgtttgccgaggtggtgaaagagtaaagaggaaaaaagatggcagaaaagaaaaataagaccaaatcggtgaacatcaagaacaaacgggcttcgtttgatttcttgctgttggacaaatatacggccggcatcgtgctgaccggtacggaaatcaaatccatccgggcgggtaaggccagtctggtggatactttttgtttcatccataacggagaggtgtgggtgaaaaacatgtatgtggccgagtattcgtacggttcttacaataaccatgcggcacggcgcgaccggaagcttttgctcaaccgcaaggaaatccggaagttgcagcaggacatgaaaagtcccggcttcacattggtgccgaccttgttgtttatcgacgagaacggacgtgccaaagtggatgtgtatttgtgccggggtaagaaagaatacgacaaacggcagacgttgaaggaaaaggaagaccggcgcgagatagaccggcaggtaaaaaggtattagagtttgaaggcatgaggttggaagagattgttaaggagaggatattgatattggatggtgccatgggtaccatgattcagcggtatggcctgacggaggctgatttccgaggggaacgttttagggatgttccgggactgatggtcggtaacaacgatctgttgtctctgacgcgtcccgatgtgattcgggatatccaccgtaaatatctcgcggccggggcggacattatcgagacgaatacgttcagttcgcaacgggtgtcgatggcggattatcacgtggaggactattgtcgtgaaatcaatctggcggcttgccggatagcccgtgagcttgcggatgagttcacgacccgcaatcccgaaaaaccgcgtttcgtggccggttcggtgggaccgaccaacaaaacctgttcgatgagtcccgatgtgaacaatccggcataccgcgccctgactttcgacgaactggtggctgcctatcgggaacagatggaagccttgctcgaaggcggtgtggatgccttgctcatcgaaactattttcgacacgctgaatgccaaggccgctatttatgcagcggaagcgtccatgcaaaccgccggacgcaaagtgccgctcatgttgtcggttacggtgtcggataagagcggacgtacgctttccggccagacgatggaggccttcctgacttctgtggctcatgccgatattttttccttagggctgaactgttctttcggggcacacgacctgattcccttcctacaaattttggctcaccgttcaccttattatatatctgtctatccgaacgcaggactgcccaatagtatgggagaatatgaccagacccccgaccagatggcagaggaaatgaaattctttgtggaagaaggttgggtgaatatcatcggaggctgttgcggtacgacggacgagtatatcgcccgttttccggccttggcgacgcaaggacgtccgtatgtgccggccggaaaggcagagacattgtgtctgagcggtttggaacagtttgaactgacgcctgaagtgcggttcgtcaatgtgggcgaacgttgcaatgtggccggttcgcgtaaattcctgaggttggtcaaagagaaaaactacgaagaggctttggaaatcgcccgcaagcaagtggaggatggtgccttggtcatcgacatcaacatggacgacgggcttctcgatgcccggcaggagatggtgacgttcctgaacctattggcctccgagccggagatttcccgcgtgcccgtcatgatagattcttccaaatgggacgtgattacagccggactgaaatgcgtacagggcaagagcatcgtcaattccatctcgttgaaagaaggagaggaggtattcttggcccatgctcgggaggtgaaacgccttggggcggccgtcatcgtgatggcctttgatgaaaaggggcaggccgatacttatgaacgcaagatagaagtctgcgcacgggcttaccgtttgttggtggacgaggtcggtttcaatccccatgacatcatattcgacccgaacgtgctggccatagccacgggaatggaggaacatgacaactatgctgtggactttatccgtgctgcgggatggattcgccgtaacctccccggggcgcatgtaagtggcggggtgagcaacctttctttctctttccggggcaacaactatatccgcgaggccatgcacgccgtgttcctctaccatgcctgccgtgaggggatggacatgggcatcgtcaatcccgccacgtcggtgatgtatggcgatattccgtccgacatcctgacggtcatagaagacgtggtgctcaaccgtcggcctgacgctgcggaacggttgattgagttggccgataagctgaaagcagaggccgaagcggccaaggccggacagcccggggcggatggcggcgggatatccgcgaaagatgcctggcgcggcggcagtgtggaggaacgtttgcagcatgctttggtgaaaggtatagattcctatttgcaggaagatttggaggaggctgcacagtcttatccgcatgccgtagacatcatcgaagggccgctcatgaaggggatgaataccgtgggcgagttgttcggagccggtaagatgttcttgccgcaggtcgtgaagaccgctcgtacgatgaagaaagccgtgggcatcctgcaaccccgtatcgaggccgagaaaaaagagggggcagcacgtgcgggattggtcctggtggctacggtgaagggagatgtgcatgacatcgggaagaatatcgtatcggtggtcatggcctgcaacaactatgagatagtggatttgggggtcatgacaccggcagaagaaattgtggcgaaagccaaggaactgcatcccgacatcatcggcctgagcggcctgattacgccgagcctggaagaaatggtgcatgtggtgggcgaattgaagcgggccgggctgtccattccggtcatgatcggcggggccacgaccagccgtttgcatacggcattgaagatagctcctgtgtacgacggaccggtcatttggatgaaggatgcttcgcagaacgcgctgacggcagcccgtttcctgaatcccgacacgga

SEQ ID NO: 1001 - DNA, 20619 bp, unidentified
  source 1..20619: mol_type = unassigned DNA
ttattcccccgcgtgcgcagccagatagtcggccagatcgctgacggtgacgaagttgcgcagctccttttcggggatacgcaggccgaaggtctcctcaaggtcagccacgacggtcaggatctccatcgaagacaggtcgaggtcatccatgaggacgctgttctcgttcacatcatcgggggaaatttctgcaacatcttccagaattgcaaggatctgggacacgatctcggttctttccatagtttgaatcttcctttcgtagttccattaaaggcggctgcggctcttttccagtattccgcagcctgcccggtttattcttacttgcgcagcagcttgccggtgccggtgcggggcagaggctcagtgctgaactccacggcgctcatccgcttgtagagcggcagggtgcggttggtctcggtgatgaagtcgcggacggtctgctggtcggcctcgccgcagtagatgacggcacagatcttcttgcccttctccctgacgatgcattccttgacggcctcgcacttggacagcagattttccagttcttcggggctgacgttctcaccgttgtcgaggatgatgatattcttcttgcggccggtgatgtaatagaagccgtcctcatccacacgggccaggtctccggtgtggaaccagccgtcggcgtcgagaacttctgcggtggcctcggggtccttgtaataacccagcatgacgcagccgccgcggatgcaaatttcgcccgtctcgtccagcttgtactcggcgtggtcgtcgggcttgcccacggcgcggatgtgcttttcgtcctgctcgtagttgatgatgccgtcgccgcaggtctcagtcatgccgtacacctgagtgatcatcatgccctgctgtgccagctcggccagcatggcgccgtcaaacatggcagaggagccgcaggggttccagatgccgttcaggcgggcgcggcggccccgcttgacgtctttgtagatggcctccatcagcatgggagccacagcgatggcatcgctgtgcatcaggccgaggtcgcgatagaagtcgcggatgtcggcggagaggttcagcgcccagcccttgcaggcccaaacgaagaggcagatgaacgtacccagatggaacaggggcaggatggcgaagttgctcaggacgtcgtttttgtcctcgggcatatgctcgtgcttatagtccagcatggcgtcgccgaatttgacctggcactccacagtggtaaaaaagttgcgctccgagagcatgacggccttgctgcggccggtggtgccggaagtgaacatcagcaccatcaaatcatcatggcccacgcagtcaacaagctctgcaggcgcgctgtccttgaaggcgtccatcgggcggagtttatcgccgtaggcggcctcgatgtcagggcggcagccatagtcgatgccgtcgttgacgatgagggaaggctcgacaaggcccagctcatattccagctcgggccaggtctttttctggttgatggtcacgacgacggccccggcgaggatagcgccgaagctgttgacaccgtactcatagcagttgcggctcatgatgccgacacgcttgcccttgatgtcggggatattctccttaaaataagtaacggccctgcggatgtcctgcacatactgggcgtaggtcttttccaccacagtcttgccatcagcggccacatagcggaaagccacccggtcggggtactgcttcgccatgacgtccgtgatgagctcatatacagtatttatcatttttgtcgctccttgctgtttttctttattgcagcgaaacgccggcagctgacattttctgcctcaacgtaataatacctgtttcggcagagaaatgcaactacgcggcgtgtcctttttcgctgttttattgtttacttgcgcagcagcttgcccagagcgttgcggggcaggggctcagcggtgaactccacagcactgatgcgcttatacagcggcaagctgcggttcacctcggtgacgaaggctctgacctcttcctgcttatcctcagggcagtagacgacggcacagatcttctggcccttctccttcacgatgcactcggtgacagccgggcagagggccagcttcttttccatctcttcggggctgacgttctcgccgctggcgaggatgatgaggttcttcttgcggccggtgatgtagtagtagccctcctcatccatccgggcaaggtcgccggtgtggaaccagccgtcggcgtcgatgacctctgccgtggcctcggggtccttgtagtagcccagcatgacgcagtcgcccttgatgcagatctcgccggtctcgtccagcttatactgaacgtggtcgtcgggcttgcccacggcactcatgtgcttttcggcctgcgtaaagttcaggatgccgtcaccgaaggtctcggtcatgccgtagcactggttgatgacgaagccgttctgggccagctccagcagcatcttggggtcgagggccgcagaggagcagcacaggtcccacaggccgttgaggcggctgacgcggccccgcttgaagtcgttgtaaaccgtctccaccagcatgggggccgaggccatgatgtcgctgtgcatcaggccgaggtcgcggtagaagtcgcggatgtcgctgcagagattcagtgcccagccggcaggcgggtaggacatgacgcagacgaagcaggccatgtggaagaggggcagcagggtcatgtggctcagcggcagcttctgaccctccggcaggcgggacgtgatccagttctcagcccgggcaccgtaggtgcagaggctggcgcacatattccgctccgagagcatgacgcccttgctgcggccggtggtgccggaggtgaacatcagcatcatcaggtcgtcgtggccgatgcagttggtcagctccccgggggcggtgtcccgatagcagtccatcggacggagcttcggaccataggcggcctccagctcggcacggcagccgtagtcgatgccgtcgttcaggatgagggccggttccacaagacccagctcatattccagctcctcccacatttttttctggttgagggtcacgaggacgccccctgcaaggatgatgccgaaggatgccacacagtactcgtagctgttccggctcagcagcgcaacacgctggcccttgatgccgggcacttctgccttgaggtaggcagtcatccggcggatgtcctgcgcgtactcgcggtacttcttttccacgacggtcttgccgtcggcggccacatagcggatggccacattgtcggggaattcctgctccatgcagcgggtcaccatatcatatacgcctgcagggactttgatctcttcagccattggtcttactccttttttgttcgcaagaaaaataaacagcaccatttcgttccagactctccgcatttctggcagacagaggaaatttctggttcgattcctcttggcaacagtataccgcatatgcgccgtaaacgcaagatttcattgcacaaatatgcaatttaaacttgcgctcaacttgtgcaaccggatgtaaatccttccttttgttgcgacgggacaaaagctgtgatacacttttttcgtcaggacgaaactttgcccggaagcttcgtcccctgcaaattgacagaagacccaaaaagcattatactgtttatatcatttggcaaaaaagctccccatcgggcttcatatttttatctatcgcgcccaaaacacggcctttcagggcctccgggacaggcggcgcactacaaggaggaccccctttatggaaggcaccaagccccgcaccgtaagcagccttggcatgttcgacctgctgaaaggcatcggaatgctggccatcgtctttgcccacacggcagagctttaccccctcggcaccgacgacgtcaccccctttgcctttgcactctttgcctaccgcgaagcgctgatggccgccttcttcatcgccagcggctacggcttccgcaagcgctccatccacaaatgcatcgagcagcaggtcaagaccctgctcaagccttacctttatacggcagcggccaccaccgtgctccactgcctcatccaccacgcagccttcggctcgtggcccaacgccatcacccagtcgggcaaggtgctgggcggcttcctgctggggctgccccacacggcctcttacttcgggcaggagttcttctcctgcgggccgatgtggtatctggtggccctgatgctggcgtggatccttctcgatgtccttctcgacatcttccccgagcggtacataaccccggccgtcatcggcgtcaccctgctgggctggggcatcacgctggtgtgggaggcccccttctgcatcgcgcagggcatggtatcgctgccctacctctacatcggctatctggccaagaagcgccgcctgtttgagacgcccctttccggccgggccagagccgggctgatcgcggcggcgctgggcgtcgtggcgggcgttctgctgacccagagcaccgactgcgtctcgctgggcgagtggacgatggggcctgtgagcatctttctggacggcgcagtgggctacggcatcatccggctcttcctgaaattgcagcgccgggtggacggccccatctcccacgccatcgagtgggtggggcggcgctcgctcttcatcttctgcatccacaccgtggagctgacggctatcccgtggtatctgatggcggcgaaatacgccgaccgtccggtgcaggggatgcttttgcagttcgtgttctcgctggcgtccatcttcgccatcactgagcttctgatgcggcggaaagagctgggccggaagctccggggcggcaagactgcggacaagccccggcgacgggacaagagccgccattatgcggcaaagcactaacgatacagcgctttggtatccggccctttttcagggcagactatattagttcgatgcatgggcttgcagcgagggttgtacgccttgcgataaatttgaggaggccccggtaatgatgaacgatactcctgaagcggctctgcgcagccgcattgcggatctggaacagcagctcaggcttgcggatgagggtacctcgcggctggcccagcgctgccttgagctggaaaagcagctgcagaccttctacgccacccacccccagaaagagatgcaggccgactcacctgcgctggtgcagccgctgctctacttcgatgccggcttcggcttttcccagagggacaccgtcaaagccccggactacgaatacgacgagatgaacgggatggtgacggccaccttcgagctgcccgaggccgccgtcaatctccgcttcgacccgggcgagctgccctgctgcatcaccaatttcgtcttttcggatgaccgcatcctctgccgcccggtgaacggcgtaccgctccacggcgacggcatccttttcctgaacgacgaccccaacctcatgctggaagggatgaaccgcttccccgccgggatgaagctgggcgtgagctacggctatttcccgctggaggcgctggcaggcgacccgctcttcgccgcagtgctggagggcgtgcagtatttccagaagacccgcgtctgtgagcagaagcatctggaccagctggaaaagacctcttccgaccagaagcagaccatcgacgccttgcagaagaacatctccgagctgcatcaggccaacgccgagctgaccgcccggagccgggcctacgaaaactcgctggaaaatgtcctttcgtccagcagctggaagctcacactgcccctccgccgtctggtgagcctgttccatcgtggcagctgagaggaggatcgggatgtacagccgttatacctccctgcagcgggcacagctcgccaagcaggaatatcttgatacacaggacgtctttctcgccgtctacgcaccggggcggagggcctcgctggaagcctccctgcgcgaccagctccaccgcaagttcctgctggcggaggacctttccagcgggagtctgggcagcgtccgcggcgtgctgctggcgaaagaagacctgagcctgatgcccacggccctgtcctgctttgcggatgcgctgcgcagcggcgcagactacgtcaccagtgacgccgtcttcggctatgcaggtgccaccgccctctatcacagccccagctttgcggcctgccccggctgcgccctcgtctcccgggagctgctgctgcgctgtctggccgaggcccgtgaccccgggaaccccgccgagctgctgacgctggcggcaaagctcagccggaaccacgtctgtctcccgctggcgctggcccactacgagcgggacatctgtgccgaggatgtctggtcgatgaaggggaagcgggtgttcatcatgagccacctgctggacatgaccggcgcacccatcgtgctggtcagcgctgtgccggtgctgcgcagcatgggctacgaggtggtcgtcctcggcccggaggacagcggctcgatgccgctcttcctcgaagccggggctgtcgtcatcacccggcgcggctgcgtccagtcgcccctgctgtgggggctggccctctgcgccgacttcgtcctcgccaacactgtcgtcgaggcccgggctgtccgtgccttgagcggggcacgggtgccggtgctctggtggctccacgacgctttcgcgggctacccccatatcgcccaccagatccccaaagagctgggagagaacatccgggtctattccgtcggcagccacgccgccaacgccatgcactcggtgcggccggagttcaacatccggcctctcatctacggcctgccggactatgcctccgagaaattcgcccactacgacctgagctatgcgggcggacgtccccttttcgccaccgtcggctccttcgagaaccggaagggacaggacatcttctgcaaggccatccggctgctgccgccggagacgatgaaaaaagcctccttcctctttgtgggcaaggccgccgagccggagatgatggacgccgtgcgcagcctgacggcagactgccccgacaacgtcttctacgtcaagcggttgacccgggacgagatcaagagcctgatggcccagtgcacctgcctcgtctgcgcctcccgcgacgaccccatgcccaccttcgtcaccgagggcctcatcttcggcaaacccgccatcgtgtcggagcacaccggcaccgccggactcatcaccgagggggtggacggcttcgtctacgaggacgacgaccccgaaaagctggcggagcgtctggcatgggccatcgaccacccggaaaaactggccgccatgcggcaggcctgccgcgacctgtatgaacgccactactcgaagcaggcctttgccgatggcctgaagcaggcggtccgggagcttaccggcgaatccactttatcactctgccaaaattgaggcaaaaaatttggtatatcttcacaaacgcatctccggactgtggtatactcttcccagagtttatcccagtccgtttttgttgaaaggagtttcccccatgagttcgtccgcctcccctgccccctcccgccggaagaccctgctctcgctgggcgttctggccctgctgaccggcatcgtggtgttcattttccgggagcactgggtcgagatctccgccgcactgggccagctcaccttctggcaggggtttctggcgctgaccgtgggcctgagctatccgctgctggagggcgtcgtcagctggctcatcgtccgcagccgcctgccccggttctctctgcgccacggcatcgacaacgcatggatgggcaccttcggcaatgtggtgggcctcggcgcggggtctgtccccttccagacgtggtatctccaccgccggggtctggacgtcggcccgggcgtgggcctcatgaccctgcaatatgtctttcacaaaacggccgttctgctttacaccaccctgctgcttctggcaggccgcccttggctggcggcccactcgggcggcgtgctgcggtatctgcctgcagcctacgccgtggtggcaggggtcatcgtggggctgatcgccctctgcgccctgccggtggtgcagcgtctggcccggtggctgctgcatttcctgcccgacacaggccgctgggccgagcgccgggccgactggctccggcagctggacaccctgagcaccgagagccgccatctgctggcggacaaagcccgctgcgccgccattctgggcgtccatctgctcaaactctttctgctcttctgcctgccgtggatggggctgcgctttatggggctggacgccgggctgcgcttctggcaggtgcagctcctcgccgcgctgaccctcttcgtctccaacgccctgcccaacgtggcgggcatggggtcggtggaggcggcctttctgctggtgtacggcagcttcctccccgatgctgcctccatgagcctgctgatgttctaccggctggccagctattacgccaccttcgccgccagcgccgtcggcttcggactggcgcagcggaggctgaaccgcagctgacggtgtgaaggttttatttcattttggtaacagttatcaccttgttgtacattctgcgcataaatctcttgattttttcagcgaaatgaggacggcagcacccagagcttcgagaccctgcactacgagaccactcccatctccctgaagagcgtggacgcagccgcaggcgctacccccatcgcattcgctgctcctgagcagtaaagatcatcccacaacaaagaaaacggcaggtgcgacgcacctgccgttttcttattttatcaaatatcagcccttcagggggacgaagcccacgaggtccttcacgacctcgccgccgatgatgaggcccgcgaccgacggcacaaaggcgttggagccggggacggagcggcggatggtacacttgcgctgggtgcccggagggcagatgcagtgttgcttgcagctgatggaatcgtcctcgatgggggtcatggcaggctctttggagtagacgaccttcaggtgcttgatgcgccgcttgcggcactcggtgcgcatgaccttggccagcggacagacggaggtcttgtagatgtccgtgacctcgaagcgggtggggtccatcttgttgcctgcacccatggagcagatgatgggcacaccagcctccttgcacttcatgaccagagcgagcttgccggtgacggtgtcgatggcgtccacaacgtagtcgaactgggtaaagtcgaagctgtcctgcgtctcagggccgaagaaggtcttgtaggtcgtgaccttgatgtcggggtcgatgtcgtggacccgctcttccgccacatccaccttatatttgcccacggtcttgcgggtggcgatgatctggcggttcaggttggtcagacagaccttgtcgtcgtcgatgaggtcgagggcacccacgccgctgcgggccagcgcctccacggtatagccgcccacgccgcccacgccgaacacggccacacgggagttgtgcagcttggtcattgcctccgcgcccagcagcatctgggtgcgggaatactggtcttgcatattgtttctccttacttttccactctcatgatcgtccctccgccgaggacggtatcctcctgatacagcacgacggcctgcccgggggtgggggcgcgctggggctggtcaaattccagccggaagccgtccggccccgccgggtagacggtggcgggctgctcgacctgatggtagcgggtgcgggccgtcacccgcagcggcccggtcagctccgggatggcgatccagttcacctcgtcggcgtagacgatggtatcgaacagctccgcctccgggccgacggtgacggtgttggcctgcatatccttggcgcagacgtagaccggcgcgcccatggcaaggcccagccccttccgctggccgatggtgtaccgcaccgcgccgctgtgggttcccaccttttttccgctgacgtcgaggaaatcgcccgccggatagtgtttgccggtgaagtcctccatgaagcgggcgtagtcgccatcgggcacgaagcagatgtcctgactgtcgtgcttgcgggcgttgacgaatccctgctcctcggcgatggcgcgcacctcgctcttgtgcagcccgcccagcggcagacggacgtgagccagctgcgcctgcgtgaggttgtagagcacatagctctggtccttgccctcgtccagcccctttttcagcagccagcggccggtggcctcgtcctgctccacccgggcgtagtggcccgtgaccacatagtccagcccgtgggcctcggcccagcggagcaggtggtcgaacttcatatacttgttgcagtcgatgcagggattgggcgtgccgccggcctcgtagacccggatgaacttgtcgatgatcttttcctgaaaatcggcggtgaagtccagcacctcgtaggggatgtccatcgcataggccacctcggcggcgtcctcgatgtcccgctcggagcagcaggtgtgcagcccctcggtgtccacggcctcgttgcgggtgaggcgcatggtgatgccggtgcagtcgaagccgtcccgctgcatgagccatgccgccaccgagctgtccacaccgccgctcatggcgatgagggcaccggggcggcgggaagtgttctctgtctctgtcattctgttcctctttttgttataacacactaaaacagtagatatatactaccgcagcttctttctcttgtcaagacgcagaaaatccggccgcgaaggccagaagctccgtcttctcgttgggcagacgacccgtgatgacctcctccagcagcgcttccagcacccgccgcaggcccggcccgggcgcagcgcccgcctccatcaggtcgcggccattcacggccagctgagagatgcggcagcaggccccctgcgccgtcagcgcttcggcctcggcccgcagggcatcgaacgacgctttttcttccgacgcaagggccgtccagagggccgtcagctgctgcacggtatggaggtcatattttcctagcagccgtttggcttgcaagcacagatcacacttatccagcgtgtcgggagttttctctccacactcacgcaccagaaccgccgctccgtctatcctagcgttcgagcacttcaggcgtttgagcgctttcctcgctcccgtctcacccagcggcagcagcagcgccgcccagcgggcagacacctgctccgtccccgccggaagggcatcgatccgcctccgggcttttgtcagttcctccggcggcagctcgggcaggacgaaagccagcacctccggctcaaggtatgcccccggctgtggtgcggccagaagcttgttcagttcctcctcgatgcgctctgccgatacacagtcgaggtgggaggccagctgctttgccgccgcctcggtggcttcgtcgatggcaaagccgaaccgggccgcaaagcggtagagccgcaggatgcgcagggcgtcctccccgaagcggcgcagcggctcaccgaccgcccgcaccacgccccgggcaaggtcttcccgcccgccgaaggggtcacacaagccctcctcggcgctgtaggccatcgcgttgatggtgaagtcccgccgggccagatcctcccggaggtcgggcacaaaggccacgctgtcggggtggcggccatcggaatagcggccatcggtgcgaaaggtggtgatctcatacagctttccatcccgcttgacggtgacggtgccgtgctgcaagccggtggggatgcaccggtcttctccgaacagctccatcacctgcccggggcaggcagcggtgcagagatcccagtcgtggggcgcaaggcccagcaggctgtcccggacacagccgcccacgacgtaggccccaaagcctgcccggtgcagctcatccagaagggcggcggcaccgggttccagaacgatgttcattcgccttcctcctcatactgaagcgcaatgctcttgccgtcgaagccgcactccgccgccgggaagaggctctgggcctgcgcaagctcctcctccgggtcggtgatcatgggagaatagtggacgagccagagccgttttgcaccggcctttgcagcgagggccgcgctctggccgaaggtgctgtggccgtactgcttcgcctgtgcagcctgctcgggcagggcgtaggtggcgtcgcagagcagaagatccacccccgctgcggcctgttccagtgcggcgcagggagccgtgtcccccgaaaagaggaagctcagaccctgccgggccgggccgaggaccgattccggcgctgctctgctgccgtcggccagcgcaacgctctggccctgctgaagcatcttccactgctgcaccggcacccccagcgcccgggccttctcgggcgaaaagcgcccggcccggggcagatcgaggcggtagccctgactcgtgacccggtggcgggtggggacaggtgtcagctttgccccctgcggccagccgccgaagcgctcccggagcgccgccggggcgtccagcacctcggggcagaccggatagggcagcggcccggtcagcgcccgcagcgcggcccagacctcgccgaggcctttcgggccgtacagcgccagcgggcgggtacgaccctgacagcccagcgtctgcagaagccccggcaggccgaagatgtggtcgccgtggtagtgggtcaggcagatggcgtccagcttcatcaggttgacccccgcccggcgggcggcggtctgggtgccctcgccgcagtcgagcaaaaggctgtgccccccgcattcggccgccgccgccgtaagtgcgcggtcgggcaggggcatggtggccgccgtgcccagcagtgtaatggtcagcataagtctctccgtatcacaaaaatcttgatggctatagtgtaccacactcttcgtcccggcacaatcgcacaccgccgctccagcgggcataggatgggccaaacgagaaagggaggggtcttgtatgcggcgtcagcggcccgggcatcgtgttctatcgttccaccatcgggggcttctgctccttctggcagcagccgcggcggccctctttctgttctacagctgctctcccggagtggtgtacagccccccggggcggctggtgttcatccccctcgcgcaggtttcaggtagtagtacgacttcgctttccgcctctcaaaattttttcagaaaaggtattgacttcactttcgtgaggtgataaaatcccaccaaaccagtgagaaagcataagtaccaccgcaaaactcaccagtacagagagcaccggggcagctgagaccgggcagtgtgggcgcggatgagaatgggcttttgagggcaaaccgaaccgcatttttatgcgcagtaggggcgacggagagcgtctccgtgaacaaagccggtatgtgttggcatatcacgagtgggcagggtcattcctgtcaagattgggtggcaccgcaggagtattttatccgctcttgtcccaattcacgcaatgtgttttgggacaggagcggtttttatttttccctcttgtcccgcaagcaagggccggcatatgcatccggcccggaaaggacaagccttatgaagaccgaagcgaacatcccgtacaagttttatctggaagaatcggagctgcccaccgcatggtacaatgtgcgggccgatatgaaaaacaagcccgctcccctgctgaaccccggcaccctcaagcccatgacggccaaggagctggacggcgttttctgcgatgagctggtacagcaggaactggacgacaccacggcctacatccccatcccggacgagatccgggaatactaccggatgtaccgtccgagtcctctgtgccgcgcctaccgactggaagaggccctcggcaccccggcgaagatctactataaattcgaaggcaacaacaccagcggcagccacaagctgaacagcgccatcgcgcaggcttactacgccaagaaacagggcctcaagggcgtgaccaccgaaacgggcgcgggccagtggggtaccgccctctccatggcctgcagctacttcgggctggactgcaaggtctacatggtcaaggtgagctatgagcagaaacccttccgccgcgaggtcatgcgcacctacggcgcatcggtcactcccagccccagcatgaccaccaatgtgggccgcaagatccttgccgagcaccccgacaccaccggcagtctcggctgtgccatcagcgaggccgtggaagtcgccacctccacccccggctaccgctatgtgctgggcagtgtactgaatcaggtactgctccaccagagcgtcatcggcctcgagaccaagaccgccctcgacaagctgggcgtcaagcctgacatcatcatcggctgcgccggcggcggcagcaacctcggcggcctcatcagccctttcatgggcgagaatctgcggggcgaggccgactaccgcttcatcgccgtcgagccggccagctgtcccagcttcacccgcggcaaatttgtctacgacttctgcgataccggcatggtctgcccgctggccaagatgtacaccctcggctccggcttcatccccagccccaaccacgcgggcggcctgcgctaccacggcatgagcagcatcctcagccagctctaccacgacggcctgatggaggccaccagcgtggagcagaccagcgtctttgaggcagcagagcagtttgcccgcatcgagggcatcctgcccgccccggagagcagccacgccatccgcgtcgccatcgacgaagctctcaagttcaaggagacgggcgaggcaaaaactatcgtcttcggcctcaccggcaccggctacttcgacatggtggcctacgagaagttccacgacggcaagatgaccgactgcatccccaccgacgccgacctgcagaagggctttgacggcatcccccacttccccggcaacgaataatccctgaaacatcctctcccctcacacccccgcgcggcgcaagctgtgcgggggtggttttatataaaacggaatgactgcctgcacactgagccagacggtcattccgcaaacagcaggccagccgccctgcaagacacaggacggctggctgcttttattatgcaattcaggagaatggaggagaaaatagcgttttcagggtgcttgcttccgggggacggaagaaacgccggagttattcgccgcggacggctgcgaagcctgcctcgaggtcagcgatgatgtcgtcgatatgctcggtgccgatggacaggcggatggtgttctggtagatctgctgctcggccagctccgcatcggtcagctggctgtgggtggtggaggccgggtggatgacgaggctcttgacgtccgccacgtttgccagcagggagaagatcttcaggttgtcgatgaacttgaaggcttcctcacggccgcccttgatattgaaggtgaagatggaagcgccgccgttggggaagtacttctcatacagggcgtggtcggggtgatccggcagcgaggggtggttgaccttctcgacctgcggatggttggcaaggaattccacgaccttcttggtgttctccacatggcgctcaatgcgcaggctcagggtctcggtgccctgcagcagcaggaaggcgttgaagggagagatggtagcgccggtatcacgcagcaggatggcgcggatgtaggtaacaaaggcggcagggccggcggcgtccgcgaaggacacgccgtggtagctggggttgggggcagcgatgttgccgtacttgccgctggccttccagtcaaacttgccgctgtccacgatgatgccgcccagcgtggtgccgtggccgccgatgaacttggtggccgagtggacgacgatgtccgcgccgtgctcgatgggacggatgaggtacggggtgccgaaggtgttatcaatgaccagcggcaggccgtgcttgtgggcgatggccgcgatggcgtcgatgtcggggatgtcactgttggggttgcccagagtctcgaggtagacagccttggtgttgggctggatcgcgttctcgacctctttcaggtcatgtgcatccacgaaggtggtggtgacgccgaactgggtcagggtgtgctccagcaggttgtagctgccgccgtagatggtcttctgggccacgatgtggtcgccggcctgcgccagcgcctcgatggtgtaggtgatggccgccgcgccggaagcggtggccagagcagcgacgccgccctcgagcgccgcgatgcgcttctcgaacacgtcctgcgtggagttggtcagacggccatagatgtttccagcatcggccagaccgaagcggtcagcggcgtgctggctgttgcggaagacgtaggaggtggtctggtagatggggacggcgcgggaatcggtggcggggtcggcctgctcctgaccaacatggagctgcagagtctcaaacttataatcagacatagtattttccctctctatttgtacttaaagtattatttttactcataaaaatacccggcagcgtaggagttctcacctttcgtctgccgggcaaagaaatcgttctccactcagaaccttttgtctgtcttgggcgtcacattcgctcgcgcattcgcggcatagagggcaccgtacagctttggctcagagtttctttctcagcccgggcgctgtacattcgcccacagcggaagttggcgtgcagaagatttttccaaatcagcgtcatttgagtaccctcctttctgaatcccattcaacctacaaggcgtgtagtcttgttgtttgcattatatcttcctatacccacattgtcaataggttttatccgatttcctttcaaaaagttttaaaaagtcattctttttcgaaaaatgcaaaaagattgcattttggtcttgcatttcacccagaatgcgtgtatactcttccctgcgcctaaaatgcaatcaggttgcaatttaggcaactgaagcaaatttttggcggaacacaccttccctatactttatcatcaatcacgaggtatcacgatggaactttttctggatgtactggccgagtctctggtggacaccgccaagatgctccccttcctgtttttagcctatctctttattgaatatgtggagacccgccacggcgagcgcatcgaggccctgctggccggcggcggacgctggggcgctgtcccgggggccgttctgggctgcgtgccccagtgcggcttctcggccatcgcatccaacttctacgcctcccgcgtcatcacgctgggcacgctgatggccgtctatcttgctaccagcgacgaggccatccccctgctggtgtccatgcccgcctactgggacaagctggctctgctgatggtcattaaggtcgtctacgccatctttgtgggctttatgctggacttcgtcctccgcaaggccctgccccgcagcctgcggggcggctacaccggccacgccgatgaggtggactgccacgaggagcacagcgatgagcagggccagccccagcccatctggaaggccgcactccgccacaccctcgagatcttcgtctttatcttcgcgttcagccttgtgttcggcctcatcgtcgagggcgtgggcgaggacgtctttgccgccgtgctgggccggatgggcttcttccagccggtgatggccgcgctggtgggtctcgtgcccaactgcgccgccagtgtcctcctgacccagctctatgtcgagggtgcactccgcttctcgagcctcgtggccggtctgtgcaccggcgcaggcgtgggcctcgctgtgctgtggcgggcgaacccctcgtggaagcagaacctcttcatcaccggtctgacgtgggcctgcggcgcagctgtgggcgtgggcatccagatcgtggtcgcgtttatcgtctgagctttctatttttcagcatccgcatttcttctctgaacgggggagtgcggatgttttcttttatcgtgaaaaaaagcctttctcttcacagccttaccctctctgtctttgcttcgcattgccacagcccgggttgcggcacccagcatccgcttcgtgctctgaaaggcacttgcgtcttgctggccgcggccccaacagctctttcctgtttccgccactggcggcggtcagagctgttgctcccaaagggagaggcttttaacggcatattcttgagacaaatcccccattttgtgatatactcagctcatacagaagtatagtaaggagaacaccatgcaatataagatcctcgcaagcgattatgacaacaccctcgtccccttcggtgagagccagccccgcccggcggtagtcaaggccgtgaagaagcttcaggcctccgggggaaagttcgtgctgagcaccggccgggcgtggtctgccatcaaccggaaaggccagctgggcggcatccggttcgactacgccatcacctgcaacggtgcctgtgtcgtggaccgaaacggcaccatcgtcgccgagcatcccatgaccaacgaggagatgtacgcgctggtggatttctgcgaggattacaactacccgctgcaattcaatttccgggacgcatactatgcttactgcgagtatgagacgctccgcagctgctacacccagatgaacagcgtcgggctggactgtgtggacggcgaagaccaggaccgccacctcatcgatatgccccacgcggcgttctgcctcttccccgagggggcgctggagcggttccacgaaaagtacggccacctcggccttcacttcatgcagacgggcgggcagctgcccgacggctcccacttctatgacatcgtgcggggcgggatcgacaagggcgcgggcctcgcagacctctgcgagaagatgggcctctccctcgccgaggccgtggcggcgggcgactccgccaatgacgtggagatgctgaaagccgccggcctcggctgctgtatgtccaacggcaccgacgacgccaaagccgccgccgaccgcatcatcggcgacgtgcgggaggacggtctttctgccctcatcgaagagctgtggttcgacggcccgagggcagagccgtcccgccgcgacctcggctctgcgtgggagacgatggaacgatgagcttcgcaccggtctattccgagagcagccgcgccctcatcctcggcacatggcccagccccaaaagccgggagatggccttctattacggccacccacagaaccgcttctggcccatgatggccgccctcaccggcgagcctgtccccgcccgggaggacatcgaggccaaaaagggcctcatcctccgccacggcctcgccctctgggacacgctggaaagctgcaccatcaccggcgcgtcggacgcctccatccgggatgtcgtgcccaacgacattgcctctctcttagccaaagcgcccatcgaggcggtgttctgcaacggggccacggcccaccgcatctatacaaagtatctgctgccggtgtccggcatcccggcagtcaagctgcccagcaccagccccgccaacgccgcctgccgccccgaaaagctgcgggaggtctggggcgcggccctcaaagattatataaccgtttcgaacctgtaaattattcatgaaacgcttgcgttttatggagaaaaggatttattatggaagagtacaaggggcagccggccccttcgggaaaggagaacccccatgagcaaagtgatccgcaccacaaaacccagcgtcctgccgtggtatgcggcggcgctggtgttcgcggtgctgtgtgccgtgctgccggtctataagctgtgggcactgctggtggcgctgggctgcgctggcgcggcctttggtgcggctcagaaaatctgcccgccccgggtggtggagcacgaagtgcccttccacaccggcagcggcgatgtggacgagatgctggccgacatccagcagaagctggacgccctccacgcactgaacgaggctctgcccgacccggagctttccgccgccatgacccggatggaaaaagcgggccgctccatcgtggagacggtggaggccagccccgccaaggccaagcaggtgcgtcgctttgcgaactactacctgcccgacgcggtgaacatcctcgagcagtacgccagactcgcccgtcagggcgtgcggggcgaaaacgccgccgccatccggtcggaggtggagcacaacgcggcctccatcgccaccgcattcgagaaccagctggatgcgctgtatgccgccgagagcatggatctctcggcagacctgacagtattgcagaatatgcttaaaggacaagggctgagttga

SEQ ID NO: 1002 - DNA, 16417 bp, unidentified
  source 1..16417: mol_type = unassigned DNA
aaaagaattcaagctaaaacaaaatggatgcctccctctaaattcagagaagcattcatgatgtaaatataattattcaaatttttagcggtgtccagaaaactgggtagatatcattttgtggagatgttataatatacacaaatatttcggaggatttatatatgagcttttcaataatgcatatggttatagcaaaaacatggggtggcggagagcagtatgtttatgatgtctgcgctgaaatgaaaaatcaagggattacttcatatgttgttgtagacgaaaagaattttcaatttcaaaagaaatataaggaggtagctaatgttttaactgcaaacttgtattttgctgcaggcttgctttctgtgcgtaaaatagccggttggatagaaaaatacaatattaaaattctgaattgtcatagtgggcatgcgatgcttttgtgcatgctaataaaaaaattatcatcagtaagattggttatgtttaaacataatgctttaccttctaaacatgactgttatcataattttcaacgtagatacgtagatgctttcatatgtgtatcccaattagtgtataatttacagacagataccttatctgctttagaaaaagaaaaatattatcttatctataatggtattaacacaaaaagatttaacaagtataaagaaaaagaatttaaaagtcatggtaaatatattcttggttacgcagggcgtattgcgtcggacaagggaatagaagtaataatagaagctttagctgtgttaagatataagtatgatgatttatatttgcatattgccggtactgatgaaaaaggatatattaatgttttgcgtaagctgattggtaaattaaatcttcaggacaaagttgtgtttttaggacatatagatgatatggaaaaattttatcgttctattgatgttttggttgcaccttcggtagtaaaagaatcgtttgggttagttttatgtgaagcaatttattgcggattaccggtaatagcaaccaatagtggtgcgcaaagagaaattataacccaaaagcaatacggaactgttgttgataatcttaatgcagacagtttagcagaagcaattagtgaaacttataaaaataaagagagaaatggtagtaaaggagagatctacatttcgcgtaatttcaatatagagataacagctaaaaaattgatagaagtttacgagcacttgttaaaaaataatcatagacgactgttttagctgcagtttggtgatagaaaaaatcaataactaatagaatcaacaattagtatgattattggtgaatagtaaaaaattaaaatgaaggaatgtgtatatatgaaaaatattatgggaaaagtttcttgttctaatgaacagtcgcaaaatacgatgcgttcaagtaatattgaattgttacgtatcattgctatgtttatggtagtcttaggtcattattatgttaaaggtggttttcctgatgacagcataatgacgacaagtaagcttgttatgcaatttttaggctcgtggagcaaaatagctgtagatatttttattataataagcggttatttccttgttacacaaaaatttcgctggaaaaagatttggaaattttttggctgtacttatttttggagtttagctactttatgctttgtcttgtttgtcctaaatcaaaatgtagaaaaatcattgataatgaaggcagtaaatcctattactccgttaaactggtttgcgagagcctatttagttttatatattgcgtttccgttgattaacaagatgatagaacgaataagcaaaacgcagttaggtgtgattatagcaatatttacgacagctttttatgttattcccagcattagaggattatccctaggcggatatttgaattcattctttatgtttgctgatatgtattgtattggcgcttatttaaggttgtactcaaatgataaatttgaaaggacaattgaatttgtggggggggataagtacagttatattttatgcaataatattggtatcggattaccttggtggttctgatccttattatacagataaacataatgtgatgtatcatgcgtttgtaggatgcagtatattgggtttactaatggcggtagctttatttgttgtgtttaaaaattggcatttgccacacaatgctatgataaattccgtggcaacaactacatttgctgtttaccttatccatgataatggtgtaatcagtgcgtggttgtggaatgatatcataagagcaggcaggttttatgatacgatttttcttattccgcatatggttttaacagctatagtaatatttactgtatgttcattgatggaatttatgcgagaaaaaattttcgaaatttgtaagctgtctgagaaaaataaagttatgtgatttatagtgaatcgtttttgaaaatgcggagggtgaaagattacaaatatgaggtttttatctaaatctaaaatattttttgctagtttagctttaacatatattgtcttagtcggagtgtattattttacttccgttggcattcgaccgactactttatttttacaaatgcgtcgctatcttccttgtgctttagcagtagctatagctgtttcgatgtggaagcatgcaggattaaaattaaataaattgctgcctcatgtaatagttggggtagcatgggttctagtgtatcctatctgctattggctgacttatcatagtacgttgacttttatagataagcattatgatgaatcgtttggtgcgtatttttttgcctttatcgtttgcttgcgcctacttttaattaagtggcaagatagcaggataatagcctttggttttggattggtggatacaattgcagctttaataccatgcctgcagttagtttactttgcaaactatcagtatcctattacagaatctgcttctattgcgttattgcagactaatcctgaagaagctaaggaatatttgctgctgaatctgggatatttgggaattacggcatcagtggtagctttagttttaatgttactgtgctttgtgcatttaaacaaattccataataatagtactgtaaaactaagcaggaagtatattgttgcagcaatgcttatatgcttaactaccgttgcttatggtagtaagatgtttttcaataccggcgtaatgcagacatatgtatttgccaaagaatattttgaaggtgctaaccgctttaaagcttatcatgagcaaaattttgcagatttgactgtatcgccgtctaagcctgtattttccaaaccttccacggtgattatggttattggtgaatcagcttctgcttattatatgagtgcgtatagtgatgtaaaaaatgataattcaccttggctgaaatctatgcgtggtaatgataattttatcctgttcaaccatgcctatacaagcaggtgccagacagtgccggcattagagcgtgctctgacggagaaaaatcagtataataataaagaattcaatcaaagtgttaccgtaattgatattgctaaaaaggccggttatgaaacctattggttcagcaaccaaggctatatcagtgatgcagatactcctattactatggtggctaaaactgcggaccatgcggaatggcttagcgaggataaaagcttaaagggcaagtatcaatatgatggtgatttgcttaattgcttaaaaaaggttgatccgacgaagaataactttgttgtgttgcattttatgggcagtcatgaggattgcattaaccgttatccgcaaagctttgccaaattcagtgaacctggtgaatttgatatggttttgaactatgatgacagcattgcttatacagattatgtcttaagtgaagtttataagtatgctaatgcaaatttgaatttacaggctatgctgtattttagcgaccatggtggagatccttaccgtaagcgtaatcctgataatgcaggctttaagatgttgcagattcctatgttcatttatgtatcggatgaatacaagcagcttttcagggatagtgttgctatatttaatgaacatagaaatgcttactttacgaatgatttgacatatgaggttgtttgcaatttgctgcagattaaatctaatcgttacaatgagcatgaaagcttgttgaacagttcgtataagtataaaagggagaatttgactacggaactgggaaaaatgagactggcagatgataaagagccgcgaaaggcgcaatagagtataatgggtaggtaacaataagttgatttgtcagaagtgagcgttcactatgcatcaatttcaaatactggcaaattatgtccttgtagcttttaataaggcagataatgagattgaaagcaacttacttttggtgtaaaatattttaataggaatgatgcaataatattacttatgtatgaggtaagctaagagaattaaagcataagtcatattaaaaaattattgaatttgaataagttggagaagcaaacatatgaagcaaccattaatttctgtaattataccggtatatggtgtagaaaaatatatatcgcagtgtctggagtctgtcattaatcagacatataataatctggagattatcgtcattaatgatggaacaaaagatagaagtgcggagattgcaaaggagtatgctgcaaaagacagtagaatcaaagtatatgattttaagaatggtggtcttagcgtagcaagaaatagaggattggaaatagctacaggggaatatatttcttatcttgacagtgatgattggcttgatacaaaaatgtatgaaactttactagaaacagcaatgaaaaatgaagctgatatggtgaagtgtggaataatcgaaacgaacggtgcctcagaagagaaaatcacttttagcgatgtgaaaataatcaacaatgagcaacataaggcttttgaaaattattttaaaggaattctatggaccttagcttggaacggattatataaaaatgaattagctaaaaaagtaaagttccctgataatgtagtacatgaagacaattacagctccggtatgtttttatatttagctaaaaaagtattagtagtgccgttttgtggcaattattacagatttaatgattctggcataagcaaaggtggagtgaaaaaacctcttgataaaatactggcaataagcaatttgaaaaaagatttgcttgcgttaggttttgttgataaaaagcttgactggaagctgagtgttgagttctatcactttgtacgtggttggaatgatgatctgtatagagtggtagctatgaaaaaggatttgtatgaatatgttatgagtaatcttgatactagaagaaaactttcgtttttgtggatgggtcggaagaagaaagtgaagttaatataataattttaggagtttagatggatatggttgaagagattatggttagcgtgtattgcttagcatataatcacgagaaatatatatcagattgtcttgaaggttttgtaaagcaaaaaactaactttaaatatgaagttattgttcatgatgatgcttctactgataatacggctaatattattaaggagtatgcagagaggtacccagatataataaagccaattttgcaagaaaagaatcagtattcgcaaggcgtagaaatagttgataagtttatagggccgttgttaaaagggaaatatgtagcgatatgtgaaggagacgattattggtgtgatgagcataagcttcaaaggcaagtagagattttagagaatcatccagagtatattgcttgtgtacatcaaactaaaaccgcaaatagtagtacaggagaagttggcttgtattctaaattaagaaaatcaggagttattgagatcgaaaagatgcttcgtgatagagggcctgtatatcatacttcaagcctttgttatcataaggaagcgttagaagaaaaaccagatttttgttatatagtcaaaggaataggcgattatcctaaggaatttgctttggcattacagggggatatctattatttaaataaagtcatgtcggtttaccgccaatttacagagtcttcttggtctttaaaagttaaaaatgatattttgaaaaaagaaaaatactatcaagaaataatagccttactgaaggcagtgaattcttattctaagtataagtatgaagatcttttggataaaacaattttagactttaagtatcaaatgtggaaattgaatccgcaaattagagtattgaaggatgatgatttttcaaaactatctttaaggaaaaagataaagataattatgcggagtattttgaagaaaaactagcgatatagcttatgaggtgaattatttgaagaaaatcttacttttaggtggctctcgctatcttttgcctgtaattaaaagtgcacatgagcttggcttatatgttataacatgtgactatcttcctgataatattgctcacaagtattctgacgaatacgtaaatgtcagcattattgataaagaagcagtgcttgaggttgctgaaaagcttaaaattgatggaattatgtcttttgcaactgatcctggtgttgtaactgcagcgtatgttgccgagcagatgggattgccatctgttggttcatatacagctgtttctattttgcaaaacaagggtaaatttagaaagtttttgactgaaaatggatttaatgttccattggcaaagagctataaggatatcggtttagctttaaaagataaaaatctatttaagtggcctattatcataaaaccgacagattctgccggtagcaaaggcgtaaagaaagtggaaagttttgagcagatgaaatctgctattgaatacgcattgagttattctcataatgatgaatttattattgaagaatttattgaaaagaaagcgttttcttctgatagtgacagtttttcagtgaatggagagctaaaatttgtttcgttctctagtcagcaatttgatgttaatgctgttaatccttatactccgtctgcttatagctggccatcttcgatttgtaaagaaaatcaaaatgttctatttaatgaattacagcgtttgataaaactattggggttagggacgtctatttataacattgaagttcgtgaaagtatggaaggcataccatacattatggaggtttctcctagaggtggtgggaataggcttgcagaaatgcttagatatgcaacaggcgttgatttgattaaaggagcagtgaaagctgctgttggtgagaatgtagagcatattgagcaaaaagattttaatggtcattgggcagaggttattcttcatagtgataagccaggtgtatatgctgggttagaaatatctgcagagataaacagtaatgttattgagaaagatttgtggttaaaagaaggtactttggttggtggatttgaaggtgctaatgaagctatcggtacattagtgcttaagttcgaagataatagcaaattaactaggattatgaataatatagatgattatataaaagttaaagtaatttaatgcttggaggatatattataaaaggagcgtttccatgaagaaaatacttgtttttggtgctagtggtgatactggtagatatttcgtaaattatttcttagagaactacgctggttcagagtatgaggtaattgccttaggaactcgtgatacagattattttaaacaaattggtgttgagtatataaaaatagatatcactaacaaggtagatttcgatttattgcctaagaacgtttatgcagttgtggacttggcaggacttatgccagctagaatgaggggatataatccatacaaatatatagatgtcaatattgtgggcaatttgaatattttggagttttgtcgtaaaaatcatgttgatagaatattgtttgcgcaaagctttggagatataaaagattgggccgaaaaagaaaatactttaacagtaaatatgcctagaaattttagctttactactgatcatactatctatgtaatgagtaagaattttgctgtggatatgattgaaaactatcatcaaatgtacggcttgaaacgttttatttttagacttcctactatttatttatattctcctatagaccaatactatgtagatggagaagttagaaagataggttatagaattttgattgataaggctattaatggagaaccgatagagatttggggagatgcaaatagagagaaagatatggtttatgtaaaggatttctgtcaaatgctttttaaagcattgtttgttgacaggagcgagggctattacaacgttggcactggagttggtacaagcttattggatcaaattaaaggtattgttcaagtattttctaagcccggacatgaatctacaattactttaagaccagatatgcctaatgctccaaaatatattatggacatagaacctgctgtaagagaattaggatataaaccacagtatgattatcttagtatgttgaaagattttaaagctgaaatggaaaaacaagataatataaaggagtaagtaatcatgtctaacaatatttttgtaactcgttcttcaatgcctagccttgaagaatacgtaaatgaaataaaagacatttggcagtcgcattggctaaccaacatgggtgtaaagcatcagcagctgcaaaaggatttaattgactacatgggtgtagaaaagctggatcttgtggttaatgggcacttatctttggagctttctttgcaggcattaaatctgcagggagaggttattactacaccgttcactttcgcttcaacaactcatgctattgtgcgtaatggcctgaagcctgttttctgcgatattgatcctgtgacctactgcatggatgtaacaaaaattgaagcgctgattaacgatcgcacttgcgctatcatgccggtgcatgtttatggtcatatctgtgatgtagaagagattgaacgcattgctaataaatatggattgaaggttatttatgatgcagcacatgcttttggcgtaaaatacaaaggacgcggcattggtagctatggtgatgtttcctgctacagcttccatgcaacaaaggtattcaattctatcgagggtggctgtgcatgtcaccatgatgatgattttggcaaaaagctgtatgagctgaaaaattttggtattcatgctccggagagcgttgaagcagttggagcaaatgcgaaaatgaatgagttctgcgcagccatgggcctgtgcaacctgcgtcatgtggatggcgagattgccaaacgtaaggcagtagtagaacgctatagaagttatctggaaggtgttgagggcttgcagctcagtccgctgcaggagggcgtacagccgaattatgcttacttcccggttattttcgatgagaaggtatttggtgcaagccgtaacgaagtgttcgacgccttggcaaacatcggcgtaggcgcacgcaagtatttctatccgctgaccagtagctttgaatgcttccatggacaatatgatgttatggaaactcctgtcgccgtgcatatcagcaaacgtgtgctgacgctgccgttgtatgcagatttggctctggaggatgttgacagaatttgtgaagtaattttggggtgcaaaaaatgaagggtataattttagcaggcggctccggcacaagactttatccgctgacgaaggtaacaagcaagcagttgctgccgatttatgataaaccgatgatttattatccgctgtccacgctgatgctggcagggattaaggatattttgattatctctacacctgacgatacaccgcgctttgaagagctgcttggcgatggctctaagttcggtatcaacctgtcctatgcagtacagcctagtccggacggcttggcgcaggcttttctcattggcgaggaatttattggagatgatacctgtgcaatggtacttggcgacaatatattctatggcagttacttccgcaaaaatcttgctgatgcagtgaaggcagcagaggaaggctatgcaactatttttggttactatgtaaaagatcctgagcgctttggcatcgtggaatttgacaagaatcgtaacgtagtttctgtagaagaaaagccgcagcatccaaaatccaattactgcattactggcttgtatttctatgataacagagttgtgaagatggcaaagcaggttaagccttccgctcgcggtgagctggagattactgatttaaatagattgtatttaaatgaaggcaagattaaggtgcagttgcttggccgtggtttcgcatggctcgatacgggaactatggatagcttgatggaagcgtctgtttttgtacagacggtacaaaatagacaaggtgtagtaatttccgcaccagaggagattgcttatatggaaggattgattacgaaggagcaacttttggaatctgctaagctgtatggcaaatctccgtatggcgagcatttgaagattgttgctgaaggaaagtttgtttattaagtttaatgcataaaaacaactgattcgtaatcagtaggtcgtgaggtgtaattgatgaacattatcgtaactggtggcgctggcttcattggcagcaactttatctttcatatgctgacaaagtatccggactaccgtatcatttgtttagacaagcttacttatgcaggtaatctgtctacgcttgagcctgtaatggataatcctaactttcgctttgtcaaagcagacatctgcgatagagcggcggtgaacaagcttttcgaagaagagcagcctgatatcgtagtgaattttgcggctgaatcccatgtagaccgttctattgaaaatcctggcattttcttacagactaacattatgggtacggcaaccttgatggatgcgtgccgcaaatatggtatcaagcgctatcatcaggtgtctacagatgaggtgtacggtgatttgcctcttgacagacctgacctgttctttacggaagaaactcctattcataccagcagtccgtactcttcttctaaagctggcgcagacctgctcgtaatggcttatcacagaacctacggcctgccagtgactatctctcgctgtagcaataactacggtccgtatcacttccctgaaaagctgattccgctgatgattgctaatgctttagcagataagccgctgcctgtttatggcgaaggcttgaatgtacgcgattggctttatgtcgaggatcactgcaaggcaatagatttaattattcataagggcagagtaggcgaggtatataatatcggcggtcataatgagatgcgcaatattgatatcgtaaagctgatttgcaaggagcttggcaaacctgagaacctgattacgcacgtaactgaccgcaaaggtcatgatatgcgttacgcaattgatgcaactaagattcataatgagcttggctggctgacggaaacaaagtttgccgatggcattaaaaagaccattaaatggtatctggagaaccggaagtggtggcaggatatcattaatggcgagtatcagaattattatgagaagatgtatgggaacagataagaaaaacgagggcagcgttgctgacctcgtttgcactatatagacgtaagatttttaatgtattcagctttgccttcagctcttccgtcattaatgccagcctcataaatttgcttgctgaaattatccatagttgcgagtccctcttttagtggtacggcagatgccagtgctttttactgtattggttgaaactatactagcacgctattgtaataaagctcgtcaggacaaatatcctgaccttcaggccagatgacagtaaatccgtctgcctttgctaaagaaaaataagaaaaatccttgagcctgctataccatgaacctttgatataaggctttacgtcgaatattttagtttcaccattatcaaaaataacctttagagtataatccttttgtacagttacgctgatagcggttggtctaagcataattttcacctctaataattgttaacgtaatggttcgattttaaaatagccgtcaccggcagataacaaaatccaatttgcgtttaactcatcttcgtgtaaagcagtccaagcagttaaaagctttaattgcttgctggggaaagaaccttctaaaatttttccggtaaagtccataactatttcgtgctcattgtagacagcatgtaaatgtggtgtgttatgttttccgcctttttcactttgcatacgaataataataccataaaacattgaaatagccggcatactgttttctctcctttaattataatatttgctccagcaaaatacaacatagggtgcttaagaaaaaaagcaatacacatagcatccggaaaatccggataccataggtactgctgctaataatattatgctaatttctgtaacctgctttacaaaaaaatagcgtatctcctttctttacgcgaaaactgcaactttttattgacagttacaaagaattgctgtattatcatgcacataacttaataacgggcgatgaagagaagagtaaatgtacgagcttggcaaagagagccttcgtgatggtgcaagagggagcaggtggtgacattgaagatggtcttggagccgatgggctgagatgctggcatttaggccgtccgggtgtacccgttacagtgctggagtattaaagggtaaacaatccctgcgtacttgatgaggtccgtgtggtgacatatggatgaattagggtggtatcacgaagcaacgctttcgtccctgtatttttacaggaacggaagcttttttattgctcatcctcctgtagcaagtttaataatctgagttaggaaatgtaggaggaacaaacaatgccgattaaaatcaatgaccatttatccgctatctgccaactgcaggaggaaggaatttttaccatgacagagcagcgcgcgacaacgcagcgtattcgtccgctgaaggtgtgcgtgctgaacctgatgccgttaaagaagccgacggaaattcaactgctgcgccttttgggcaattctccgttgcagatagaggttgatttctgccgtactgtaagccgtgaaactacgcataccgataattcgtatcttgaccgtgcttatctggagtttgacgatgttaaggaccgctattacgatgcgttcttaatgacgggtgcgcctgtagaaactattccctttgaagctgtcgattactggaaggaaatagaagcttatcttgattgggcggaataccactgctattcaacgatgacactttgctggggcgcgcaggctgctttgtaccattattacggtgtaaacaaaacgattttgccggcgaagatgtttggcattttcccctatgggctgacagtgaaaaatcatccgctgctgcgtggctttgacgacagatactttattccgcagtcacgtcataccgcggttgatgatgatgcgattgatgcctgcaaggcgttgcaggtgctgtcccgttcggtagaaaacggtatcaacatctgcgctaccaaggatttgcgccgcatcttcgttttaggccatttcgaatatgatcgctatactttggctaatgaatatttccgcgataagaaaaagaatttgccgattgatttgccggagttttacttccccgatggcgatacaacgcaggagcctgtgtttaaatggcgcagctacgcgcatctgttctatatgaactggctgaacatcgtttaccaggatacgccgtatgacttgcacgagctggcaccggcgagcggtaacaagctggataaggctataggcgaatataacaaaattcttttgcagctgcagcgcatgggtgccgcaattcctgctaaccaataatataatgataaattgttaaaggagcgatagaaaatgagtgattttaaaatcaataccaaatgtttagtaggtggttataaaccgggcaacggcgaaccgcgccagattccgattatccagtcaacaacctttaagtatgatactagcgaggcgatgggcaagctgttcgacctggaggctacaggttatttttactcccgcctgcaaaacccgacctgcgatttcgtagcagctaagattgcggagctggagggcggtgctgcagcaatgctcacttcttccggtcaggcagctaacttctttgccctgttcaacatctgcgaggctggcagccatattgttgcttcttcttcgatttacggcggcagctataatctgattgacgtaacgctggcgaagatgggtgtaacagcgacctttgtttctcccgatgctacggacgaggagctggacgctgcttttcaggacaataccaaggctgtgtttggcgaaattatcgctaaccccgcattgacggtgctggatattgaaaaatttgccaacgctgcgcatcgtcatggtgtgcctctgatcgtggataacacattcccgacaccgattaactgtcgtcctattgaatggggtgcagacatcgtaacgcattccacgacgaagtatatggatggtcatgctgcctgcctgggcggtgcgattatcgacggcggcaagttcgactggctggcgcatgccgacaagttccccggtctgtgcgcaccggatgaatcctatcacgggattacctacgctgaaaagtttggcaaggagggggcttttattaccaaggctacggcgcagctgatgcgtgattttggtgctgtgcaatcgccgcaaagtgcgttcatcctgaatcttggcttggaatcgctgcatgtgcgtatgccgcgccatgtagaaaacgctcaggctatagcggaatttttggagcagcagccgcaggtggaatatgtcaactacccaggacttccatccaataaatactatgctttggcgcaaaaatatcttggcaatggcggctgcggcgtagtttccttcaacctgaagggaggacgcaaggcggcggaagaattcatgaagcgcttgcagcttgcggcaatcgaaacgcatgttgccgacgcgcgtacctgctgcctgaacccggcaactacaacgcatcgccagatgacggatgagcagctggcggtggccggtattcctgcaggcttggtgcgcctgtcctgcggtctggaggataaggaagatttgctggcagatttgcagcaggctttggcaggcattgcagagtaaagcgtgttagcactaaacaaagtttgaaggctggtcctgtgggccggtcttcttttttacatagttatgctatactatttatttacatcttgcgtattaaagtgtacaataaatgtaatcaagtctggaaaaaaacagatattttgcttagataaagctgtaataaatggaggaaggggctatgtgtatggatttgtataatgtacaaaagctgctgcaggccaagattctgaccggcagcgagctgatgcaccgccaaattgagtcctgctgcggcagtgacatgatgagcgatgttctggcctttaccaaacgcaacaccttgctgtgcacgggactgactaatatgcaggtagtgcgcaccgccgatatgacggagctgagcgcgctggtatttgtgcgtggaaaggtgcctgatgctgatattgtggcagcggcggcggaaaataatctgccggttctggctaccgattatactttatttgaagcctgcggcattctttacggagcaggtatccgtggctgcagcaaaaaggagtaagcaaaatgacagacagtaaatcagtaaaattagcatttgactgcgttggcggcgattttgagcgcgcaggcgaagcttcttctaaaataaaaaaaatgctgcagcgcctaggcattccggcagatattgtacgccgtattgccatcggcacctatgaggcggaaatgaatgttatcattcacgccggcggcggcaatgtagcggccgaggtgttcccggatgctacggtgattactgtaaccgaccacggccccggcattccggatatcaacaaggccttgcaggagggctggtctactgcgcctgattatgtgcgtcagatgggctttggcgccggcatgggcctgcctaatatggtaaagtgctccgataagtttgatattcagtccaaggtgggtgaaggtacgagcattacgatgcagttcaagcaccagagcgaggatttataagagattttaggaaacgaggtgatacgcaatggctcctcaaccaacaa

SEQ ID NO: 1003 - DNA, 6246 bp, unidentified
  source 1..6246: mol_type = unassigned DNA
atgaatatgacaacaaatgtaattaacaagggttggttcaatcccatatccctttccgtattgctgatactagttatcgtatcagccgttttgtatgtttcgaagattataaacataccgatattcatcctcttgcttcttctttccgggttggtgacttctgcaatccgcatagccgaccaatgggaacgagcggtagtccttcgtatggggaaatacaacggtttgaaaggtcccggcccctttatgattatcccggttatagacagtgtatcgacttatattgaccagcgtgtacgggtaagtgcatttaaggccgaacaaactctaaccaaagatacggttccggtaaatgtggatgcagtcgtatattggaccgtctgggacgtggaaaaagctgcattggaagtacaggagtaccaaaaagcgatcgaacatatcacacagactggtctaagagataccatcggtaagcacgaactgtcggatctcttgcaggaacgcgataagatagctgaggatttgcaacaggtcttagacagaaatacgaatccgtggggcatcacatgccagactgtcggtatcaaagatatcgccattccgcaagacctggccgaagcaatgagcaaagaggcccaggccgaacgtgaaagaagagctcgcgtcatcttgggaacagcagaaacggaaatcgcagaaaagttcgaacaagccagtaagaaatataccgacaatcctgtggcattgcatcttagagggatgaatatgctgttcgaaggcttaaaagaaaaaggatcgatggttatcgtaccgagttcggcactcgacaccatgaacttaggggctatgggaggcttggtttcattggctaagaacaacgagacaccgaaataaactattttctaacaacaaaaaatcaccatttatggaaatacacaaacaagggattacttttgtactccttctattaatctttacaaattgttcacgaaaaccatcgctgcaatggattcccttcagttgggaaggtgatacaatttcggggatatacattgaaaaagcttttctaaatgttccggtaaaaatagagaatttaccctacgaattcacaatgcagtttgatttaggagcatataattctgtcttttacgggaatacttttgctccttatctcaaagaagccccatctttaatgaacaaaaaagattcaaccgggatgtataagaatgtcaacctgcaaatagggacagtggagtttagcaatgccaatatcggattcatgcagaatttcggaaataaaatccctaaagattcacttcattcaaatacccccaagcatattggaacgatcgcatccgacatggtgcaagataaagtcttaatcattgattacaaatcaaacaggcttgtaatcacagactttttaccggctgaatacgaaaatctgctggctgaagaatttgaatcagaatatggggaaataaaattgcctttacggattaatggaaaaacatgtaaagtattgttcgatacaggttcaagccctttccagttaataacgacacaagaaagagcttggagcgtatcagaccttactattgtcgactctctaagcggtcctttatggtggggacaagaaataacattttatggctttaatgtaaccaaaccgatcgagttcggcggaaaagccttgaacaattcgaaagtctactacgccaaagacggcctttgggatagtatttatagtaccctcgatgtctggggaataaccggaaatgcttatttctttgaaaacaccgtgattatcgattacaaaaacaaactattcaggataaaataaaaattcgaacccatacttcttcattcagatgcaagcgtaagttgttttctacattgccgtatatattcccgacaacgtcaaatatattctcgacaacgtcgaaaacaacttacacttgcatcaaaacaaaaacacattgccatcttacatcaaacctttgccagagcttggtctaggtcatcaatgatatcatcgatatattcagtacctatactcaggcgcacaatggaaggcgtgatatgctgtccggccaactcttccggagtcatttgagaatgggtagtcgtatacggatggatcaccaggctcttcacatcagccacattggcaagaagggagaatatttccagcgaatcgataaacttccaggccgcttcctgcccgccttcgatctcgaaagtgaaaatacttccggcacctttcgggaaatactttttataaagttcatggtctggatggtctggaagagccggatggttcactttggttactttcgggtgtttggataaatactcgacgactttcagagcattggcaacatgacgctccacgcggagagacaatgtttccagaccttgcagcaggataaaagcattgaaaggcgagatcgtagctcctgtatcacgcagaatgacagcccggatacgagtgacgaaagctgtcggacccgccacatcggcaaagaccgccccatgataacttgggtccggtttgcccaaggtcgggaacttatcggcatttgctttccaatcgaaattgccactgtccacaatcactcctcccaagctcgatccatgtccgccgataaatttggtggcggaatgaacaacaatatcggccccgtgctcgatcggacggatcaggtacggtgtaccgaacgtattatccactatcaacggaatattatgacgatgggccacctccgccacagcatcgatattgataacatcagaattaggattaccgaacgtttcgacatacaccgctttcgtattctcccggatagcaacctccaacgcctgcaagtcattgacatttacaatcgtgtgggtaataccctgagccgctaacgtatgcgtaatcagattgaaggaaccgccatagagattgtcggcagccacaatatgatcgcccactccaagtatattctgcaaggcatacgtcacggccgccgccccggaagccaccgccagaccagccactcccccttcgagagcggcaacacgcgcttcgaaaactccctgtgtcgaattggtcagacgaccataaatattcccggcatcacgaaggccgaaacggtctgccgcatgttgtgaatcatgaaatacataagatgttgtctgataaatagggacggcacgagcatctgttgcgggatcggcctgttcttgccctacatgaatctgtaatgtctcgaaatgtaatttctttgttgccatagtcgtattattttaaattgttcttcttgctcattttccagcaaaactatagcagacagagatatcagacaagatatatggaaaatacagaaaataacgctatttttacggtcgtcaacagaacgcataaactgtatcaggatcgaaaaaaggattctgatagaattttattcttatgaacacacttgagaaattagacaaagtagacttgcagatcctccgtaccctgcaatcgaatgcccggctcaccacaaaagagctcgccgcgagtgtcagcctctcgtcgacacccgtattcgaacgcctgaaacgcctcgaaaacggaggatatataaagaagtacattgccgtgctggacgccgaaaagctaaaccagggcttcgtggtcttttgcagtgtcaagttgaggagactgaacaaagagattgcggcggagttcacaagaatcatacaggaaattccgcaagtcacagaatgctacaatatatcgggaagttacgactacctgctgaagatccatgcaccgaatatgaagtattaccaggagtttatcttgaacgtgttaggcacgatcgacagcctcggatcgctcgaaagcacctttgtgatgaacgaggtaaagcatgaatacggaatccatatttaaacgccaccccgtccctatcttacatttattacttcagtgcataaatccgctggatgatgtccacaaccttcatgccttccagtacgttggtcgtaatgcattccgaacttgcaccggaaaggacacggaccacattgcggatcacgaaattatggttctgggcggaacctttataagggccgtagtcatttcccggattcgtcggcgccagttccggcatttcataatctttaatatgacagtattcgacttcgttcatatactgtccgccgattttcacgcttccgttctccgcaacaatcagcatactgctttccatgttcctgttccagacagaagtggaatagctcaggctccccatcccgccgttcacgaagttgaaattcacaaagcccgaatcttcaaaagccgtaagtccggcatggttgaaatcggcaaagcgagcctggatattgcagatatccccgaaaagccagtacataatgtcgatgaaatgggagaactgggtaaaaagcgtccctccgtccaaaacggcatcgccatgccagccaccgggtttataatagcgctcgtcacggttccaataacaattcaactggaccatatagatcttgcctaacctacccgaatccaccatctccttgatccagacggaaggaggagaataacggttttgcatgacgcagaacacctgtttacggtatttcagcgaagcatagaccaccttctcggcatcggcaagcgtcagtgccatcggcttctcgatcacgacgttgcaaccggtttcgacagcctgaatggccattgctgcatgcaagccgttcggggtacaaacatttacgacatctatggaaattccgctctgcaatagctccgtcagggaagagaaaaacgggacatcgtatgcctcaatacccaattcctcacgaggacgaatatcacaaagggccaccaattcggctcccggatcgcgtgtcaccatctcggcatgacgtttgccgatatggccacaaccgataactgcaaattttatctttttatccataagcattcgatgggggtgtgtcaaaatctccttgtccccgcgcttgacgcggagccgcaaaaggacagaccttatcaatcagatttttatagggtcggttttaatgctatcccgcgtcaagtgcgggaacaggatagtttcgacacacccccttttttagagtttctgttatatattgctgttgtccgagggacatttccgtatgaataggcagggaaaggacggattcgcacaaacgggtggagacgtccaaattaccagatacacgggagatatgccggtaagcttcctgatgatgcactggtacaggataatagatcatggaagggattccctgttctttcaacaggcattgaaggacattccgcctgccatcttttacctggaccgtatattggtgatagacatgagtcgaaaatatcgatctcgcagggagaaccaacgaatcgcaggaggacaaagcttcatcgtaccgagaggcaacttgccgacgggtttccgtgaactcctccagatgcttcaacttcacatccagcacagcagcttgcaacgtgtccagacgggagttgcatccgatccgcctatggtggtatttgcattcctggccatgattggcaatcatgcggatacgggtagccaacgcctcgtcggaagtcatcaacgcccccccatcgccatagcaggctaacggcttggatggaaaaaaagatgtcgtcccgatatgtccgatcgtcccggcctttcgtacccgcccgtcggaaaagatataatcggcaccaacggattgggcgttatcttccactacatacagatgatagacatctgccaaagtcataatcggctccatatcgcaggcttgtccgaacaggtggacggccacgaccgcctttgtccgttccgaaacagccgcttctattttccggggatcgatattaaaggtacagggatcgacatccaccaacacgggcgtcaatcctaacaaagcgacaacctcggctgccgctatataagtaaatgccggtagaatcacctcatcgccaggctgaagctccaatgccatcagagcaatctgcaaagcgtccgtcccgttagcacaaggaatcacgtatggaacctgaagataatcagccaaatgcccggcaaaggttttcacctgcggaccattgataaaagcacaactgtcgatcaccacctgcatggcctcatcaatctcctctttgaaccggagatattgtccatgcaagtcgaccatctgtatctgttcttccaacat

SEQ ID NO: 1004 - DNA, 9377 bp, unidentified
  source 1..9377: mol_type = unassigned DNA
ctatttcaacagtgccgacgaaatcaccatccgctgtacttcggaagtaccttcgtaaatctcggtgatcttggcatcgcgcatcatgcgctcaacggggtattcgcgcgtgtagccgtatccgccgtggaattgcacggccttggtcgtcacttccattgcggtttccgctgcaaagagcttggcccgggcggcatcgaccgagaacgggagcttctggtctttcttgaaggctgcggcacgtaccagcaggcgggcagcttcgattttggtatccaggtctgccagttggaactgggtgttctggaactgtccgatcgtccgtccgaactgtttgcgctccttgacgtatttcacggtttcgtccatcgccccctgtgcgatgccgagggcttgcgaagcgataccgacacggccgccatcgagggtcttcatagcgatgttgaagcccttgccgaccttgccgagcagattctccttgggaacgatgcagttctcgaaaatcaactcgcaggtcgccgaaccgcggatacccatcttcttctctttcttgccgatcgagaaaccggggaagtcgcgctcgacgatgaatgctgagataccgcgcgtaccctgcgacttgtcggtcatcgccatcacgatataaacgtgtgcgtaagcggcgttggtgatgaagattttgttgccgttcaggatatagtggtcgcctgcatcgactgccgtggtctgctgtgctgcagcatccgtaccggcgttgggctccgtaaggccgaaagcgccgagccattcgcccgagcagagcttgggcaggtatttcattttctgttcttcggtaccgtgctcataaatcggagcggcgcagagcgacgtgtgtgccgatacgaccacgcccgtagtggcgcatacgcgcgacagctcttcgacggccatcgaataaaggatgttgttgccgcctgcaccgccgtagttgacggggaagggaataccgaagattcccagttttgccattttctctacggtttccacagggaaacgctcctcttcgtcgatttcggcagccagaggtttcacctcgttttcggcaaattcgcggatcatttgccggaacagctgctcggttttggtcaattcgaaattcattttataagtatggttttttaatgattttaaacagtcataccgccatctacgctcaaaacggcaccattgacgtaggccgcttcgtcggatgcgaggtagagataggcggcggcgatctcctcgggacgacccaggcgacctacgggaactttggcccgcatgccgtcgagtacattctcaggcatcttggcaaccatttcggtttcgatgaagcccggggctacggcattgaccgtgatacccttacgtcccagttcgcgggccatcgttttggtcataccgatcaggccggctttcgtggccacgtagttggtctggccgaagttgccgtaaagccctactaccgacgaggcattgacgatgcgtccgtagccggcttcgagcatgtagttcaacacggccttgcagcagtagaacgtgcccgaaagattgacgtcgatcacgttctgccactgttcgacggtcattttcttgagcgtgctgtcgttggtgatgccggcattgttgatcaggatgtcgatcttgccgaacttgtcggcgacgcgcttggccgcagcggttaccgcctcgaaatcgctcgtatcgaccttgtcgaaggtgatggcgagcccttcggctgcggcttttttctccatttccttaccgcgggcttcgttacgtgcccatacgactacctgtgcgccttcgcgtgcgaaacgcagtgccgttgcttcgccgataccggccgtgccgcccgtgacgatggcgactctgttctcaagtcttttcatggttatctctttttagatgaattctttgttgtgtttgagtttggcggtgcccgtgatgcactctttgccggcagcatcgagcagcaggcatttgatcgtaccgatgtgtttttcggtgtttacgtcgattacttcgaattcggccgtatatttctccccggcgaagacgggtgcacggaacgacatctcctgcgagagatagatggtgccctgtcccgggaagagcattccgaagaccttcgagaatacggaggccgaaaggaatccgtgcacgatgggacggccgaacggggttttggctgcgaattccggatcgaggtggatcgggtttttgtcgcccgtgatttcggcgaaagcgatcacgccttcctgcgtataggtcacttcgtgacggtatttatctcctgttttgatcatggcgggcctattttttcatgggtttaagatccttggacacgatcaggtgcgcttcggtagcggcctgaacctgttcgacggtgaattcgggattgatttccgtcagcacgatgccttccggggtaatctccatgacgcccatttcggttacgatcatgttcacggagcctttggccgtcagcggcagcgtacatttcttgaggattttgggtgcgcctttggccgtgtgttccatggccaggatcaccttgtcggcacccgtgagcaggtccatcgcaccgcccatgccgggggctttcttgcccgggatgatccagttggccaggtcgcctttttcatcgacctgcaaggctcccagtaccgaagcgttcacatgaccgccgcggatgatgccgaacgaggtggcgctgtcgaagcacgaggcgccctcgagggccgtgacgaatccgccgccggcattgataaattcggggtcttcctcgcccggtgcgggggtcgggcccataccgagcaggccgttttcgctctgcaggaagatttgaacgccttccggcaggtaatcggggacggccgtcggcagtccgataccgaggttcaccacgtcgccgtctttgagttccatcgccacgcgtttggcgatgatttctctgatctgttccttttccatagatttatgtcgtttttgtctgttcgtcgtactgtcttgaaacggggcggttctggaatccgggaccgtttcctatttgcggtgcattctgcgggccatctcctgggcgatgaacgacgccacgtcgtcggcgtaggtgttcatgccgaagccggcgtcatagcccagctctttggccagttcgtgcgagatgcgcgggccgccgcacgccagaatcactttgtcgcgcagcccttcggcttcgagcatttcgaccagctccgtgaggttcttgatatgaatgtccttctgggtcaccgtctgcgaaaccagcagggcgtcggccttgagttcgatcgctttggcgatgaactcttcgttggttacctggctgcccatgttgagggcttcgaacatctcgtagcgctccagtccgtagtgacctgcgaagcctttcatgttcataatggcgtcgatacctaccgtatgggcgtccgtgccggtgctggcgccgatcaccacgatcgggcggccgatctgctcgcggatgaagctgtccgtttcggccatgtcccatttggtcgattcgactttcgggacatggatattcgaataatcgaccgtatgggtacagcttccgtagcagttgaagaacgtgtaaccggccgtcagctcccggtggaataccacctgcgggttctcgaagcccatctttttcatcaactgtttggccgcttcgatggcttcgtcgccggcgggcacgggcagtgtgaaactcaactgcgttttgccgtcgttcatcgtgtcgccgtagggctttatctttttcaggtcgagggtctggtcgaaatccctgccttcggttgaatataatcctccactcatagaatcaatatgctaatatagttaaaataaggcgtttggtcgtgcttgcagcatcggaatatcattttttcgctgcggcgcgactgccgtttttcataatctccacgaaggggttgtagtagttgcggcccttgctgctcacgccctccagacccttgccgccgttcatggggcgtttgatgtcggcgaagattcccttctcgagcgccgagaagagtccctctttttcgaggcgttcgagaagtgcggtagctttgtccaaaacctccttggcacgtttgcggatcagtccgccttccttgaactccacttcgtcgccgatgttcttcatgttgttgaagatgtagcgggcgttctcgatggaaaggtagcggtccgacatgaacggggtgtggatggcttcggtcggcatacctaacaactggatgccctgcgaagtccagatgcccaccatgttgaacagtgcgtcctggatatgtccccggaagatgttgccggtcatgaacttcgtcggcggcatgtatttcagcggagccttggggaagatctcgcgggtcatctgcgcctgcgccagctcgtagaggaagccgttttcgagcatcggatccatctcgaaggcgtgtcccagacccatttgctcctcgggcaggccggccagcagggccagttgttcgttgatcaggtcggaagccagcaccgtgtgggcttcctcgaccgcgtcggccgtggtgaggtagttgtcctcgcccgtgttgatgattacgccggcgaagccgttgattacgcgcgacatatattgatcgaccagcgtgcgctgcatgttgatgtcgcggaacagaatgccgtacagggcgtcgttgagcatcacatccagaccttcgagtgcacccattacggcgatctcgggcatgcagagtcccgagcagtagttgcaaaggcggatgtagcggccgacctcttcgcctacttcgtccagagccttgcgcatgatccggaagttctcctgcgtggcgaacgtgccgccgaatccctcggtcgtcgcgccgtagggcacgtagtcgagcagactttggcccgtagtgcggattacggcgatgatgtcggcgccctgtcgggctgcggcctgcgcctgtacgacatcttcgtagatgttacccgtcgctacgattacgtagaggtaggggcgcggcccttcgccgatggtggcgatgtagttttctcgacgctggcggttggctgcgattttggcgatgctggcgtcgatatacggtttcagcgccgcttcgcgctcggctgccgtacatacggccgagcgggtgatgtcgagtttgccggcagcgatctcttcggcgatttgctggggtgtgagtcccgtttcgacgatcgcgttgccgaggaagaacagggcgccttcgcccagtacgtttttctcccgcagctcttccaccaccacgttcggcagcggtaccgcgttggcatccacgccgtcgatgccgatcagacggcacagcgtccgctcgacggctaccgtcgtataaccttccacaaaatcctgcaccccgttggcgatcttgcgcgctacgtcccgggcgtgttccacctggttaaagtctattcctaatttgcttttcatatcgttcatgtaggctgtgccgtacggctgccgtcattggttgtttttgagttcttcgttgcgttcgattcgccggaggatttccgggtcgatgcccagaatacgggcgatccggatcgcttcgtgcggaacttcgtccgtcgtgacctcctcgagcgagtagtctatgaaatcgttgatgtttttcagcgtgatcctctcctccgcgttcgtttccgagaagccttttaccttctgcttgcggtacggagccgcgatgccgttgtagtgggtggttacgagcgaagggacttcgtagtcggccagaaattcgaggacgccgttcacgatcgcccttccttcgaccggattggtcgtgcgggccggttcgtcgatgagagccagcacccgcctgcctgcccggacgcttttggccagttcgtccatccgcatcatctcggccgcgaacgacgagagtccgctgagctggtcctgtccgtcgccgatggagcagtgtacttcgtccacaagggccatttccgccctttcggccgcaatgtaaaatccgaattgcagcatgtactgggccagctcgacgctgtgcagcaacacggttttgcccgacatgttggcgccggtgattaccgtaggtcccgtcgtcaggcggatgttcacgggctggaatcgcttcccggccgcttcgagcgaaatccgcagctcagggttgaacaagcctcggaaggaggccgtgtcctgcgttatcgcgggacgggtaaggccccagtcgcgggcctgcatcgccttggcgatcaccacatcgagccatcccatcaggtcgagtgcctgttgcaacgctttgtggtatttccgcaattcgacggagagcctctcccgaatgcagtcttcgatctccacgctgcggaaatagagctcctgcacttgagactcgtcggctccggcctgtttgcgggccttgatctgtttgcgcagggtcgtcagctcctccgagtaggcgtcatagacgaagaaatgggggagccggttgccttccggatcgagcagatcgacgaccccgttcagctcgggaagttcggcaagacgcccttgcgatgccagcggtcgaagctcttccgccagcagcgcgaaaaacttcaattcgaacagctcgatgtcgtcgaatacgcagttgccgcccgtgcgttcgatcgttgagcggatgtcgcgcaacagggccagtttgcggcgaatcgtttcggtgcggtcgcgtccctcttcggtttcgagcaggcgcagcaccgaggtgatacggtcgtgttccgccgtgatcgccgactcctcgccgagccatgtcatttcatggagcatacgtcgcccgacggaggaacagatctccattccttcgacgacgcagcgcagtccgctggtatgttgtatggcctctttgagtcgcattcgctttctggttattcgatgcaattttacacgggttcgcgtatttatttcacggccttctgccgtgtcagagcgtttgaccttcctctgactcccctcctcggaggggactttaagatcctcgattctgttcgtgtgagccgtattcgtttctattcgggcattttctttacgtcgtaaaccggtatctgcaacgcctcctgcatcgcttcgcacaactgtcgggagtcgagcaccagccccgacggagccgtcggattgaccgtgacggccagcagccggctgcggtgtaccaccctgatccggtgcccccggcgcaggaaagcgtaaaacgcttcgggcgaggcgaacacccgcgtaaagtcgcggatgatcaactccacttcccgttgttgcgttcgcagcagttggaacagcttgtccgtgacgatgccggtggcgtaaatccgccggccgtgccggaacaggttttctccgctccgttcgagcatcagcaccgagggtaattcgaggtcgatcggttcgccgccgtcgctgacggcccacaccccctgcgtcaggggggcgagccgggtacgcagcgccttttcgatctcttcgatcccgatcagttcgtaaacgtatttcgtcttgcggaccagttcgggaatatttcccgcgacggcagctcccgtggccaggatcatcgcttcggtgaccgctggcgaagccaggctcaaccgcgacagggcgccgtccacgatcgtcgtgcctacgccccgggatttgagcaggtcgatcagggctttcaggcccgccgtgtccgaaggtccggagagcagcaatttgccgctcatcttcgcgcgggccgttatcagccgcccgagcgccgtccgttccaggctcacgtcgaggacctcggccgcgagccgtttttcccggtagtgtttctccgaggtgacgaagatcattccctcgggaatctcgatctcgggtttcgctgtctggcacacctgatcccggctctcgccgtcgattccgaccgaagtcagggcgaaacggtccgcccgaccaccgagttgtcccagaatgtagttcagacattcggttttacccgtgttcttctccaggccgacgatggccaggctgccgaaatccgatatgttcgttacgaatcccaatccggtgcgggctggtcttgcagcgttacgttctaatggttgtggttacgggtcttgcggctcaattcggacggctcgagcgaaagacgtccgccgctcaacaactcggccacgccttccttccgacgtgctttctcgcactcttcgcagtggcattcgtccttgtagtcggtcggttccgtataggtcgtgatcacaccttcgtagttgcggagtaccacgcggttcggagcctgcgagatgacatagttcggcatgacaggaatcttgccaccaccgcccggagcgtccacgacgaatgtcggaacggcgtaacccgaggtgtgtccccggaggttctcgatgatttcgatgcctttcgataccggagtgcggaagtgtccgatgcccagcgacaggtcgcagatataaatatagtagggacgcacacgcatcttcaccagttcgtgcacgagctttttcatgatgtgcgtgcagtcgttcacaccgcgcagcaacaccgactggttgcccaggggaataccggcgtcggccagacgtgcgcaggcctgcttcgattcgggggtcacttcgttcggatgattgaagtgggtgttcagccagatcgggtggtatttcttgagcatgttcaccaattccggtgtgatgcgttgaggcagcacgaccggggtgcgcgagccgatgcggatgatctccacgtggggaatggcacgcagacggctgatgatatattcgagtttttcgtcgctcaccagcagggcgtcgccgcccgagagcagcacgtcgcgtacctgcggtgtacgggcgatgtagtcgatgcagtcgtcgatctgtttctcgggggttgcacagtcgtgctggccggcgaagcggcggcgcgtgcagtggcggcagtacatcgagcacatgtcggtaatcaggaacagtacccggtcggggtaacggtgcgtcagacccggtacgggcgagtcgctgtcctcatgcaggggatcttccaggtcggcgggcgagcgcttcagctcctcgacggtaggaatggcctgcttgcggatcgggcagtgcggattttccggatcgatcagcgtcaggtagtagggcgtgatggccatacggagcgttttgagcgattcacggatgccttcctcctcttcagcggtcagcttgatgtatttcttgagctcatctacggtctcaatcctgttttttacctgccagtgccagtcgttccattgctggtcggtcacttcgggaaagaattcttttctgcggctcattgcgggtgtgagaggtgtcat

SEQ ID NO: 1005 - DNA, 29036 bp, unidentified
  source 1..29036: mol_type = unassigned DNA
ttatttcagttttgcgaggatttcatcggcactcataccgctggccagcagcttcttcagcacttcttcggcctctgccttctttgcttcttcggcagccttggcgtctgcgatagactttttccgttccaaagaagacaactctttctgggcggtcttgagagcagccgttttctctttcaggtcagctttcagagtgtcgatgtttgcagtgatagaagtgatttccgatgtgaggcaaacgatagattcctgcttctctgtgattcgagatgcaaagtcggtggtgagcttcgatttattcttgctgcctttcgttctgggcactattgcgtacctccatatcacaatgttttcgttttttcgttcaaatcagaaggtttcatatcaaagaagtcaaacctcaagttgtcaataagacttgccggaatgctaaatctttttaaatactctgtatcaacatcaaccttatttctttctatttttgtagtttcaattcccagcaaatcaataaagctttctacatctgcttgttctgcattagttcctggctctattgttaaaaaaagtgtatcttccaaccccggccatacatcgaaacaaattacatattttatatcttcataaaagcatacatactttgttcgcctcgtttcttgtgtcgatgttttctgaaagcccagaagttcaaacatatgattggcctcataaaaatcatcaacctccaatttagcctcctctggattattttttccggtcttttttttatatgttatagtacactttgaattattttcacaatctatgtctcctactcttatcctgagccattgatgttgatttttgttgctcgaatcagacaaattgggaagttgataaatagtccttgtcattattacattgtccataataacatgtgcctgatcggtgcgagtacttataacattcacaatttcactttgtgatgctaccggaagaatatatttacagcgaaaatcagtaatcatgtattgcattcctttcatagtgcggcataatcgctggaactgtttccccttcaataaacttgcttcgtattgtcggatctattttaggattataatgttccattttatactcagcaacaattctatcatatgtatccagcatcttttttcgtgtaatacgattcataccatccgggattgcaacaggcaccttatgggtaaaatactttaaatccgtagtaatcagtttataatctccagcgggaaattcattcttatatggatgcggcgtcaggaaattaatatatatttttagatattttctatccacatttagttttctgaaaaattccatcaaactttcatagtagtcctttgtttctccagctattcctaaaataaatgaacaatttgccacaattccacattctgttgtttttcttatcaattcgcttaaatctttagctccatacctatagcctttttttacttttctaagcagtgcttcatctggagtttccagaccatactggatttctcttactccgtaggtataaagcatttttaaatcaatatttaagcttctcatttcgtctacacgagctcgaattttaaacgtgatttcatcgcactctttatgacattcttcaattacgctaagcagtctatgttcaccgtataaaaagaaatcttcatctttaattgaaaaacgtcgaaatcctgcattatataggaatttaatttccgctataacacttttttcatttctctgataagtacgctgctggcattctttctgtacagagcaaaaagcacagcgttggctacacccccgggttgtgaatacatcaattttctgatcaagaaatctcccatatacattaacaatttctttccacgttcgaagttcaatatctggaagttgtgcagttttccatacggtcaaattatccaaattgttcttagatattgctccagtaacataatcaactgtggaacttccacctgtatacctttcttttgatagttcctgaacaagtttatacaatggaactgtactaactccaggaatcacataatctatccatgggtactccaataaatacttttcgttactggaacaaaaaatacctccaacaaatgtaattttccctttttccttggcaattttaagttttcttattgcaggcggaacttcacaggagcaaatactaactcctaccatatcgtagtctttaataacatcttcaaaattgctaatttttcctgttcttaactctagccgttcatcatacacttgaacgttcgtttttgttccctgcaaattaaaatagctctttaatagccacagtccaagcggaactccaaaatcatagtctttaattggaaaatctatcgcagatttaaccaacagaacactaaacacttttttcgtgatttttctcttttccaaaagagttttatatctaaacagaggaatttcttgtacttcactattgcatttcatttgtggcttcgggatattttcggaatactttgatttttttatagtcgccaacaaatcatcgtatatatccttcaatgtcacactcttttgatttttctcgcttttatcaatctgatgcttaagtgcctctgtgaaaaagaaagtaaatgcagcatgcggctttccttcaatctctagttctttggcagaattgaatggattgtcagtggccgtcaaaattgctccaccttttatactttctatttttaatccttctccctccgtttctctgtcatttcccatagaactcattattgcactactgcagcaatccaatactacaatataccgccgaattttgcacttgttcaatttggataatagccatttacatcgaatcccgatttccgcttcatcaacatttttcattgtatctgtagtagataataataaatcactgttatcagcagtcagataaccatgcccacaaaaatacaaaacaagggtatcatcaccattttgtttatactcgttcaaaaagcgactaatatttttactcgcatcctcattagtctcgtctacatgccaaaaaattctgtcacaatattttattaatattgatctcaacctatccatagagtttttcactcctggtaagttgatactctcatctttatatgtacttgttgaaagcgcatataaggtaaaattacctgatattgccatttctctcactcgcctttgttttctgcagcatcattacaataatcaagcaaatatctcatatcttcttctgtcggaaatcttccactttctgatgtatatgtaactgattttccagccttatcatttttcaaagtaaattctacttttctgttctttacccaaactttataggccgccagaagaaccggcatcgtagccacgacagacgagattattacagtaagactcgacgagtctacccccatatctcctgcatgatctaccttttccatttcaaaggcaatatctccttttgaaagtaaatcacacaactcagacacatccgtgacggacatttcatttatatcaaactccataaccaacttttccatatcacacagcctcctataaagtcgcaattcaaccacataaattttggcatacccagttttatccctgcacacctattatttgtagtatatcatagacattcaaacaagtcattatatgtacgacatttttttagttcaagaatgagtatctttcatctcatcatatgcaaactgcttccgcgttgcccagacactttataatcttttgggctagtttgattttctactggctgtatcgcacactaccaccctctccccgcacagtctttatcacatatattttgttagattaaaatcgctattaatcattaatccgtactttgcagttgattacgcaaatacctcaacagtctcgtttgataatttgaaaagaccccggagctaaaactgttccttataaatacatctatatccctccagttttctgatggattattctctgaaacttctttcactattgttgcaaatagcttatccagctttcccgaatttgttacatttttcattgcaatatatagtgaattgtaatagtgtggcatccatccagatttcttagctgcttggataaactctttaaaaacaccctcagtttccaataaataatcaatagaaagataccgaagtatatagtattttccattatctaccgtttcttctacaatatcgcgatttaatccagcatttatgatgtcctgatgcacttcatcgcttagtcttatacctgtagatttgaagctatcctccatgccatatgcctcaacatatgcgtccccaacaatcaactgttttttcaaattatggagttcttcggctggaattctggcaaagtttcctttagcaatcgcgcctcttatgagaatgctgttttgattaaattcttctctgcacagttcaataataaggtccatcaattctgacagggttttacaatcagaattgtccgaatagagaacaactgaatcactcacaacaaaccctttgattttgttttggttctgattctgaccttttctctctttaacactcctattgtagcgagagaaaacatgatacacaacacttgaatagcgttctatgtactctattcctttctcttgcccaagttctttcaacttattcttaaatccgagaatatccaagaaagccacatatttcatagtacatattcctatattcacagcattacctttacatcttagccgattacagatcgttgcctgctgctcaccacggagaggtgtgcaaagtttcgagcagcaatgggagctcacactcccacaatttatgtgttacatcctacaatactcttggaggtgtaaatcacatgaagaataaattagattggttcgatgataactggaattggaacgtacggcccatacaggtactgtatgaacttctactttcccctacttaccggtggccgaggaaggtaaaagaagtgtgctcgtataagtggtgtgttgagtttccaaggtgtccacgatgcgggatctctatggaacgtgagtatcaacgcttctgcgaccgctgcagccaaaggctgaactggagtgggtttgatgatgtagaagtacggtacatagggtgggacggagttgaggatgaagattgattttatgacttaattaaaccacactgcgccagttcttgcaaggacttggcacttttatctttctcggaaaggatgtactccattactggccacggattcgtttgccagttgaattccgaatcgtacctcacgactttagccgcagttccataaaagtcgttgtctacacaccactgcatcaaggtgtcctcttccagtgtcaggtagccatgggaaaagccgcgtggaatcaacatctgcttctgattttcaaaggagagaaactcaccgtaagcatagccaaaagtatctcccagtcgaagatcaactgccacgttgaagatcgagccatgcagacaggataccagctttgcctgcgcgtgatctccttcctgaaaatgcaatccacgcagcgttccggctctcttgctgaatccttggtttgtttgagccacatggaatccctctgctgacacagacagccacccacgaaaatcttcaaaacgctgtgtttcaattattattggctttaccattgctttctgtactcccttggactgattccttctacttttcggaacattcggctaaaataattcgcatcacccatgccgaccgcagctcctacttcgtctacagtcatgtccgtaaatcgaagcaactgcttagctctggtaatccgctttgcaatcagatagttgttgaccgtagttccgtatgtttctctgaaaattttggacaggtaaaacttgttaataaagaacttttctgccaactcttccagcatgattttctctgtaaagcgctcgtctaaatactccttcacggctgctaattccagccgctttcgagatattgtaacgctctctggatgccatgactgctccatcaggagagtcaatagacttcccagcttctcattgatccgcatatctcgtatgtaatcggatgaggaagctaagttatagaggtctgttagaagagaggtgaaaggagttagatcatctggatgaaacaccggccggccacctcgttctttatacttttcatacacagccggaagggatggggcgtagaagtggcaccattgaagagaccagagattatcggaagtagaatgactgtacgctttccgacagttgatgaatacgcagtctccctcgctcagctgataggtctgtccctcgtaggaaagttcaccctcaccagacaagacaacgaaacacaggaaagacaccagatccgatctctgggatacgtgtgggtgaacagcgtgcaaagagccgacctcctgtagatggagcaatgatgttctggcaaaggttgatggggtgtaaatgattcgggaggagcttacagaagaggactgtgggttaaataattcttggtccataagctgctcctttcctcttactcctttttccttcgcttatatccaactggtggaacagcatccttgggaatatgccacggcgatccttttccatcttgattgcagtttggaattttaccttccctgcaccacttggaaactgtagcctgtgtcacgccgtatttttcagcaaattctcgtgttcctatagcttcactcatttatgtagtcctcaaattgatgcattcaaatattacgctattaatctttcaagcaaaactcttctattacagatctgcaaataaatcggctttgtacacgccgtcctccagcatcttcttgaagctatcctttacagctgcaacatcctcatggtaggtcatgccgtaccatgtatcattagtcttcagaaccttcacggacatttttccctgctccagcagatcaccgatgaaaataggaattaaatactctgctttcagcggatttcctggtacttccttctcgaaaaactctttgaagccttgctccaggacatccaagaactctggagttaatccccacatattcatagaaaccaaagaattcacatcaacgactacgctgtctgcctccactccagttacagcctttacgatattcttggtctccacaacctcagtcagattgttttccttatccatcttgcagataccacgggtcacgccaccattgtcggaaagtgtattcttcagcacaaaacctgccatgcaggatttcccgccattcaccagatactcatgaaccgccttgaaaccttccttgccataataatcgtctgcattgatcacaataaacggggtcttgatgaccttctttgcggcaagcactgcctgaccggttccccacggctttgtacggccttccggcagagtgcccggaatatcgttaatatcctgaaaagcgtagtctacagttacatcatgagcggagcaaatagctgcgatacgatcaccgattacctctttgaactccttctcgatatccttacggataataaataccacatggttaaagcctgcctcaattgcatcatgaattgaataatccatgatgatatgatttgaagcatccaccggctccaactgtttgattcctgtttcaaaacgactgccgatcccggctgccatgataagtaatgttgtgttcatagtttttcatatctttttctgataatattcttttaccataggtttcgttcttcacatctcagccgcccaaaatcgaccgttgcctgctgctcaccacgaagaggtgtgtgaaggtttgagcagctaccgtgtaggattagtacacggctttattttgcctaacgcagacgcaaattcgagagcattcgactttttagttgcattttacgtttatattttaatactagggtctgacgccagatatcggtaaacgtcaaatcctgcgcctacccttaaatataacgccgcttttatgagcggcgtggtttccggcattcctcgggaagctcctctgcccagggcatcagatggtccagttttgccggatctatatttccttttttatcacaatacttaggcagctccgtgaggatatacctgaagtagtagtatgggcgcagattgttcagctttgctgtttctgaaatactgtaaacaagagcgctggctccggcaccttttgctgtgttatggaacatccagttctttttgccgatacagaaagtccggatagcccgctcggaagcggagttatcgatgcaatcgtccatcatccgccacgtggaggccattagacacagatgactaccaccctaataggtggcatttcgattagattatttccttttgagaagcataatcaagttcataattttacctttattagccatcaaaaaaactccatacattcccaaaaatataatcgtacctaatccattaccgaagacattaattgaaatgataaacccaagtactaggcttgattccaaaataatacttgaaccaacttttttgttgagcatccttgccaagtacaattctgaaataatgcttctgagcgcaaccgacaaaaccatcgagtaaacaactgccgttatgcttcccaaaacatgtgccgaaaaagagcaaatgataaaagagattagtgcggctcccgcgttaataaaaagcaaaaaattttcttttcttagtactttgaaatatgtattacacagcatctgcatttttccgtcgtaagtgcacaatggcagcaaaactgcaatataggacagagactctttatagtccggtaaccaaattccaaagatcaactgcattggatagtatgcaacaaatacaatcggtagtagtattcccagcgcatctcttagggaagaatatatttcatttcgtttgcttttatcagtttgccttagagctgggaaaagaaccatacttacctgaccaataaactgaagaaaaaaatttgtcaaagatagcgaaaaagaaaatctaccgaatgcagtgattccccataccgaatctattatttgtcttccaatacccaaaataagtgaaccagcaatgttagcaaacaacagtttggcgcctatcgatatacttaaagccatatccttaatcacatcaaaagtgattctaaatttggcaaatacaagctcctttgcttttataatgcaatatattaatgcaacacttttactgaatgtgtagccaataatatagtaccggaaagaacagccccttatcacaatggcaataagtacaaatccgataaatattattctatcgatcataatcgatattgaatagactctcgtctgattaactgcttgaaatatatatcctaagtatcccgccgcattaaatatgagcatgtatataaacgtccaactcagaacggtcatacgcatggattctatttgtactaaagaaaatacaaacaaggctacaactgcaatcgaaaactgaatcagcaatgacagcactaactgcgtcttgtatttgacatagtctaattcctcgtatacactgccacccaacctaagatatataccgtctgttaggccaaagtgtgagaagccaacatatcctatatagaaaataaataactgccaatacgaatagtcctcaactcctaatagctttggaacaatcatggacattagcacactgaggattaatgatattccttgtgcgctaaatgcgtatatcagatttcttattaatgatttcttattcataattatcggctactctcttgtttttttaattttattactgcagtaactccccacgcgattataaatccgacaagtttaaatagtacgctatatatttgagatgaaacattataacctaacgcggttagaaatctatctatagtagtcggtatatacccggttaaggggtaatagattattgtgtttcttccaattgaatttagtgctttagccattttccatgtactaacacattttgctaaacagaacataaagtatattccaaagcatgctcctaagattgcaagatctggcatacataagtacccatcagataaatccaagtatcttcctgtttgcttgaattcaaaagctgctatgattatgcatataacacaggaaacagctccacctaacttagataaatgtttttctatctttataggatcattaaatagagtacccagcgaaaagaacagcatcgcttcaatcgtggaactccagaaaaagtaattcggaactccttcagttctagaatagtgggcaatcagggcaagtataaacgcaataatacaaatgctccttttattctttatcaatctataaattacgtaatatataatctccacaaaaaacaaagaaaataaaaaccagagtagagaaaacgaaccctctccacataatacatctattatagaagccacaaaaaagtctttgtctcgaaatagaataaaatcaatagttagtatcaacaatgagtatccatagaatggaatcagataactttttgcttttcttataacgtactctctaggttttcgatccctaaaccacatacccgatatgaaaaaaaacatcggcatgtgaaatacatatatccaacatttaaggagtattggtaaacccgtatgtcctgcaacgacacagaatactcctattgcttttgcaacgtctatccattcaactcgttttgagcataatgatttctctttactcattgtatctatcctctaacaacttttctctttctggggctcgttttaatcaacacaacctgaataagcgccacaaataagaaaacatatattggttgccacacgatctcattaaaatagcctcttgtgtaccgcattaaataatacaagaacgaaacccatgtgccaaaccagactggtttgtatgctgagcaatatatcttttgctcaattttgcaaataaataatgcgaaaacaagtgttagcgggattccataccatccgaaattccaataccactctgctatggctgaaccacccattgcaaaaacagtagagttaataaatgttcctcgttccggctgtgataaatatatattaaacaacgcatatttctctaatccggagcacggaattttgagtccactaaaaattgagtaaaagaaggaagcaatataagtaagaccccactgataattacctgttgcaggtattgacataagtgcctgaataggagcttttaccgtacctcccatttcaaggcacaaatctttgatgggctctgactctctgatcacctcttgtaaactattccagaaattcgcatctacggctaattcacgtgtatgagtgacaattgtgacaaaataaattcccaaataggccacagctatgtaccagatttttagctttggtttaaagaaatagcaatacataaacagcaatggaaccaatgtctgaatcgtgttgcctttccgaccagtaaaaaacataaatattaagaaatacgcagctgttattcccataacaatagtgaatctacgcttattatttctatagctgctgagaactaatagaattgcaggtaaaaacagcttggtgaaccagccaagcggaataccataaaatgtcgtatctgcttcgaacatagcctgatagccaccagcaatttttgcacctatttgaattacgtcatggtataattgaggcagaatagaaattgctaacatacacagcccaatacttctgcatatttcaagggagtttccatccgttccctttgtttcatcataatccgccaattcagtattactttttgaaaacatcaacacacctagcaaatatacttcgataaatagttcagagtatagtgttccttgaaatccccactcatctccatatcgatagagcatttgcatataatcgtactttgtagatgtatcaaaaccaatgacggttatactcgataaatggaacatatagagactaaataggacaaaaaatgtcggggatgcatattttaatccaaggattctccaacttattagcgaatacacaatcaaaatcactgttgtaatccctgcacgatactcccatcccggcgataactgtacaatatcaaccgccagaatgtaatagtttagaaatatcatcattattcctattgtaactacaacaaatttggtttttgataccttcattaatataatctcctatatacgattgcttacatactcccgagagcctttttttgaaataacttttcccggaataccaacaacaaccgaataatcctctacactttttgctaatacactattacttcctattgcaacatcactgccaaccgttatatctccaataattattgcacctggggcaatatagatgttatcctgtaaaactggatactgcttttttccattgtgaattgtcattccaacagttgtgttctgagatagcgttatgttttttccacactttgcggggctgaatactattccaccaatatgaaaaatttgtaatccggggccaatttctattgcataaggaatatcataaccatatttatatttataatggcggtatatcattctacagattggcaaaataaatatctttgtaagtttcttctttcttgcaacagaacacattcttagccaaacagagaatttgaatccttcatacgttgcatatgcatgtaaaaaagacttagtatctgtctttccctcatatctatataaatctgctaagacaagttctttaagactatagttcaattttctcacccaaattatatgattttatttttccttctataaatgcggtatacaattttgctgcagatgaagcggtaaagaacagactatcaatttgcttaatacgatcttctaccgtagggatttccataccggcagctctttttatagcttcaacccaaacatccatcgattcgtcaagactgacacgcgttaccaaccccattcccatatctatttcttctgttactgctgtagatactacaataggtgtacctgccgcctgagattcgattgcaacagtagggagcccttcatagtgcgaaggtaatatactaacgtccatcaattggaacaatttattcacgtcatttcttctacctaaaaatctacacctttcaatgattcccatttcctttgcctgattttgaataaattcaaaatctcgtcctgcaccaacaaaaatccaaacaaaattcaaattttcttccttcatttttgctattagatttatcatgaatggatggtttttttggtatccaaaataacccacattgcctaacaccatggtgttaggctcaatatccaactccttcataagggctgctttctcagattccgtaatttcagattcgtatttactgacatcaatgctattaggaatatgcataatctttctctgatccacacacttctgtccaaaccgaaatgcagaagcaattttactacaagaagcataatccgttgcaacggcttttgtcagaaatttgaaacactcatacttaattcggactagtggattgcttgtatttggctgatccgcgatatgagcatgaacgatgactctatgcacgccacacagtcgggataacatagaaaaatacgcagcttgaaaatccgttaaatgcaaatgtaccgcatcatacttatttgttctaagaatacttatatactcgccaacacaagccattattgatttaactcgtacatttcttaggtggaatgtttgaccgcctttagcttttacctcctctataaaaaagtcaggatagtctgtaaagccagcaacatcaattattattttttctttatctactccgcgaatgatattacgcacatgagatgatatcccacctccaaatcccggcataatatgtaatacacgtaattgtatcattttacattctcccaaatagccagtgtttctttcgctacacgtgccacaactcgttctgaattgaatttttcctgtgccacttttaatgagaatagaccagcatttttcttccactcatcgctactacatatcatctgctcaatatcgttcacagcttttttagagtttttatagctgataacatacccattctgaccttctgtaatgatttctggattgtttccaacatgttctgagacaatcaacggatttgcgctccaacaagcttcaatacaagacagaggattaggatccgataaagatggcaaaacaaacacatccgttgcaccatataggtctatcatatcggtttgtttcttaaatccaactaaccgcagatcaattccatattcctttgcttttttctcgatttcttccttcagttcgccctgaccaggcattactattgtaaccttattcttacttggaacatcattcatgatgtctaagaactccagaattcccttttctttagaaagtcttgctggtgttaaaaacataacattatcatctgcaacattgtagctcttacgaattacctttttttgttcttctgagtatttagatgcaatataatatgctctctcatcaatcaggttaggtacaaacacataatagctatcctcagaagcatatgtatcaataaattctttcgacatcttgcctgcataccagaaaccatcaaatcgactgataacggtatttctaaagaaactacgaacagcgagttttaggctgccatacgaacgtttttcgtttaaatgtgactctgaccaataaaaaactttataattgcatttcttttttaaaccaatagctgcccaaacagacgggagcatatagctacctgcgcacaccataacatcaggattcattttttttatcaccctgccgattcctggattgatgataacatcaattcctgagactttttttagtccccccttcatgagtgttgtatagtctctcctgaagtcatcatattgccacgttcttccaggctcattaggaaccattacaaggactcgaaaatcaacattatgatgtgcatactcatcccttaatttgtcatagaagaatattctaaatggatttagaatattcgttaataacactactctcatacttctcctcccagcatttttctatagccaattaagtctttaccagggtcggttttctctgcgatatagttattgttaaacttgagcatttcatcgatgcactgttgatccgcatctaaaagacgttcgacaatttcttcgaattctctttgctccgcaagtggggcaccaattccaagcgcatcaatatagtcatcccacggtgtcacgcccttgctcaaaatacaaaggcaattattcatcattgcttcaacaatcacatggccatagttttcgcccaatgtcgggaagaagaaagcatgatactgttcaaaaacatgtggaatatccttatgttctgcctcaccacaatacttcaccttgacattatcaggcatctttttcatgagatcttcacactcagcccaatagcccttatcttccataggaccataaatgtcaaaaacaacatttccctttgtaattttgctcagcacctcaagcgcatacttgatatttttctttggaaaaattctggagacaaataccagcctcagctctccttgtttttttgatatacaaggtttctttggcacaaatcttgcaggcaaattcgaaactgtaaacacatttgcttttgcaaatttacgtttgatgtcacgttcctcaatgctactagttgcatgccacagaagcccgctatacaggccaagtaattttaccaagtaaatataggagtacttctttaatttcttattttcacaaccacctgtaaaatcacctcgcggtgttaaaatcacaggcttcttcttaagctttcccatacggcggagaagtagtggacgaatagtgaaaataggagagaaaaagccattcaggtacattacatcataatcgatgctgttgatcacttcttcaaaaccttttaagtcctgcttatcagggctaagataatacacctttgcgtgacccacttcattccactggttaattttcacattactgtacggtacagtttccttataatccctatctgcacaaagaacaaaaaaatcaatctgttcatataaattttcaaccatgttaatacaggactgaataggtccaccgcccttataaccaggtgcgtattgcccatttaacacaagtactcttttcttcattcctatctcctcttatgctttcaaatcgccctgcggtttcatagtaattccctttttctcgcattcataaatcttcgcatccactaagaaacgataccaatatgcctgcaagaagtggaatatctttccttctggaccgtcaagaaatcccaatttaatgtaatatcgatatataaaatacagatgcgcccggaagaacttcggcagcctataatagccgctattcttcacgacacgcttcatcttggcctgcccagacgatgtaccatcttgttccagactttcatccatcgccttttccagcgtcatctggtgatccagcacttcccggttgctgtaccagttgtgttttgctgtccaccactccaaatctttctgattgttgtcgatcaaatcatgtttgaattcaactgtcattccctccgacagaatcatatgttcatccataattttcatctcacaggatgccattccagttcggaaaatgcggagcaataactctggatatcgcccaccatgcttgatccagcggcccataaagtagactctgcgccggaggatgactccgttcactggtgtcttgatctgcgggagtttttcattaatctccgcagcgagatcttccatgatttcttcgtcagcatccatacgcatggaccattctgtgtcgatgtccgtgttctgaagaccccagttcagctggtctgcgtaagacacccatttattttgataaaagtccaacctcgaaccaattttctgaagctctgcattaagttctttgcacagtgcttccgtgctatctgtactaaagctatctacaattacaaatctcttagcaactccacgaaaggactccacacacttgcgaagattcttttcttcattttttgtaagtattacgactgttaaatctgtcatgaaatctccaacctcttaattaccttcgccgggtttccagcaatcacacaattatcttcaaactttccgcacactacagcaccagcaccgataacgcagccatcgcccagcactgtgcctttcaggattatgctattgcacccaatgaaacagttcttaccgatcttgatttccctgctcggcaccaaatcactgttaccaccgttttcatcacggagcagcttgtttctcgtttctgcctcaattgggtggaagtcattgtctaaaatcttgcagttaccgccgatgcaggtattctcaccaatcgtgatcttcttccgggcgtaaatcgttgctccgcttattcccacattatctccgatttcaatctctgcccccggtgcacgggtaacaataatcgtccggctgtaaagaccaaccagattgctgaggaagctgctcttaatcgtaacgttctcaccaatcttcagcttggcaccacacttgttgaaaataataggtacacccttcagcaagaggttcttgccatattcaattcttgtcaccttcataaccagtttgaaccagttactgttcatttcctctcgcctcctttacaacttcaaaatttcttctgcatacttctgtacgcttacgtttctagtcagattcttctcaaggttttcccgacttctggcgcccattgctttcagttcttcactgccagcattgtcaatgaaccagcggatgttctcttcaaccttgtcatattcacccggctcacagcagagaccaccgtgtgtatcttcaatcaagcaacgaacctctgagcctgactccaggacccctaaaatgggctttgaagcggccattatgccgtatgccttcgatgggcaggacacgcctttgatgcctttcgcattcacacaccagtgaacgtcaccagcgttcaaactatagataaggtcagccttatcctggtacggaatgaaagtcacattgtccatgtgatgctgctttacatagagcaccaacttatccagtacggaaccagcaccaacaaaagcaaatacaacctctcggccatctgctgtttttgttccaaccttgattttctccacaaccttaatcaaattctcaaggtcgtagtacagaccgatattacctgaatacataatgacgaacttaccatccagaccgtacttcttcttgaaagcaactactctttcattgttttcatccagcggatagatctcgttctcatcaatccagttgttaatcataactgtcttcggaactttctttcctctgaaacggttctccaccgtttccaccagatcacgaccgactgtgattacaaggtcgctgcgcttgcaactgaacttgtcgaaccacatcatggcatctgtcaccagtttgctcttggtgtagccaacggccagcacctgctctgggttgaagtcctgaatgttatagatgtatttggcgtgtttcatccacttgccccaaacacccagcagaccaccaaggatcggaggctgagagatggagaagacataatccatctttccaaccttaaaggtcgcacccattgctccaaagaaataggaaacaatgttcttcacacggctcttcttattggtcttgctgaactccggcacccggattctcagcaccttcacgccgttgatttcttcttcgtaatatttctgtgtcttatatttatcttcaatggttcctaaatagctgggaaccacacaaattaccgtaatatcaaatttatccaacatgccttctgcgagttcacggagaatctggcctgtggatgcagtatcaggtatgtagtaatgtgcataaatcagcagtttcttttttgccatcctgcatctcccctctgtgtacttctctactcacactattagtcacgctggaaaatatcgcgtgtataaaccttatccttcacatcatccaaacatttgtcataacggtttgcgatgatagcatggctcatttccttgaacttcgccaaatcattgactaccagactgccaaagaaggtatcgccgtctttcagggtcggctcgtagatgataacagttgcgcccttggccttgatgcgcttcataacaccctgaatagaactctggcggaaattatcgctgttactcttcatggtcaaacgatacacaccgatggtcacagacttttcttgttccttgtcgtattcgttatcttcgtcataaccataatatccagccagcttcaagacacggtcggcgataaagtccttacgagttctgttactctcaacaattgcctcgatcaggttctctggcacatccgcatagtttgccagcaactgcttggtgtctttcggcagacagtatccgccgtaaccgaaggacggattgttgtagtggctgccgatacgaggatcaaggcagacaccatcgatgatctgctgggtattcaaacccttgctctctgcataagtgtccagctcgttgaagtaagccacgcgcagggcaagatatgtattggcgaacagcttgactgcctctgcctcggtgaagcccatgaacagcgtgtcgatgttctccttgatagcaccttcctgcagcagaccagcgaactcgtgagcagcttcgaccaaacgctcatcgttcaggtcagtgccaacgatgatacgagaaggatacagattgtcatacaaagccttggactcacgcaggaactccgggctgaagatgatgttcttgctgttaaatttctctcttatgcttgcagtgtagccaaccggaatggtggacttgatgaccatgatggcatccgggttgtactccatgaccagcttgatcacagcctcgaccgcagatgtatcgaagtgctgcgtgtggctgtcgtagttcgtaggggccgctataacaacaaagtccgcatcagagtatgcagcctttgcatccagagttgcggtcaggttcagttccttttctgcgagatacttctcgatatagtcatcctgaatcggggacttacgattgttaatcatgtccactttctctgggataatatccaccgctgttaccttatgatgctgagacagcagcgttgcgatggaaagaccaacgtatcctgtacccgcaacagcgattttgtaatttctcatcttttttactcctccttaccttttcaacccgtactgttgaaaaggatttttcatctattcacacatcaacctgatgtttcaacttactaatttttatttcagccaacacaaagagcggataggctcgtacacctgtccgctggctgtcaccccaccctcttggttgagatttcttcctgtgcagcatttctgccacccaaaaagatcagtcgttcattcttcgggtaagaaaatatgaacttcgggttgcggagcctttcattctctgccgtacccttgtccctattatgacagccgcgtattatatctctagccccggtaccagtaaccgcaattttatagtcctttttcataattctatatcctcctgaaattcatcttacatatatggaaggctcatattgagccgagcaatctatatcaaacagtgtgttcatcatccatgccggatgagctaccacactatgtttatcatctatttcccacagtagccatcctccaacaaccactgaatcttttatgtagacctgtcatggtctactcacttatttttcctcaactgaaactttatggtagacaccttcataccaactcaccaataaagtgctgtgtcttattgtcataactcgcagtcgcacttttccatttttcaaagtgttgacctttattgtcataaccttcatatcaacttactttgttaaaactgtacaatttcatactctcctcatgttgcaacatgaacaatcttctctccctcactacctctaattcttcggaaaaatgaaggtttcatatccgccacttgctctgcaataaaacaagctcgcagtaggggtattttgcatgagttttatatgccaccctagaccatcatgccgtcactgaaagtttgaagtagacattactccccatgccccagcaaacacaccttaaatgtcttaaaaataatcttccaatccacccagaaactgcgttccttgacatacttcacgtccagatccatccactcctcaaaagagaggtcgttacggtgcggagcgatctgccaatagcagctcaggccgggggtcacatacaggcgttgcttttcgtagtcgccgtactgttccacctcacggggcagtgccgggcgggggccaacgatgctcatatcgcccttcaggatattccacagctgcggcagctcgtcgaggctggtcttgcggataaacttgcccacgcgggtaatgcgggggtcgtccttgatcttgaacacagggccgtccatctcgttctgttccagcagatcgtccaattttgcctctgcgttggggcacatagagcggaacttgtagaacttaaacggcttaccgtttcgtccaatacgctcctgcgagaaaatcgggccagcagaagggtcatccaccacaattgcaatggccgtagccagcatgaccggcgacagcaccaccagtgccagcgacgacaagatcacatcctgcgtccgacgcccgatccaatagagctgatgctccctcagattttcctttcggtcaatttcagccggcttattgattccagttacctctacgctcattttttctcctcactcacactatgtaatctcacacacgattccaactgtacgtcctcttatccagcttcaacggcagaggcacttgcagtcactttttggcatcgatacgcagcgccccatacgtcagggcacgcaaaacgcccctgacgactgcttcgccaagggtcattttgtttgcaattcttccatcaatcaccttttcctcgcgccatcccatcccagttagcgcacctttgcctgttctcggatgatgtccaaatcgtcgaaacgccacacttatcaccccttccgcaattaaggggtatctctcattcgctcgtaggagataccgtgcgttcgacatcctatagcaattcaacttttcaatgcaacagcaacagcgttgaattgcatatcgcaaatatgctgttttcatgctacactgatttcttaccttgcgataaaactatttataagtttattttaccattgtgttaccttgtacgcaaggggttttgacactattctaccccccccccctagaaaattttggtcgatattgtcaatctttttgtgatttattgtccaatttgcttaaaaaaacagccacagattcaattttagtagaattagtagacgatcaagcgtccaccggggctttgctgacggagaaatcctatcacaattttgctgttttaccagatgcagcaaacccaacaggcggctccgtaacctgcccgttgggtttggtcagaaatagaataacatcaccccggcttctgcctttcaaaaagggaaaccggggtgatgttatctactttgtggcaggtgtccagaatgccggacccatctcatttactgtacgctcagcagttcttccacgctcttgcgggcaggtgcggcgggatcctgtgcaggatgaccgatggcaatgagcgcagccactgtctgtccttcgggcacggagagcacctttgccaccttgtccgggtcatagatgcccatgatgaccgtcccgaggcccagtgcgtgcgcggcaaggcagaaggtctgtgcggcaataccggcgtcaaaggactgccagtggccttcgagcgggctggaatagctgccgtcccgctcaaaaccagagcgtcccgtcaccatcgtcagcgcaaccagtgcgggggcatgggaaagcgtgttggcgttataggtgaaatccagcacacaatcgctggcgattttctcacgcttctgcgcattttccacgagaatatagcgggcgatctgggtatttttccagctgggggcataagcggcagcggccaccacttcggccacctgctccggggtaacaggctcttcggtaaagcggcggacgctgcgccgggtcttgatgcattccaatgcttccataattgttttctcctttcggcagtttgttggatataactgtctctctattattacaactccgctcagctttgtcaagatgctttcgaaacggaggccgggccgctcagaataggtcgagcatactgtccagatagatggcttcccggacgtgcagctggtactccggccttaccatataatagagcagaaattccagcaccaaggcgctgccaagcccccgtccctcgatcttgaagttggaaaatcccatcggaaggaaggtcctccggatgtcctccacgccgatgaagctggggttctccatcgccttcgagaaacggtagccctcccccgcgcccggggcagtgcagatatgatcagggcagtcctcgccgagatttttgcggctgacattctcgtagcagcgcttccggtcccggcatccgacccagcagcactcgttgcagagaaactccaccttgtccttctggggctgcgtcaggctgtccagctgttcaaaggccttgttcagtcggaaatccggcaccacatagcgaaattcctcccgggccgtctcgtcccggagctgtcggaaatccgtcagcaccttggtcgtggaggagacgaggtaaagctgcgggtagtgcgtcctcaggtagtccagcagcagctccgaatggaggatgacgccattctccaccccgccgctctgtgcaaagagggcgcagagcgcattgcatttccggtccgaaagatgctcctcccggagaagggagttgctgaaggtcagtcgggccgagatgccatactcctgcatcagtgcaaggacctctttggggtcgtgcccgccgaagccggtgcgtcccccgccccagatgcagtcggccggtgccccgtagatggagccaatgctgcaccagtcatagaaatattcccgatgtccccggtacaggggcagaaactcccggtacagttcataaaactcaaacaaaccgggcaggtgataataggctttttcttgtttcatcgcaccctcttctctctcgttcttttctattgtaccatgtttccgccccgcaaaaaagcccccggagggcttgttacagctctccgggggcatcttatgtgcgttgtgccttggcgcacatgaccggcgttttactcgatctcgatcaggttcgggttctcaggcaaagccttcgtctgctgaggagcaggcagctcgacgtgcaggacgccatcctcgaactttgcgtggatgtcctccttcttcacggcgtcgcccacatagaagctgcgggcacaggtgccggagaatgtctcgcggcggatgtagcggccattgttgtccttctcgtcattcgagtggctgcgcactgcctgaatagtcagatagccgtcgttcagttccatctgaacgtcttccttcttgcagcccggcaggtcaacagccacatcgtagccgttctcggtctgcttgacatcggtcttcatcatgtttgcaccgcgcttgccgaaggtttcacgctcttcacggttcatcgcacgctccagcgcgccatcgttccagaacggatcaaagagatcatcgaacagattctcatggaaaacagcaggcataaacataaatcattcctccaatcccggcgttcgggtcgggtaaaaaatctttatgttgttcattcggaaaagctttccggggagctgctcgatcacctcgcggctctctcttttgcccttcctcctgagcacgccatagttatagcaccatttattagcagtgtcaagcgtagagtgctaaaattcacgaaaagataatacttttatcatctttcatacaatctccatcgtttttcttcctagggacgcattttattaaactgccgtctcttgcaggccgtttcccacagggcagagccacatccagaaccatcatgctgaacggatacagcggcggcatcagacaatttccgacgtatgcacttgccatctggactccaatgatcgcctgcgaccgatccgccccaaagtggctcggcgtcgcatggatgatgctgggatagatgggcgcacagccaaggccgacaggcagggccatcactgcgggccgccactccccttcccggcgtcttgacaagcctgttccttcccattacaatacgataaaggagtccgctgaggggcttttgcaatttgcagctacaggctccgggaaaggaatgtcgtcatggaaccaaaaacaaaacaatatctgctcgtgaccgttgtgggggtaacgctttttgtcgcactgctgcggctttcttccgttctggcctttgccgccgatcttgtcgatctgatcctgcccattctggccggcggcattctggcgctttttctcagcgtgcctatggccggactggaaaagcggctgagaagtctgttccgcagggccaaaaagcagccctcgggcagcgccatccatcttctcagctttttcatcaccctgctcggcgttgttcttgtgctggtgctggcgctcaccctgctgatcccggagcttgtgcagtcgtttcacagcctctatctgcagatcgagtccaatatcccccgctggaccgcctatctcagcgcacaggacaccaacatggactggttgatgcactggctggagggcatcgactgggagcagctgctgcacaggatcaccaacagcatcgacaccgtgctggtcaatgcggtcggggcggtgtctgccaccgtgaacatcgtggtgactgcatcttttgccctgatcatctccatctatatgtccctcggggccgagagtctctgccaccacgcccgcacactggtatgcgcctatctgaagcccagccacgccgccgggctgctgaaattctgtcggctgttccgtcagtccttcgcaaactttctgacgggacaatgcagtgaggccgtgatcctcggtgtcctcatgacccttgcattttcggttttccggatcccctacggcagtctggtggggatgctcaccgccatctgtgccatcatcccctatgtgggggcactgatctcctgcgtggtcagcgtgttccttgtgcttctggtggatcctgtgctggcggtgcgctgcctcatcgtctaccttgccgtgcagtttatcgagaaccagttcatctatccccgcgtggtgggaaagtccgtggggctttctccgttttacacccttgtagccgccatgatcggcggaaagctttttggcatcatcggcatcatcttctttatccctctgactgcggtggtcattgagcttgtaaaagaggacgcctcccgacgcctgcatacaaaagagaccctgtcctgacaacagcgaccccggagagtgattcccaccgctctccggggtcgctgttttttattctttgttcaccgtattgacgtagcagaagaggctccgcagggcaatgagtcctattttccggtcaagaacatcgtcggcagaaatttcctcttgacaaagcggcggggatagcatatgatacaatcgttctaaatagaacaatacatcacaggaggtatctatgaacttttgggatcatcacaaagccattacctgctactatgagctgctgatgtcatccgtatgtcagaaatatcagctccggcagatggagtatgatatcctgatgtttttataccataatcctcagtaccataccgccgcagatattgtacgggtgcgcaactccaccaaatctcatgtctccacctcactgaaagtgctggaggagcggggactgatcgaaaaaaaggtcgccgacgggaacaaaaagcatatcgatgtctatctgtccgcgtcggctcagccgatcatcgccgaagggcttgaggctcagcggcagtttgccagagatatgtttcagggactctcagagcctcagatcgcagcttgtaaacaggcattccagaagatatgcgacaacgcagaagaatgcctcaaaatgaaaggactgacacatcatgaatcataaagcctatcaacccaaaatgcccgacctgatggaggcggtgttcgatgccgcctatctgatctttgatctcgttgcaggcatcctctttttcacgatggctcagggccgcagcctttttatcctatatggcgtcctgaccctgaccctctgcggcggtgacgccttccatctggtgccccggatcatccgggccgtgcgaggcagcagcgaccggatcaaaaagcagctcggcatcgggctgcaggtctcttccatcaccatgacggtattctatatcatcctgctgtatgtctggaaggccaccttcccccagcttcaggctcccgtagctgtggaagtcctgatctggctgtctgccatcctgcgcatcctgatctgcctgctgccccagaacaactggtgtaccgatgagggcaaccccaccctgtccatcctgcgcaacgcggtgtttgcctttaccggcctcggcgtcatcatcctgtacgccatctccggcaatacttgcgactaccatatgacccggatggtggcagccatcctcatctccttcggctgctacctgcctgtgaccctcttcagtaagactaagcccaaagtgggcctgctgatgattcccaagacctgctcctatatgtggatcatcgccatgggtctgcagcttctgtgactgtgttacagaagagccaaatgcagatcgttattatatgatcagcaagatcctctttaacttcaaacgccattcaaccggcagaatggagaaaacactattctaaatgtactgtatttcagacagcgatccttcagggtgtagatcgtagactatccgataatattatcataaaacctctgcagcaccattgccaattcctctggagactctatgtttgcttcatgacctgttttcaaaagctcatggaagtgggaatcgctcaaataactggcaagttcctttgaggctttttttgcgttgtccttttctccacaaacgatcaatgccggacaggacaccttatataatgaatccctgagatccaattccgccatcgtgccgcacaagcgaatcacgtctgcttttttgaagccaaattgctcgaacattgcattcggcataacgtgaaacagcagattctggaacttcaataacttttctggcatttcatattgtgctgcaattagcaccagtgcctttactttgtccgggtggtctatcgcataattaagtgccagaaccgcacccaaggaaagcccgcacaaaacgatctcattattttccttgtcgcaccttcctgagaatgcagcatacagctccccataggtggccgctttgccctccagcatctctgccagactcaagctgacgctgctgtctgagaccttcgtttcttttattactcggttccaactgtctggtttttgtcctagcccatgcaagtataaaaacttcatctgttttccgctttccttcacacgtcctgctgcattgtcgatctcgctgctgcagtccatcacaaatcagatgcgctctgccccggtcagctcggtcttgcccagcccttcggcaatgcaccgcgccagataccggctgtttccggttcccgaaaaataaagcaccatggctgctccctcgtttttgtgtggtttttcagatgcctgtctgcccggcaaactggaatttatgtcaatgcgaactcaatctcatcaagcttatttgttattgcgttctttctccctgtctccttaaagcctattcgacgatagagtctctc

SEQ ID NO: 1006 - DNA, 25881 bp, unidentified
  source 1..25881: mol_type = unassigned DNA
actctacggcgtcgagaccagcatggcgacgctgggcaacctctacggtgtggacgtggaccactacatccgcatcaattttgcgggctttatcagcatcatcgacgccatcggcggcgtagacgtctactccgatcaggccttcacctccgtcggcagccccggctactatgaccccaccaccttcgccgagggctggaaccatctggatggcaaatccgctctggccttcgcccgggagcgccacgccttcaagaccggtgacatccagcgcggcatcaaccagatgaaggtcatcgacgcgatggccaacaagctcaaatcccccaccctgctgatgagcttctccaagctgatggacgccgctgccgactgcttcgtgaccagcttctcgcaggagcagatctccgcgctggtgcggatgcagctgggcgacctcgccagctgggacatccagagctacaccgtcaccggctcgggcgcaaaaagctccaagtgctactccgccaagggccagagcctctacgtcatgaagccggatgagaactcggtcaatgaggccaaagccctcatcgctgcggtgctgggcggcgaagacaagctcaccagcaccagccagacccccgaaaagaccgaggtctacacccccacggccgaccccaacgccgctgcgtccgtcccggaggagtctcccgacagcgtgatcgtggaagagcctgccccgagcgacgtccccgcagagagcgaggccgctgacggccagcccgccgagggcagcacctccggcgagccaaacgcctccaccgaagtccccgcagagggcagcgaagatgccccggcagactccaccgagtcgccgtccttcagtatgccgacacaggagcaggtcgagcaggcggcttcgtccctgcatcaggccgcttccaccgtgctggacgccctcttcggctccggcacgggcggcgactcctccagcgcttcgacccccgccgcatgaacaaaggaataaaaatggcccgctgcatcgcagcgggccattttttattcagatttaagccagaatgtcgcccagcacgctcttgccatccagcgtggaagcatccacgcccagatagtcgcagatggtctgtgcgatggtgccgaagcagagcttggtgccgaggtcaacgcccggcttgatgcccttgccgcagatgaggtaaggcacatactcgcgggtgtggtcggtggtcttggtgtaggaggggtcgcagccgtggtcggccgtgaccatcaggatgtcgccctcccgcatcccggggatgaagtcggcaaggaacttgtcgaactcggtggcagcagcagcgtagcctgccacatcgcggcggtggccgtagagcatatcgaaatcgacgaggttcacgaaggccagaccctcgaagtcgcgggtctgcaatgccttggtgaaggcgatgccgttggtgttgccggtggtcttgattttttccgtcacgccctcgccgtcgaagatgtcgaaaattttgccgaccgcgatgacgtccctgcctgcgtccttcagcaggtccagcatggtcttgcgaggcggcttgaggctcaggtcgtggcggttggtggtgcggtagaaggtatcggcagtatggccgaggaaggggcgtgcgatgacgcggcccacgccgtactcgcccttcagcatctcgcgggcaatttcgcaatagcggtacagctcatgcaccggcacaagctcttcgtttgcggctacctgaaaaacgctgtcggcgctggtgtagacgataagggcatcctccctcatggcctgctcaccgtagtccttcagcacctgcgtaccggagtagggcttgttgcagagcaccttatggccggtcttttcctcaaactcgtggatgaggctgtcggggaagccgtccgggaaggtgggcaggggtttcgggctgacgacgcccgcaatttcccagtggccgatggtggtatccttgcccatgctctgctcctgcagacgggcgaaggagccgatgggggcggcgtccttttcaccggcggtcacgccgtcgatgttgaacagtccgagctttttcagattggggcagttgaagttggggtgcttggcgatggcgccgagggtgttggtgccctcatcgccaaaggcggcggcgtccggctctgcaccgatgccgaagctgtccagaacgatcagaaaaacgcgcttttccatttacgctttcactccgtttctatagtttcgcgcccgcttctgcccgaaaaagggcagaagtgagacttttccttatccttattataggcgatggggctgtttttcgcaatatcgccccgacatctatcacgaaaatttaaggttttctttgccgaattttttcttgctctcttgtacacaagcggttataatatagattggtaaggtttgaaatactacctgaccgggccgatgtccggccagaagccgaggggccttgtccggctcctgcggctcgtcatagaggataagaagatattgttggaggtatattatgagaaaaacgaagatcatctgcacccttggcccgtccaccgataaggacggcgtgctgcgcgagctggtcgccaacggcatgaacgtggcccgcttcaacttctcccacggctcctacgaggagcacaagggccgtctggatatgctgaaggccatccgcaccgagctgggcaagcccgtggccgctctgctggacaccaaaggccccgagatccgtctgaaggagttcaagaacggcgtcgagatgctggaagccggccagaccttcaccctgaccacccgcgaggtggagggcaccaaggagatctgctccatcacctataaggacctgccgcaggatgtccacgagggcggcatcatcatgctggacgacggcctcatcaagctggccatcaagagcgtctccgacaccgacatcgtctgcgaggtgctgaacagcggcaagatcaagaccaagaagggcgtcaacgtccccggtgtccacctgtccatgccctacctgagccagcgcgaccgcgatgacatcatcttcggcatccagcagggcttcgatttcatcgctgcttccttcgtccgcaccgcacaggacgtctacgacatccgcaacctgctgaacgagtatgactcccacatccgcatcattgccaagatcgagaaccgcgagggcgtcaacaacatcgacagcatcctcgccgctgccgacgccgtcatggtcgcccgcggcgacctcggcgtcgagatcgacttcaccgaactgcctggcatccagaaaagcgtcatcgaccgctccttctccttcggcaaacccatcgtcaccgccacccagatgctggacagcatgatggtcaacccccgccccacccgcgccgagatctccgacgtggccaatgccatctacgacggcacctctgccatcatgctctccggcgagaccgctgcgggcgcataccccgttgaggccctgaagaccatgtccgccatcgccgagcgcaccgagaacgaggtgcactaccgcgacaaccgcctgaccgacgccgccggccagatcagcgtcagcgacgccaccgcacacgccgcctgtctgaccgcaaaggacgtcaacgcctctgccatcgtcaccgtgtccgagtccggcaacaccgcccgcctgctgagcaagtaccgccccgcacagcccatcatcgcctgcgtcatggacgagcaggtgcagcgccagctctccatctcctggggcatcaccccgctcatgatggacctcgccaccagcaccgatgagctgatcgagaagtccaccgctctggccaaggagaacggctacctccacgacggcgagctggctgtcgtgaccgcaggcgtccccgtgggcgtctccggcaccaccaacatgatcaagatccacatgattggcaactgcctgtccaccggcgtcggcatcggccccgatggcgctgctctggccaacgccaccggcaaggcctgcgtctgccacaccctcgaggagatccgcgcaaagttcaagcccggcatggtgctggtggtgccctccacctccaacgagatgctgagctatgtccgcgacgccgccgctctggtggtcgaggaagccggcctgaacagccacgctgccatcgcaggcaaggccctgctcaagcccaccatcgtgggtgctgtcggcgctaccgcccacatccgcgacggcttgatggtcgctgtggactgcgcacacggcagcgtccagcgcctgcaggcctgattttaggaggcgcagcatggaacgcatcgcaagcttctgcgtagaccacaccaagctcggccggggtatgtacctgagccgtcaggacggcgacgtgctgacgtgggacatccggatgaagaagccgaaccatggcgactatctctccaccggtgccgcccacacgctggagcaccttttcgccacctacgcccgcaacagccagtacaaggacggcgtcgtctacgtcggccccatgggctgccgcaccggcttctacctgctcacccgggggctttcccccgcggaggctctggccctgacggtggagtccttccacttcatggccgctttcgagggcgatgttcccggcgcaagcgaggtggagtgcggcaactaccgcgacatggacctgcccgccgcaaaggcagaggccgccgccatgctgcccgtgcttgaggcactgactgccgacgacctgcactattgatttcaaaacaaacgaggcccggagtggaaacgctccgggcctcgttgttttttttgtggttactgagttttacggatgaaaagaattagttcttctcaggctttttgacttcttcagcatccgcagtgacaacagcaatacgccaggtctcaccctccacttcgatggtagcagtgccgatgtaacggacgtttgcaggttttttgcccttcccgacgactgcgctgttgatattaccatcatcatcaccaccatacaatgcctcgagcagagtgtaagcctgcgccgtagcattatagcccttagtctccgtctctgcaatgtaaacaaacttgtctttatagtccttcatgacatctgccatgatacctttattcagttccccagaataatcaaaatcttcaccttcatcttcatggtccttcgcaaacttgacagcatactctccaagctcttttgccttaccgttcagcttggagtctgccttgtatactatctcttgtcccttgctcatatcgctcagtacatctgcaatggtcttggtgcttgcagcgttgccgcagcccgtcaggacagacagggccagaacgccagcgaggacgacggccagaagtttctttgccattttcatgttgtttcctcccacatgatgataaaatgaattttaggggccgaccgtccgtttccgaccatcagcctatgaaagcattatacccccccccctgtgattttgtcaatattattcttgattttcatgatattcccaaattgtccctgtatccgctatgcaggtttcacaaaattgcagaaaaatttgcccgcttcgccagaggctccccccttgggagcaacagcgacgaccgccgccagcggcggaaacagggaggagctgttggggcagcggccagcaggatgcaagcgacagcgtagcagacgctgggagccgcaacccgggcaatgtcaccgaaggtgactgagagggcaaggacgctgccaaaaaacaaaagcacagcgataacatcagctctgacaaaagccgatattatcgctgtgcagttgctctcggaggacgggcttgccctctccgtcattgcttcgcaatgccacctctcccaaagggagaggcttttcttattcgtacagggggaacgccttggtcagggccagcacgcgggcggagatgtcgtctttcttctcgtcgtagtgccagatgcagtcggcgatgcagtccgcgatgaccttcatctcggcctcgcccatgccccgggtggtgacggccggagtgcccagacggacgccggaggtcacgaaggggctgcgggtctcgccggggaccgtgttcttgttggcggtgatgtggacgctgtcgaggcgggtttccagctccttgccggtgcactcctcctcccgcaggtccaccagcatcaggtggttgtccgtgccgccggacaccagcttgacgccccgggcctgcagctgcgcagccatggcctgtgcgttctcgacgatcctgcgggcgtagtccttgaactccggcttgagggcctcaccgaagcagacggccttagccgcgatgacgtgctccagcgggccgccctgcgtgccggggaagacggcggagttgatacgcttggccagcacggcgttgttggtcaggatgaggccgccgcggggtccgcgcagggtcttgtgggtggtggtggtcacgacatcggcatagggcacggggctttggtgcatcccgccggccacgaggcccgcgatgtgggccatgtccaccatcagataagcgccatagccgtgggcgatctccgccagcttctcgaagtcgatggcgcgggggtaggccgaagcgcccgccacgaccattttcgggcgcaccttccggacctgcttttccagctcggcgtagtcgatgcggccatcctcaccgacgccgtaggagacgaagtggtagttcttgccggacatattcaccggcgagccgtgggtcagatgaccgccctgcgacaggtccatgcccatgacggtatcgccgaggtccagcagggcaaagtagacggccagattggcctgtgcgccggagtggggctggacgttggcgtactttgcgccgaacagcttgcaggcgcgccggatggcgatgttctccacctcatccacgtaggcgcagccgccgtagtagcgcttgccgggcaggccctcggcgtacttgttggtgaggatgctgcccatcgcggccatgacggcgggcgagacgatgttctcgctggcgatcagctcaatgttctcccgctggcgggtcagctcacggttcatggccgcagccagctccgggtcagccctgtccacgaggccaatggtatccatcatatcgttgtacatcatacattacccctctctgatgctgatgctgagatcagctttttctccataataccagacaacgtaaaattcttcaacagcatttcgcacaaaccgatacgctttggcccctttcttttcggtcggatgaagatatttcacccttcggcccaaagccttgctttttctgcgcccagcgtttattatacatctataaaaatccgttccggtttttgtgcagttcttcccgccgggcgcagagaggggcgtttttccatgaccatcgcagagcaaaaagcggcgcagcggaaagcgggcattgcagcccgccgggcactgtcggaagcagaccggacctccgccaacgcggcgctctgtgcccgcatcgcagggctggactgcttccggacggcgcagaacatcctgctctacgccgcattcgggggcgaagccgacctctccgcgctggccggacaggccgcagcacagggcaaaatactggcatggcccgtctgcggcgagggtttctcactgaccgccgccgtgccggaggccgacggctgggaggtcggcgcatatggcatccgcacccccgtcctgcgccggtcggccctcctgcggcccgaccagctcgacctcgtgctggtgccctgcacagctttcgacgccgcctgccgccgggtgggcatggggaagggttactacgaccgctatcttcccctctgcacccgggctgtaaaggtcggcgtcgcctttgaggcccagcgggtggaggcggcggccgtggacgcccacgaccagcagctggacagattcgtgacagagggaggactttattttggaactgacacaactgagctgtgaggtatttctgagccagcttgccagcaaagcccccaccccgggcggcggcggcgcagcggcccttgtgggggcggcaggcgcagcgctgggcaatatggtgggcagtctgaccaccggcaaaaagaagtatgctgccgtcgaggcggacattcaggccctcaacgcccgggccgaggccctgcgccagcggctcgaagccctcgtgcaggccgacgcggaggcgttcgccccgctggccgcagcttacggcctgcccaaggagacacccgagcagcaggctcacaaggccgcggttctggccgaggcgctggatggggcctgcgctgtgccgctggacatcatggacgcctgctgtgagggcatccgcctcgcggccgactacgccgcaaagggcagcgtgctggccgtgtcggatgcgggctgtgcggccctcttctgcaaggccgctctccaagccgccgggctgaacgtcgccatcaacaccaagctcatgaccgaccgcccccacgccgccgggctggacgaaaaggctgcccggatgctggcggagtatgtgccgctggccgatgaagtctaccagtccgtggcaagccgcctgcgggtctgatccagaaaggggatctctatgtctgtgattttgaagggtgcgcccgtcgtggccgccatgaacgaagcaaacgccgcccgctgcgccgcgctgcgggaaaagggcgtcgtccccacactggccgtcgtccgggtgggcgcacgggaggacgacctctcctacgagaagggcgtcatggcccgctgcgccaaggtgggcgtcgaggtgaagcagttccttctgcccgccgacgcggcgcaggaggagctgctgggcgtcatcgcctgcatcaacgctgactcctccatccacggctgtctgctcttccgtcccctgccccggcagttcgacgaccgcactgtccgcgccgcccttgcgcctgagaaggacatcgacggcatcaccgacggctcgctggccggtgtctttaccaacacggccctcggctacccgccctgcacggcgcaggcctgcctcgagatcctgaagttctacggcatccccctctcgggccggcgagccgttgtggtgggccgcagcctcgtggtgggcaagcccgccgccatgatgctggaccgggagaacgccaccgtcaccctctgcaactcccgcactcgggatctgccggaggtctgccgcgaggccgacatcgtggtggtggccatgggcaaagctggcgctgtcggtgccgagcatctgcgcgaggggcaggtggtcgtggacgtgggcatccatgtcaacgaggaaggaaaactctgcggcgacgtccgcttcggcgaagccgagccgctggtagaggccatcacccccgtccccggcggcgtgggtaccgtgaccacctccgtgctggtgagccatgtggtggaggcagcagaaaagacggtataacttctttatcaaaacaaaaacagagaggacagcccacaaaggacgatcctctctgtttttgttttatcgttctgtcagcacgaaggtcagctctgccgaagcggcacacttgccgtccacataggctgaggccttgccgatgcccaccgggccgcgctgctccaccagctcacagtggagggtgagcacatcgccgggagtgacctgcttgcggaagcgggcattcttaatgccgccgaagagggccagcttgccctgattctccggcaggctcagggccgcgacagcaccggtctgggccagtgcctcaaggatgaggacgccgggcatgaccggcgtgcccgggaaatggccgcagaagaactcctcattgcgggagacgcacttgcggccgatggcccactggcccggctcgtagtccagaatacggtccacgagggcgaagggataccggtggggcaggatggccgcgatctcctcgctggtcaggcagttcggggtttcacggacggtgcggggttctgccatcgctcagccctcccactttttgaaggccagacaggcgttgtgcccgccaaagcccagactgttgctcagggcgtattccatcttcatctcccggccgacgttgggcacatagtccagatcacactcggggtcgggctgctcatagtggatggtgggcggcgcgaactgatcccggagagccagtgcggtaaagacggcctcgatgccgcctgcgccgcccagcagatggccggtcatgctcttggtgctgaccacggcgatgtccttggcgtggtcgccaaagacggcatggatggcggccgtctcgcagctgtcgttcatgtgggtgccggtgccgtgggcgttgatgtggtcgatctgctcgggggcgatgccgccgtccttcagggtcagcttcatgcagccgatggcaccggtgccgccgggtgcgggagccgtgaagtggtaggcgtcgcagttggcaccgtagcccaccacctcagcgtagatgtgtgcgccgcgggccttggcgtgctccagctcctcgaggaccagcacaccgctgccctcgcccatgacgaagccgccgcgccgtgcgtcgaagggcaggctggccgcgtcggggtcggtggaggtggaaagggccttcatgctggtaaagccgccgatgcccagcgggctgatgcagctctctgcgccgccgcagaccatgaccggctcatagccgtcccggatgcggtggaaggcgtcgcccacggcgttggtgccgccggcgcaggccgtcaccgggcaggtgcagatgcccttgaggccgaagcggatggcgatctgggccgcagccatgttggcgatggccatggggacgaagtaggggctgaccttttccatccccttctcctcgccccgggcgtgctgctcctcaatggtgggcagaccgccgatgccgctggacacgatgacgccgatgtcctcggcctccgcctcgcagtcgatgccgctgtcctgaatggcctcggcggcagcgcccagtgccagcagggtaaagcgggccatcttgcgggcctcttttttgtccacgacggtctcggggtcgaagtccttgacctcgcccgccagcttgcacttgaactcgctggcgtcgaactgggtgatagggccgatgccgcacttgcctgcgcgggcggcagcccagctgtcggcggtgttattaccaagagggttcacggttcccagaccggtgatgacgactctgcgtttttccatagaaaaagctccttttacattgccatgccgccgtccacacagagcacctgcccggtgagatagctgctttgttcggcggcaaagaaggccaccgcgtttgccacgtcctccggctggccggcgtgtccttccgggatggtcttgcacatctcggtgcggacggcctccggcagggcggcggtcatatccgtagcgatgaagccgggggccaccgcattgacggtgacattccggctggccagctctttggcgaggctcttggtcaggccgatcaggcccgccttgctggcggaatagttggtctggcccgcgttgccccgcaggcccaccacgctgctcaggttgacgatgcggccatagcgctggcgcaccatccggcgtgcagcctccttgcagcagaggaacgcacccttgaggttggcgttcaggacggtgtcaaagtcctcctcggaaaggcggaggatgaggttgtcgcgggtgatgcccgcattgttgaccagaatgtccacccgtccgaaggcgttcaccgcctcttcgaacagcttcttgcagccctcggcggtggagacgtcggcctgcacggtgacagcctccacgccctgctctttgcacagggcggccgtctcggcggcagcggcctcgccgtggcagtagttgaccaccacattgcagccctgctttgccagtgcgaggcagacggcccggccgatgccccggcttccgccggtgacgacggcggcacgggtcagcttttcttcgctcatgcctgtgcctccttccagccggtgaggaaggcttccagctcttctgccgtctcgacagcagtgcagcggacatccgttcccagcgtctttttcacgaagccgctcagggccttgcccgggccgacctcgaggatgtcggtgacgcccagctcgcccagacggcggagggtgtcttccatgtagacgctgctctgcacctgcttttccagcagggccgggatggtgtcgctttcggctttttcatggccgaggcagttgaagaggaccggcgtttccatctcgccgaagtgctcggcctcaaaacgctttgccagcgcatcccctgcggggtgcatcaggcgggtgtggaaggggccgctgaccttcagggggatgcagcggcgggcaccggcggctttcgccagctcggcggccttttctactgcggccttctcgccgccgatgaccagctggcccgggcagttgtaattgcagatctgcacgcagcccagagcggaggcctcctcgcagcactttgccagtgcgtcgcggtcgaggttcatcacggcggtcatgccgcactcgatgcccttggccgcgtcggccatggccctgccgcggaatgcggccagctccaccgcctgcttcgcggtaaagaccccggctgcttccagcgcggagtattcgcccagcgacagaccggccagatcgtcggccttcacgccgttttccttcaggacagccgtgacaccggcggcaaaggccaccatgcagggctgggtgtactgggtcagattcaaaacgccctccgggtcgtcgaagcagacgctccgcagatcaaaatcgaggtctgcggcgtcgaacgcctcccggaatgcggggtatctctcgtaaaggtctttgcccatgccggggtgctgagagccttggccggcatacagaatggcaagcttcattggtgtttcctccaatcgtccatcagttcctccatcagctcccggacgctccgcatccggtcgagacggctcacattggctccgcagaagaagagtccctcttctacgttgcccttcacggcctcgatgagggcgtgggtgatgcagtagggcaccttggccggctcgcaggctttcaggcagcgggcacagtgcttcggcgggaagcggagtccctgctcgagcttctgcaccagcggggtcgccagcgcacggcccggcatccccacagggctgtggatgatgcggacgtcctccggctttgcggccagcaggacgtctttgtaggtctggctggcgtcgcactcataggtggggatgaaccgggtggcgagctgtgcgcccgcagcacccatctttgcatagtgggcaatgtcctcgcccgtgtagatgcctccggccacaaagaccgggatggcgtggccgaactgctcctcgaaaggcttcacctcggccagaacttcgggcaggatctcgtcgagggtctggcatttcccggccagaagctcctcctccgaaaagcccagatgtccgcctgccttgcagccctcgatgaccacgaagtcggcggcgcggtcaaacgccttggcccaccggcggaggatgagctttgccgcacggccgctggacacgatgggggccagcgccacgtcggcacgtttcacgagtccgggcagctccagcgggaggcccgcacccgatacgatggcgtccacccccgcctccacggcggtgcggacggcgtcggcgtagttctgggtggcgaccatcgcgttgatggccaccagacctgcgccgcctgcgatctctttcgctttttcgatctcttttttcagggcgcggaggttggcagcggcggggtcacgggcaaagtccggctcccggtagcctgcatcggccgtggagatgcagcccatgccgccgcaggccgcgacggcaccggccagcccgccgagggagacgccgacgcccatgccgccctgtaagatgggcacagccagcggctttcctgcgagggtcagcataattcgcccagcgatttcatccgctgcctcccgctctcccacagctcgtcgaggatgtcggccacagggcgcacctcgtggagcataccggccacctgaccggccatcaggctgccagtggcggtgtcgccctcaaagacggcgcgccgcaggctgcccagcgtgtatttttccagctccatcttgtcggcaccggccttttcctgccggacgtactcgcggctcatccggtttttcaggacgcggacgggggtgccgccgatgcggccggtgacgatggtgtcactgtccttggcccgcaggagcgcggccttgtagttctcatggatggggcactcctcgctgaccagcagacaggtgcccacctgcacgccgcaggctcccagcgcaaaggctgcggccagctgacggccatcggcgatgccgcctgccgcgatgacagggacatccaccgcgtccaccacctgcggcaccagtgccatggtggtcatctcgcccacatggccgccgctctcggtgccctctgcgatgacggcatccacgcccagcgggacgaggtgcttggccagaacggccgctgccaccacggggatgaccttgatgccggcttccttccacatggagatgtacttgccggggttgcctgcgccggtggtgacgaccttgacgccctcctccacgacgatcttcgcaaactcgtcggcctgcggatgcatcagcatgatgttgacgccgaacggtttatcggtgagcgccttgcagcggcggatgttctcccgcagggtctcgacgttcatgccgcctgcgccgatgaggccaagcgcaccggcgttggagcaggcggcagcgaactcgccggtggcgatgttggccatgccgccctgaatgatggggtatttcgtgcccagaatttcgttcaaaagtttcatctgatacatcccttataagtaatcagcatcccgccccatgtcaggccgccgccgaagccgatgcaggacaccttctgtccagccttgagcagcccggcctcggccatctcgttgagggccaccgggatactggccgcactggtgttgccgtggcgatccatgttcttgtaaaattttgcggcgtcggcgtggagcgctttcacacagtggtcgatgatgcggctgttggcctgatgacagaccacccagtccacctcgtccagcgtcagctgcgtctcctccagcaccttgtgcaggcagcggggcagtgcgtccaccgcgaagcggaagacggccctgccgtccatgctgataggggccgagccggtgcggcaggggccgcctgcgtggatggcctcatcgccccgtgctcccagcgtgatggcaaagggtgcgtcgcaccgttcaaagatcgctgcgcccgccccgtcgccgaagaggacgcaggtagagcggtcggtctgatccatcaggcgggacagcgcctcacagcccaccacgagggcataccgcccgcccagcgtcgccagcaggccgcgggccacggcggtgccgtagatgaagcccgagcaggctgcattgacgtccagtgcggggcggtcctccggcaggccgagggcacgctgcacctgacaggccacgctgggggtcgcgtcgggggccgaaagagtggcgcagacacagcaggcgatgttctgcggcccgaggccgctgcgctccagcgcctgctttgccgctgcgatggccagtgtggcggcagattcttcctctgtgcaccagtggcgggcgcggatgccggtgcgggtggtgatccactcgtcgctggtgtccacggtgcggctcagctcttcatttgtgaccgtgcggccgggcaaggccccgcctgtggcgatcaactgcaaaccgttcatgctcgtttcgcttctccgatctgacgaaattttttgtaccgctggtcggccagtgccttgccgctcatcttgcagagggcggtgaggtggtctttcagggccgtgtccagcgcggcaaagagggccgcgtggctgcgctgtgcgccgcccaccggctcggggatgatctcctccacgatgccgtccttatagaggtcctgcgcggtcagcttcatgatctcgcaggcctcgccgctgcgggaggcgtctttccagaggatgctggcgaagccctcggggctgagcaccgagtagacggcattttccagcatgaggatgtggttcgccacacccagcgcaagtgcgccgccggaggagccttcgcccgtgacgatggcgatgaccgggacggtcaggccgctcatctccatgaggttgcgggcgatggcctcgccctgtccccgctcttccgcctccttgccggggtatgcgcccggcgtgtcgatgaaggtgatgatggggcggccgaacttttcggcctgcttcatgaggcggagagccttgcggtagccctccggccccggcataccgaagttgcaggccatgttctcctccagcgtggagcctttgcggtggccgataacggtcacgggcatcccgtggaagcgggcgatgccacccagaatggccctgtcctcccggcactgacggtcgccgcactgctcaaagaagtcggtgaacagggcgttgatggtctcatcgatgtggggtcgctcgggatggcgggccagaaagacccgatcctcggcggtcagcgggccgcagcagcggaggatctcatcctcctccacggccagctcggccagctcagaggcgtgggccgtgatggcggccatctggctgtcctcgtcctgtgcgccgcctcgcagggcggcgatctgggcgtccaaaggagcaagctgctccagaagttcttttatcattccgttttcctcccgcctgcatggagctgcagcagctggatgagggtggcgcgaagctcgctgcggggcacgaccttgtccacaaagccgtgctccagctggaactcgctgcgctggaagccctcgggcaggcgctcaccgatggtctgctcgatgacgcggggaccggcgaagccgatgagcgcgcccggctcggccagcatgatgtcgccaaggctggcgaagctggcggtgacgccgccggtggtggggtgggtcagcacgctgatgtacagcccgcccttggccgaaaagcgctcgatggcggcgctagtcttggccatctgcatgaggctgaagatgccctcctgcatccgggcgccgccgctggccgagaagatgaccagcggaagctttttggctgcggcatattcgatggcgcgggtgacgcgctcacccacagccgtgctcatgctgcccatgaaaaagcggctgtccagcacggcggccaccacggccacgccgccgatgcggcccacagctgtgacagcagcctcactgaggcctgtcttctgggtctgagcggcgagcttgtcggtgtagccggggaagcccagcacatcctgcggggcaagctcttcgtccagctcccggaagctgccgctgtccagcacgaggctcaggcggtagtacgcgccgataggctgatgattgccgcagttggggcagacgaagaggctcttggcccagatctggcgggtggcacggcgtccgcactgcttgcattccacaaactgcggctcatgccacgccacaccggcgtcccgccgggctttgagctggaaggtgcgctcccgcatccggcccgggagcaggtctctgatgtcgttcatcgttatgcctcagcgtgtgcagtcaggtagttgaagatgtcgccgacggtcttcatgttggccagctcctcgtcggggatggagacgccgaaggcatcctccagagccatgttcagctccacagcgtcgaggctgtcggcctcgaggtcctcggtcaggctggcctccatcgtgaccttctcctcctcgcagttcagggtgtcaacgacgatcttcttcatatcctcaaaagtcatggtaagcttctccttttatcttgtatgtgttgtgatattgtgtctgatacgggcgaatcatctcaggctgtttagttaaatgttttgagtgattcgataaggtcattatactcgtccacccgggattgtcaatagttttatctaaaaagttttagctttcacggttctttcacaggtttttacgcaacttaaacattatataagttgcgtaaatcgaggtgaaaacagaaaaaatccccctaagcaaccactcagggggatctttgcatttcttataccgtgatctcgatctgatttccttccaccgcgaggacacaactttcataatatccgtcgccggtgatgcgcgggccgctgaggacctcgtagccgtccgccttgaggcgtgctgtcaattcctccaccttctctcggcttccgacgctgaacgcgatatgtgcgtagccggtgcggacggcaggcttgggcaggtcggacataccgggcttattcatcagctcgaggcgtgcgccctccccgaaggtaaggaagtaggagcggaagtccgtccgcaggttgtggtagccctcgttcggcacagcgtcgaggtagcggacgaagaagtcctttgctgcctcgaggtcgttgacgtacaacgcagcgtgttcgattttcattgtgtcaccttcctatgttttaccagatagtatccgatgccgatgacgtccgccagcgcccagccgatggggacgctgagccagatgccggtgacgcccagcggggtggccgacagcaggtaagccagcgcaacgcgggtgcccagagaggcgatggtcagcaccaccgacatccccggctggttgacggcgcggtagtagccgtagagcaggaagaggaggccgatgccgatgtagcacgcgccctcgatgcgcagatagtggacaccggcggcgatgatgtccgcctgcgaggggtcgatgaagatgcccatgagggaggcggcaaagagacagaccatcacgctgataaagatgcagaagagcgccgaggtcagccccgcgctgcggatgcccctgcggatgcggtcggtctggcctgcgccgtagttctgggccacataggtggagaaggcattgccgaaatcctgcaccggcatataggcgaaggagtcgatcttcaccgccgctgcgaaggccgccatgatgaccgtgccgaagctgttcacgaggccctgcaccatcaggatgccgaagttcatgatggactgctggatgctggtcatgactgaaaggttcaggatggccgcaaggttcttcctatcccagcggcagtcctcccgccgggggcaaagctccgggaattttttcagggtatagacgccgatgccgacgcccgatacgaactgtgaaaataccgtcgcgcctgccgcccccttgatgccccagccgatgacgatgacgcagaacaggtcgaggaagacgttcaggatggccgacacggccagaaagaccagcggcaccaccgagttgccgatggcgcggagaaggtttgcaaagtagttgtagaggaaggtggccgtgatgccgaggaagatgatgaggaggtagtccttcatcagaggcttcagctcttcgggcacccgcagcacccagaggatgccgtccagccccagatagaccagcaggttcagcaccagcgcgatccccgcgataaggataaaggactggaacacgctccggcgcattttttcggattcgccgctgccatactgcatcgagatggccgcgccgctgcccatgcacaggcccagcaaaatcgaggtgaggaaggtcatgagggtgtaggacgagccgaccgccgccagcgcgtcggcgccgaggaagcgccccaccacccatgtgtcggcgatgttatacatctgctgcagcaggttgccgaacatgagaggcagggcaaagagcaggatgctgctggtgatggggcctgaggtcaatgtacgctgcatgggacaaattctccttatttacagttcaacagaatttcatgcggtattctttgggggtacagtgtttgatctcccggaatatcttgataaagtagctgctgtctgtaaagccgcactccgcgccgatctcgccggtcttgagccgggtggagcgaagcagctcggcggctttttccacccggtactgcttgacgtactggatgggcgtgatgcccagcatctgccggaagctgcgcagacaggcgctctcgctgagggccacgctgtccgcgatgagctggacggtaagctcctcggaatagtgctcttccacgaaccgaagcatctgcttcatccgctcagaggcgatctgctcctgctgggacaccttcgtccgcccgcccacgcactgggtgctcagcagccgcagggccagcgaaagatggtagcgcacccggttctcgtagtcgaagggttcatcggacacttccttccagctgtcgtgcaggcagcccagcacctgtcgctgccacggcaccgactcgtccagcagaaagaaggccggggcgtcgggctgggtcatggggcggatgagcttctgccagaagatggtatccatgccccccgtgagccgcgggtggaacactcccgagtggagcagggccgtgccctccgatgcctgttccaccgcgtggagggcccccgagttgataaagacgccctgcccggtctgcaaggtcagacgggtcttattcacgtccacatggaggggacctttcatgcagagcacatattcaaattcctcgtgccagtgccacgccaccgagtagctggacagatcttcggcgtagcaggcgatgggaaacagggcgctgccgtgctgcgccagctcccggcccctctcgctggccacaatgacatcgtggcagatgtttagtgccatattcgccaattcctttccccaaaacattgaagcttttttgtcaaagccgattttgttgtacaaaaaatctgcttttgttctatcttatccgctggtttcgtggtattatttcatcggaacggataagctcagtatagcaccgttcccgggcggttacaacccctgacgccggttcttttccgcgcggggtgaccgctccccatgcagcggccgcgatgtccgatctgcaccacgacccgcaaaaacatatcagttacggaggtatttattatgcttcgcatcgaatattttgataaaaaccgctttatgaaacaggttgccgcaagccgcggcagcatcatcctccatctggacaatggcaccacctgcgacctcaagaaggaccgtgaggcgtccgccatcttccagaccatggacgcccccaagaagggcttcagcatcagcgtcagcgaccccgctgatgtcaccggcttcctgcgctatatgctcgaggctggccgcgcctgctaaacagtcatctactattcttcattattcatcatcacagcaaaacgggacggcccgctctggcatttgtcagagcgggccgtcccgttttgtcctattttgatgtcacaggatgcaccggctgatggcgcgggccacagccaaaagctcctcctgcccgatgaagccgaacttcatctcgtgctcgtcggcatagcagaccgtcagctccgaggtctgcagcgggtcgccgaagccggcggtctggatgccgaaatggacgatcttccggtaaggcaggacgaagatctcctgccgggtgccagtgacgccctgcatatctacgataaagatgcggtggctcgtgaaaacggcctgatcgcgcaccgtcttgtatgcgcccacgatgctctcgccgtccagcaggagcgcctgcacattcttgcagatttccttctccttgatgcgcataaggttctgcatcggcttttcccgaaattccatacagcgtctccccttcctttatcctttataataaggtattctgggctaagtatagcatttctacccttccgcttcaagtcgttctcgccttttgggccgggttgtgctatactgagagctgatgtatgcaaccgttccgtcatcgctggcgtaccgaaggtttgacggagaggttattccttcaaacaagaaagaggttaaacatggagatcatcgttcatcaggccattctccacgttctggacaccacgctggacgcacctgtcctcagcggcagctgcatggagatgaccgccgaaaagacagcctatttacagtaccacatcgaaaaactgctggccagcgacgacatccgccagtgccgccccctgccggactcggctttccggtacgagctggagcggaacaaggactttatcgacctgtcctgccgcatcgcgggcgtcctgttcgactatatgcacgcccacaccaccatccccggggccgacctcgccgtggtggacttcacccgggacggtcagccgtggctcgccgtcctcaagctgaactacaagaacggctacacccactacaccgagagcgtggacggcgcgcctgtcaactccatcatccagcagcgggcctgcctgcccacccagagcggcaaggtagaggagggcgcactggtggacctgaccgactactccatgaagctgctggaaaagaaattcgacatcgacggccacaaggagttctatctctccaccgtcgttttccagtacaccaccgccgagccggagaagaaaaagcttcaggccattcaggatgccgccgtgcaggccgtgcaggagaactatcaggacgaaccccatgttgaggcgcaggtggccatgctcatcgccaatcaggccgccgacaacgacaacaaggtgacggtggagcaggtgcgccagcagctggccgaagaatacccgctggccgccgtccccttcgacgactatgtggaaaagagcgacatcctcgagccggcgcagtctcagcagcccgtcaccgtctcgccctcccgcatccgccggatggagagccgcagcatccataccgccagcggcatcgaggtgaagatccccaccgagatcctctccgaggactcggcggtggagttcctccacgccgaggacggcagcgtctcgctgctcatcaagaacgtcatcctgtaacagaaaggagtctccctcatggacctcgcccttatcaccgcccagcaggtggcggagcttttcatcctcatggggctgggtgccctcggtgccaagaccggcctgctgcgccccgaaggcaagcagaccctctcgaatctgctggtcaaccttgtcgtgcccgctatgatcatcaactcctaccggatggatttcagccccgagatcctccgcaatcttctggctgccttcgccctgagcatcctgtccagcctgctgggccttgtcatcaccctgctgttcacggcccgcagcaaggacagccggacccccatcttccggttcgcctgcatcttctccaatgcaggctacatgggccttcccctcatctcggcgttatttggttccgagggcctgctttacgccagcgcctactttaccatcttcaatcttctgctctggacgctgggctacagcatcgtcagcggcagctctgaccccaaaaaggtggccggaagtctgctgcgctgcccggccatctacgccatcgtcgtgggccttgtcctctacctcttccagatcccgctgcccactctcatcacccagccgatggagcttctgggcaacatgaacacccccctctccatgctcatcaccggaatgctcatcgcctcgggcgacctgcgccgcatcctcaccgacaagcacatctgggagcttaccgtcgtccggatgttctttatcccggtgctgaccatcgcggcctttgctgcgctgggccttttccgctatggcatggccacgcaggtggtgctgctgctggaatgctgccccgccgccgccatcacctcggtgttcgccgtccagttccggcacgatgagcagttcgccgccggcagcgtcgtgctgaccaccctgctgagcatcctgttcctgccgctgtgcgcgcttacacttacgatgttctgatttcctctcaggcgcttcgcgccagattcccctttttgtcgcttgcgcgacatcttcccccggccgggggaaatctttcctcaaaggagtaaaaaccatgtccgatattaccatccgcaacgccgccttagccgacgctccccgcattctggagatctatgcctactacgtcgagcacacggtcatcaccttcgagtacgatgtgccgtcgctggccgagttcgagggccggatgcgggacatcatgcagaagtacccctacctcgtcatcgagcgggacggccgcatcgagggctacgcctacgcccacgccttcgtgggccgcgcggcctacgactgggccgctgagctgaccatctacctcgaccacgatgcccggcgcggcggacttggccgtaccctctacgaggcgctggctgaccggctcaaggggatgggcgtcctgaacctctacgcccgcatcggctacccgcagaaagaggacgaatacctcacaaaaaacagtgcccagttccacgctcaccttggcttcaccctcgcgggcaccttccacaactgcggctacaaattcggccgctggtacgatatggtctgtatggagaagatcatcggcgagcacaagcccgaccagccggatgtcgtaccgtatccgtattgaccccaagccaaaaagcaggtgcatccaatcgggtgcacctgctttttgcgttatttgttctccatctgctccttatggtattgcagcgtatacagctgataataccggccatgggcggcgagaagctgttgatgggtgccctgctcgagtattttgccgtgagacaggacgatgatgttgtccgcgtgctggatggtggagaggcgatgggccacgatgagcatggtgcccacgctccgcatcttttcgagggaatcctgaatgagcaactccgtctcggtgtcgatgttggcggtggcctcgtccagtatcataacactgggcttatggaggatggtgcgggcaaagctgagcagctggcgctggcccgccgagaagttgttgccccgctcccgcacctcctcgtcaaggccgtactccagcttgtcgatgaagtggtcagcgttgacgtaccggcataccttcatgatctcgtcgtcggagatattctcttcccgcaggacgatgttgctgcggatggtgcccgagaagaggaacacatcctgcagcatctggccgaagtggcggcggagggaggagatcttgatcttccggatgtcgatgccgtcgatcaaaatttcgcccttctggaactcgtaattgcggcagatgagggagaggatggtgctcttgcccgagccggtggagccaacgaaggccaccgtctggcgcggctcgacatggaaggagacgccctgcagcacccactcgccggggacgtagctgaaccagacgtcgcggaactcgatgtcccccttcacctcgtccagttcgatggcatcgggggcgtcggtcatctggggctggatgtccatgatggaaaagaccttctccgaggacgccagcgccgactgcagccagttgaactgctcggcgaggttctgaatgggggtgaagaacttggagatgtacatataaaaggtgacgatggtgccgctggaaatggtctgcccgaggaaagaaacatggtccagatggcccataccgcccagatagaacaggcagaggatggagctgatgtacagcatatacaccagcgggcggaagacgccgaagacgaagatctgctcctgcgtagccttggcgagggtctggctcttctggcggaactcctccatcttctcgtcctcgcggccaaagatctgggtgactttgatgcccgagaggttctcggaaagataggtattgat

SEQ ID NO: 1007 - DNA, 10953 bp, unidentified
  source 1..10953: mol_type = unassigned DNA
atggaaaaagttgataggacccactgggagcgggctgaattgttcgagtttttctccgctgtttcccaccctttttacagcgtcaccttccgggtggatgtaacaaacctttaccgctatgtcaaggagcggcatttgtcgttttattacgcgatggggtatctcgtaacggatgccgtgaacagcgtgaagaatttccgctacgccatccgggacggcgaggtgtggctgctggatgagcgcattcccagtctgaccgacctgaaacccggcagtgagcagtttcacatcgtcaccctgccaaaagtcggtggcattgcggagttctgtgcctccgcacaggcgagaagcgctgcccagaagacccttcttgaccaggacgaagagaacgacaacctcatctatatctcctgcacaccgtggtttgatttgaccggctgcaccaacgagcgggattttgaccgggacgacaacatcccccgcatcacatggggcagatatggcgaggaaaatggccgcaagacattggggatgtcggtggaggtcaatcaccgcttcatcgacggtctccatctggggaaattctacgagaaactacaggccgacatcgacgcactataaggaggcattctgatgtatcctgaccgcaagaccgccgaggcccttttgagagaggccgagccgcacaaccccggcccgtggggcgaccacagcccataagtaagcctctcccctcgttttgcattggaggtatcatatcatgcgcaagccccgcatcatctttttcgacatcgacggcactctcatcgacatggagaaaaaacgtatcaccaagccgagcttggacgctctgcgccgcttacagcaaaacggcatcctgctggccatcgccaccgggcgttccccgctcattgttccgagattcgacggcgtggagttcgacgtctttcttacctacaacggctcctactgctacgaccgccgcggagatatttttgccagccccatcccgccgcaggatgtgcagaccatccttaaaaatgcggctgctctgggacggcccgtttcggtcgcaggccggacgcagctgctctccaacggaacggatgacgatttaacggcatattacgccatcggcggacgagcgccggtcatttccgataagttcgatgaagtctcccgaggtgaagttttccagctgctgatgggctgccgcgaaagcgactggcccgccattctcaaaggcacaagcggtgcaaagatcgccgcgtggtgggacagggccgtagacatcatccccacctcgggcggaaaaggagccggcatccagaaagttctggcctattacggcctgacgcccgaggatgcaatggctttcggcgacggcaacaacgatatagaaatgtttcaggctgtcggtcacagcgtcgccatgggcaacgcctcccccgacctgaaagccattgccagcgaggtctgtcgtccctgtgctgaggatggtatttaccactattgtctggaaaaggacttgatttaagctaacaacctaaaaatagcacctcgctctaaatacaggagcaaggtgctattttatattgacatattatctttcttcccagcagtcaacttttccgtttaagtgcactccaaagtccgacgcaatctgcaatgtctggcttgtgccgtccatatagtcaacatctacacgggaaatcttgatttttcagtcgtgctgttataccatgccgcattccacatactgatttgggaaaatgtgcttctcaggtttataatatctgtcttcttactcgtcattgcagcaacctgacttgaaatctgccgcgttttataaatcgtaaaagacgggtcatagtatggaatgccatctttgtgtttttgcacataatgcactccatagtaatcgtaaatatactctcctatccccttttctgtttcaatcgggccggtcactttgcacgagaagattctatttcctgtcacttcatcttctacagggtcatcaacagcattatagggttccatataaaatctaacgtacttgatcgtttttcctgtattattgttccataaaacgattggtgagacgccgccagccgaattgaccgtaaaaataactttcataatttcgacaggcttcacatcactacgcttgaaattttcagcataaaacctttttacatcatcctcggaatacacactctcgtcgtaagcttttcgtccttcttttttgccactctgcctgtaatggtcatacagtgccattgtatcatttccgactatctggacgacatctggattcttcgtcgcataatattccgggtcaaatacccatccgtccggaattgcctccaatgccgccgaagcgccgagcgtcatgcttgagactaccgctgctgcggctatcagacttagcattcttttcattcttcgccattcctttctttttagcagctttttcttttgatccagataatcttccaccctccttcaacatcgtctttcgtttattttagagtttataactctatttgtcaagtagctgtcaaaaatccttatactattttgtgtaaggtggtgagttttgtgcgctacaatgaacgcatccgcgaaatcagggaagatagtgccctgactcagcaaaacattgcagacctgcttcatgttggccagcgcacatattccgattatgaaagcggaaaaacccgtattcccctcgacagtcttttgattcttgcacgattttataatgtctctgtagactatatttctggtgccagcgatataaaaagtgaatatcccaaacaataaaacctccctcatcctgacaaatgatgagagaggtttttattgttctatagattatttcttatcgtcgtctcgttccgccttttcggcctcctgctgctgacgcagctttttgatacgctttttctcgctctcgacgcgaggccatggccacgaaaagccctcgttctctttgcaccagcgagtgagcggatagaacgcgaaggccagcccgaacaggtacagcaggacgtacagcaggcctgaaagcgttaccagtgcgtccagtgcaccgatgagggccataagaaagcccgccttcaggaagaaaagtccgttctgacggcagtactcggggaaattttcagccttgacagcctgacggccctgatcgccccagacccggggatttttcatgaccgaatacccgtaaaagaccagcatcaggccacaggtgagttggaatccaaaaaacatctgcgtcgttcctcgctttattctggtgtaatggtctcagaagaccgcttagttgtcgtactcgcccagcagcggcttcatgaagggcaggaagtccagcgttgcaaagtaatcgcggggggtctcggcgcggcggatgaggcggtgggagccgtcctcgcagagcaggacttcggcgctgcgcagcttgccgttgtagttgtagcccatcgcagagccgtgggcaccggtgtcgtggatatacacgatgtcgccgatgtcgatcttgggcagcatccggtcgatggcaaacttgtcgttgttctcgcacaagccgcccactacgtcatacttatggtcgcagggggcattctccttgcccagcaccgtgatgtgatggtaagcgccgtacatggcggggcgcatcaggttggccgcacaggcatccagaccgatgtactccttgtagatgtgcttctcgtggatggcagttgccaccagtgcaccgtaggggccggtggtgaagcggcccatctcggtgaagatggcgacatcgcccattccggcggggaccaggatctcctcgaatttcttacggacaccctcgccgatggccatgatgtcgttctcagtctgctcaggacggtacgggatgcccacgccgccggacagattgatgtaggcgatgtggacgccggtggccttctggacgcggaccgccagctggaacaggatcgcagccagctcggggtagtaggcgtccgaaatggtgttggaagcgaggaaggcgtggatgccgaagttctttgctccctttgcagccagcttcttgtagctgtcgatcatctgctcctcggtcatgccgtacttggcatccccgggcttgtccatgacctgaaagccctccttgctctcgcccaactggaaggtgccgcccggattgtagcggcagaagatgttctccggcacaccggccacccggtcgaggaagtccaccatcgtggcgtcgtcgaggttgatataagcgcccagctcgcaggccttcttcatgtcctccacgggggtctgattggaggagaacatgatgtcgctgccgctgaagccgcacacctcactgagcatcagctcggtcagggaggagcagtccacgccgcaaccctcttccttcaggatctggaggatgacggggttgggcagagccttgaccgcgaaatactcgcggaagcccttattccagctgaaggctttgttgatgcggcgggcgttctcccggatgcccttctcgtcgtagacgtggaagggggtgggcacgtcctgaatgatgtcctgagccatcgactcagtcaaaaacggtttcttttccatgatatacatccctctcatatatttttacacagccgaatgccgtgcagccagcagttcacagcttgaggttctctcgggtgggggtaaaggtaggcaccatcttggccagctgggccacgacgttgtcgtcgttgtgctcggcggcggcagacagctcctgaagctgctgatagaactcaccaaggtcgatgttccggggcggagccacgaagatcttattgtggccggtacggcgcatcttgtcctgttcctcgtccatcatcagctcttcgtagagcttctcgccggggcggagacccacgatcttgatgtccatattcacgcccggctcgtagccatagaaacggatgagctgctttgcgaggtccatgatcttgaccggctcacccatatccagcacatagatgctgccgctctcggccagtgcgccggcctgcagcaccagctgcgcggcctccgggatggtcatgaaatagcgctcgatgttggggtcagtcagggtgacggggccgccctttttgatctgcgcctcgaacagtgggatgacgctgccgtggctgcccagcacgttgccgaagcggacggccacgcacttcatgtcggtgttgcccgcaaaggtctggatgagcatctcgcacaggcgcttggtgcagcccataacgctggtggggttgacggccttatcggtggaaagctgcaccagccgctccacgccgtgttcgctggcgctgaccagcaggttcttggtgccgaagacattgttcttgacggcctcagcggggctgatctccatgagcgggacatgcttgtgggccgcggcgtggaacaccaccgtggggtggtaggtctcaaagacctcgtccagacgggccttgtcccggatggaacccaccagcaccgtgatgggcacatcgcggccatacttctgctgcagttccatctgcagctcgtaggcgcagttctcgtaaatatcgaagatgagcagcttcgcgggtctgaagcgcatgacctgacggcaaagctcactgccgatgctgccgccgccgcccgtcaccagcacggtctttccggtgagatagcccgagatctgggccgtgtccagcgtgacctcctcacgggagaggaagtcggcagtattcagctctcggaacgccccctgctggggtgcgcctgcccccacaagctgggggtcgctgagtatctgcaccgcacagtgggtggagacgcagaggtcgatgacatggtttaggcggctgccccgcagggtcgggatggcaatgatgatggtgtggatgctgtagcgggtgcacaggtcgggaatctcctccagagtgcccttcaccgggacgccatggatggtctggcccagcttggcggggtcatcgtccaccgccaccaccgggtggccgtagctgccgttgctcttgcagacgttgatggcccacgcaccggcctcgcccgcgcccacgatcatcacagggcggttggggtctttgctggtattgccccgcagccgctcgcccagtgggtgattcaggaagagccgccacgccagacggctcccgccgacgagcaggaagatgagcaccgaagccatcgcgttggccgagttgaagagcacgccatggatgaagcagcggttgaccagatacaccacgaccgtcggggcagcgatcatcccagccagacggatgaggtcccgctctccggcgtatttccagaggatggtgtagagcctcccgcccaagaagctgagcagatagaccgccacgatccacggcaggttcgcgtagagcagggcacggttgtgaggccaccacgaggcctcgactgcgccgtctgcgcggagcaggagcgcaaaataaaagctgaaggctacgatggctgcgtccagcaccaccagaaaggcccggcgggccagcacctgcagcatacttgttttcttttccttcacagaaagtcctcttttgcatcggggccggtgtcggagagacgccagccgccgtttttttgacccaagggcctatcgccccatcgtatctgtatcattatactcgattcttctccccatgtccagcgcttttgtgtcttctctcccctgccaccacgtcccgcagctcctcgccgaggcccagcggccatgccgccgcaaagcagaccagcgtcatccccgcaccgcccagcgccaccgccgccagctgcgcgggcactcctctcgccagccatggggtcagaagcttccgcagcgccagccccgctccggcaccggccatccccgcaagacccggcgcccccagccaccgccacagtcgcagcggcaggccgcagctggacagcagccgcccggtgttggcggcgcaggtgtagaggctggacagcaggatcacgaagagaaaccccttcatcccgaaccggggcagcaggagcaccacccccgcgatgcggaggcaggagtcccacatactataccggaagacggctttctgctctcccatccccttcatcgcgccgtccaccatgctctcgaggtacatcagcggcatggccgggccgaggatgacgagatagctgcccgcctccgcgctgccgtagagtgcctcggccagcggctgtccccacacccagaatgctgcccccgccagcgccgaaaaatagcctgtgagccgcagcatccggtcgatgaggacggagagccgcctgctctgcccccggagatgggcttgggtgatctcgggcatcaggaggacggacagactccccagcagcccaaagggaaaggtcagcaggggcagggccatccctttcaggtttccgtactgggtcacagcctcggcacgcccgccggagcattgcagatagaccgcaaggcaggccgggaccagcatattctcggcggtgtggagagcgctggcgaggcatcgcccgccctccaccggccagaggatgtcccagagccgcctccccgggtcatggggacgctgtacaggctgtgagccgaagcagcggcgggcctcccggcagtagaacagggccatcagaccggtgctgacggcctcgctggccgccgttgcgcccagcactgccgtacagcgctgccccgcatcccatccgagagcgtcggcccggcccagcgcggcccagacgatgccgatgcggacggtctgctcagccagctggctcaggacattcggctcgacctgccgccgggcgatgaaaaagccccgcagcaccgacgacaccgccatccacggcagacccagcgacgagacgcgcaatgcccccgccgcccgggcatctcccagccaccaccgtgcggcgaggccggccagaccgaactgggccgccagcgccgccactcccagcccggcccccgccagcagaagacggcgcagcatcccccgggcctcggccgggcttcgggccagctcttcggccatcaggcgggtggccgccaccgatacgcctgccgtcgccagcgtgacgaaaagcgagtagactgccagcaccagttgatacagccccatcccctcgccgcccagcgcgttcgccagccagatgcgcagtcccatccctgccagccggagcaggacatcggctccggtcatcagggccgcgtttttcagataactcttccccactgcgccccctccctttcctgcttgtatctttttataggtatgcacgccgctctgggaaatatgagcggcggcgtgggttgtttctttcccagttttatgatatgatatatattgtatctggcggagcgttttctgccagacaggatctaagaatgcaaggaggaagcgcaccccggtaccacggccgtgcgcaatgagacaatgagcgaagaatgtacccatgactgctccaactgcggggcagcgtgttcttcccgcaatgctgcaccccagcatgacgcccccaacccgcacagccgggtcaagaagatcatcggtgtcgtgtccggcaagggcggcgtcggcaagagcatgaccagcgccctgctggcctgcgccatggcacgccgcggctaccactgcggcatcctcgacgccgacatcaccggcccgtccatcccgaagctgttcggcatccatggccgtgccatggcggacgacaagggctgctggcccatccagagccggatgggcatcgacgtcatgagcatcaacctgctggtggagaacgaagaggaccccgtcgtatggcgcggccccgtcatcgccggtgcggtcaagcagttctggaccgatgtggtctggaaggacgtcgatttcctgttcgtggatatgcctccgggaacgggcgatgtgcccctgaccgtcttccagagtctgcctgtggacggcatcgtcgtcgtggcaagcccgcaggagctggtgagcatgatcgtcgccaaggctgtgaacatggccgagatgatgaaggtgcctatgctgggcatcgtcgagaacatgagctacatcgtctgccccgactgcggcaagcacatcaatgtgttcggcgacagccatgtggacgaggtggccgcaaagcatcacctgcccgtactggccaagtgccccatcgacccccagctggccgcgctgtccgacgccggcatgatcgagacctacggcggacagttcctcgagggtgccgctgacgcctgcgagaagctgctgaagtaagacttatcccccctgtgccgccctttccgggccggtgcagggggatttttattctttcacaaaatcaggcgttatcgccattttttgaagcacccgttcttttttgtgaagtatgttcatcttttctgtagtttttttgaaagattttccagcttttgcagggcgggccatcttgtaaatcggcggataaagctttataataacgaggtgtgctgaggttcgctgtcctcgccgcggaaacgggagagccggggcctcatgatagagctacacgatagagttaagggaaaaggagtatcttactatgctgacgaatgaatatctgaagcgtgtctacgagggcctcgagaagcgcaatgccaacgagcctgagttcctgcaggctgtccgcgaggtgctggagagcatccagcccgtcgtggagaagcaccccgagtacgagaaggccggactcatcgagcgtctggtcgagccggagcgcatcatctccttccgtgtgccttgggtcgatgatcagggcaaggtccaggtgaaccgcggctaccgcgtccagttcaacagcgccatcggcccctacaagggcggcctgcgcttccacccctctgtcaatcagggcatcctgaagttcctcggctttgagcagaccttcaagaacagcctgaccaccctgcccatgggcggcggcaagggcggctctgacttcgacccccacggcaagagcgacatggaagtcatgcgcttctgccagagcttcatgaccgagctgtaccgccacatcggccagttcgtggactgccccgccggtgacatcggcgtcggcggccgcgaggtcggctatatgttcggccagtacaagcgcctgaccaacagttttcagggcggtatgctcaccggcaagggcctgactttcggcggctctctggcccgtaccgaggccaccggctacggcctgtgctacttcaccgctgaggccctgaagtgtatgcgcaacgacagcttcgagggcaagaccgtggtgatctccggctccggcaacgtcgccatctatgcctgcgagaaggccacccagctgggtgccaaggtcgtcactatgtccgactccaacggctatgtctacgaccccaacggcatcgatctggcctacgtcaaggatctgaaggaagtccgccgcggccgcatcaaggagtatgctgagacccacaaggatgcgacctatgttgctgactgcaccaaggtctggactgtcccctgcgacatcgccctgccctgcgctacccagaacgagatcaacaaggagtccgcagaggctctggtgaagggcggctgcaccgtggtctgcgagggcgctaacatgcccagcacgcccgaggccatcgaggtctatctgtccaacggcgtcctgtacggacccgcaaaggcctccaacgccggcggcgtggctacctccggtctggagatgagccagaactccgagcgtctgagctggacctttgaggaggtcgatgcaaagctgaagggcatcatggagggcatcttccacgcttcctatgacgcttctgtggctgccggctccgagggcaacctgatggtcggtgcaaactgcgccggcttcctgaaggtcgccaccgctatgatggctcagggcatcacctactaa

SEQ ID NO: 1008 - DNA, 10459 bp, unidentified
  source 1..10459: mol_type = unassigned DNA
  misc_difference 3043: note = a, c, g, or t
  misc_difference 3044: note = a, c, g, or t
  misc_difference 3045: note = a, c, g, or t
  misc_difference 3046: note = a, c, g, or t
  misc_difference 3047: note = a, c, g, or t
  misc_difference 3048: note = a, c, g, or t
  misc_difference 3049: note = a, c, g, or t
  misc_difference 3050: note = a, c, g, or t
  misc_difference 3051: note = a, c, g, or t
  misc_difference 3052: note = a, c, g, or t
gacggcaccggtggcggggtcctgcaatgcggagcaagagaactgacaaccccatatgcaaggacttcagcggcaaaaacggaccaaaaccagccgacggacggcagggaacattatattcagatggacggacaggaagtgtaccggttcgccaccagacgggtgccacagtgtatcgaggaagcactgtcagatgccggacttgctgtgccggatattgatatgttcgtattgcatcaggccaacgcacgtattattgatgcagtggcgaaaagactgcatgcagacagagacaaattccccaccaatctggaaagggtcggaaatatgtcctctgcctccattccggtgcttctggatgaactgaacaggcagagaaagctgcaccgcggcgaccgcatcgttctggcgggattcggagccgggcttacgattggggcttgcgtgatgacctggtagacggtatactgataacgactaaggacacgacaacggcatggacgcggtccggtagacaggaagcctgcggcccgggagtattgccggtataccagagagacatttattgggaaaactatggagaagagcaacaaccgggtactgaatgaactgttggtgaacctgttccataacgtgatggatgcagaggcaaaggcggtcataacagaagaattcaaggatattacaaataatgacatacacattctggaggctatcggcatcgaggaaccaaagagtatgtcccgtatcgctggggaactccacgttaccgtgggtaccctgaccacgaatatgaacagtctggagaaaaaaggctatctggagcgtaaccgcagcacacaggacaaacgggtggtgctggtgaccctgacagagaaggggagaaaagcttttttccaccacagagatttccacaggaaaatgatccatacgatcattcgggatctggacgaggaagaaatgaagacattgatcaaatgtctgggaaaactggatatatttttcagagaaggcaacgaggagtgaccggagagatctggtggctccttttttgtgtttacgatgagccagcctgctcgattttgcggtgggcgcacttgtttgacaaaattttataaaaatatgagacgaatcgtatggaaaatattgacgatgcctttgctttttcggtataataaatgatacggaaagtataaaaacaagattgggattttacatctgcaaagggttgggaaatatttgaaattttgcaggatatagaaaggcatgagggttatgaagaaaagtacaaaagcatggagcatgaagatgaggctggccctgctggcactggcgtcactggcgtggatcgccgtgccggtgagtgcgagagcggaaggagattcgtgggtggaatgtgccgcaaccagttttgcggggggtacgggtgaggaaaatgatccctatcagatcagcacggcggcgcaacttgcgtatctggcgaagcaggtgaatgaaggcacggattatcaaagggtgcattttcggctggtttctgaccttgaccttggcggtaaggagtggacgccgataggtacagatggcaagattttctggggaggctttgacggcggcggacatacaataaccggaatgacaattacaggagatagagactatgtggggctgtttggagagtgccgcaactttaccgctgattccagctatataaaaagtgtcacggtaaagggggctaatatttctggtcatagccatgtgggcgcaattgctggagaaggagcaaatatttctgactgctatagtatcgaaaacacgatttgtgcggcttggtgcgtaggcggtatatgcggaagtctgacaggaaatatttccggctgctacaatagcagttcagtaagtggaaattctacagcaggtggaatcatgggcagtgccagttctgaaagaaccgttggcgtagttgaatactgttataatataggtgctgtaacagttcgtcaacaggatagctctgtaggtggtattaccggtgcatcagcgcataggtataacatcagtaattgcctgaattgtggtaagattacagggaatggcaaaaatgttggtggcatagctggaagcacggattcgaattatatgaactttatcggcaactgctattacaacagtgatttgaataatgccggtgtgggagaaggagcaagcgataaggtgattcccctgactaccagccagctttgcggtgcacttccggagggcttggattctacaatctggaaagagggcagtgtcgataccatcactgcaaaggctacagatacaggaagtagatttggtacagccacagggacttacatcaatctgacaaaggtggcaaagatcggagagacgaagactgcttccgtaccggtttacaactatgttacaacgaatggcgacgactgggatatctataccctgatcaccacggcggaggaattcgcagccatcggacaggatacggcaaactgtaacgaaaactatgtattaaaaaacaatattgatgtgagccgagtggaactcagatctattggagatcccggaactccatacataggaaaattcagtggagacggacatacgataagccatgtggatatgacaaaagaaaatgatgtttatagttctggtttgttcgcacaaataggcgaccaacccagcaaaaaaagcggtaaggtaatgctgttggctgccaacggagacattgtttcgagttattgtgaaacaggaggaatttgtggaaatttgtctgcgggcgaaatttatggctgctcctttaccggaacggtaaaagggtctatggtaggcggaatcagcggcgtgggtggacaatacactatgatttcccagtgcttttttgaaggagacgtgcagggaaaggattctgcggcaggaatctgtggtatgggcggaactattgaccattgcattagcataggaaatgtcaaagggaatggagaacttgcgggaatatcaaatagtggtgatcccaacccggagaagnnnnnnnnnngttatttcaataaagatatttgtaacgtaaaagatgactgtgatttgggacattctaccctgcaactgacctcttccagctttttcaaagaactcaaagacaatggctttgatccggccatctggacgaagaaagccaacgacaaagagaatggcatagcctactatccttcgcttggggaaaataatgcagttggtgtgaagtacaccaccggtctgcagtttgagagagcagatgacgttacgcccacctatggacaggatataacttttaacgcaaaggcactggtaaactttgtgacagacgaacagcccatctctgcggaagatacggagggcagctttgagatccggatcggggataccccggtggtaagcgcagcggatttcaagaacggcatcgcaacttacaaggcgcagaccgtgggcgagaccattttcaccctcgtttacaccgggacaaactcttctttcttcccggagcagacgacgaaggatctgaccgtgaatatcaatccggctctacttactgtagaaggtaagggcattgccggtggaacctatggcaataagctgagagaactcaaagtgacaagactgacggcaaaactgggaaccgagcccatcgacggaacttggcagatccagagcgatgatgacaaggttccttatgttggcgatagtgagacctacacggcaacgtttattcctacggagcatccggaatactatcagacgctgacggcacaggtaaaattggaaatcagtaaagcaattgctccgaagattcaagacttggatctcaaatacagttgggcggccaaaggagagaaggcggtgcagataccggggttgcccgaggatatgggagagacaacgatggaagttatcatgcgggctgattccaggagcgttttggcagcagattctgacatcaaatattccgagggaaaattgctattcactctgggtgaaaacaccatggatgatattggcgagaatgcgatagtaagtgttcagttacggtcaaaaaattatgaagatattaagtttggcataactatcacccgcaccgaaaaagcagaccgcgaggataccccggacccggatgcctttgacatgacctttaccgtcagcggcaacgatctggcggcgcagatcaccacagaccgcactgacgtggaggtcagctttgatggaacggactgggggcagaccaaatccaccggagtcggtcacaacgagaaggtgattgcacagatccgctatgcggaaaccgatgattataacgcaagccccgccgtatcgaagacacggaactccggtcacggcccgctgacccaccacgaccgggtggaacccacctgtcaggcagagggcagcatcgagtattggacctgcgacgtctgcggcctgtattttgcatccgcagatggaagtaagagcataacagcggcagaaatcgtgctgccgaagacggatcatagctgggcagaaggatatctgtccgatatgaccggacactggcataagtgtggtgtctgtggaatcaccagcaatacggaaaagcatgcatccggtggcgcggccaccacagaacgggcggaaatctgtacgatctgcggttatgagatcgcaccgaagaagcctgctgccagtaacgatgatgacgatgatgacgacgatgacagcagtcaggcgtccaatacggaccagaagaccacggacgcggcaacacctcccgtagccacggcaacgcctgccgcacccggtgtggtaaagccttctgtaattcccgtgcccccgacaacacccgctgcggacgaaaaccgtaaggaagatgcggcaaagccctccggggaggcacaggacacgcaggaatcgagtggagaagcaccgcaggaggagcggatagattccatgatcgcccagacttccggctctcaggaatccggcacagagcagataacggagacctccggtaagggaacgaacgcaggccgtgtggcggcagcggcagcagccggaaccgtagtggtcggcggtggcggcgcagctgtctacgtgaccatgatcaaaggaaagtttaaattcaaataacgtatgataagatgataagcgaacctcagaggcccggtgcttctgaggtttgttttgccataggggagaaatctgccggaaattacaacaaactattttcagatgaaaataaatgtattaaaatagaaataagtattggcagaacgaagacagttttgcatagttacagcaaacgcaagagaaactaatgaaatatagaaagcggaggatcctacgatgaagagaatcggaatgttgacgagcggtggtgactgccaggccctgaacgcagctatgagaggcgtggtgaagaccctggcgaacagtaaggaagaggtcgagatctatggcttcctcgatggctacagaggactgatttacggtaatttccgcatgctgacagacaaggatttctccggcatccttaccaagggcggcacgatcctgggaacctcccggaccccgttcaagacgatccaggatccggatcccaacgggctgaacaaagtggaagccatgaagcagaattattataagctgcagctggactgccttgtaattctcggtggtaacggcacccacaagactgcgaacctgttgcgcaaggaaggactgaatatcgtgaccctgcccaagaccatcgacaatgacctgtggggtactgatatgaccttcggtttccagagcgcagtagatattgctacggatgccatcgactgcatccataccacagcagcttcccacggcagagtatttatcgtggaagttatgggacataaagtagggtggctgaccctgaatgccggaatggcaggcggtgcggacatcatcctgctcccggagatcccttatgatatcgataaggtgatcgagaagatcgaagacagggacaaaaagggctgccgttttaccattatcgctgtggctgagggtgcgatttccagggaagatgctgccctgaccaaaaaagactacaagaaaaagatggaaaaatatccgttcccttccgtatcttacgaagtggctgcacagatccaggagaagaccggcagagaagtacgtgtcaccgtacccggccatatgcagagaggcggaagcccctgcccttatgacagagtattcgccagccgtctgggctccgaggcaggcaagctgatcctggataatcagtatggattcatggtaggttacaagaaccgtgagatcgtaagggttccgttagaggatgtagcgggcaagttaaagaccgtggatcccgatgctaccatcgtacaggaagcgaaactgctgggcatctgcttcggcgattaagacagaaaattaatgagtaactattttcgccaggcatctgctaatatttgatggctctgaatagttacaaggaagagagaaaaaacatgtcatatacagcactataccggaaattccgcccggatgctttttccgatgtcaaaggtcaggatcatatcgtgaccacattgaagaatcagctgcgggcgaaccggatcggccatgcgtacctgttcaccggaacaagaggtaccggtaagaccacggtggccaagatttttgcgaaaacagtgaactgcgaacaccccacagaggacggcccctgtggggaatgccgtatttgtaaggcaatcgcagcaggagctagcatgaatgtcatcgagatcgatgcggcttccaacaacggtgtggacaatatccgtgagatcatcgacgaggtatcctattctcccgcggagggaaaatacaaggtctacatcatcgacgaggtgcatatgctctcccccggagctttcaacgcattgttaaaaacgctggaagagccgccctcttatgttatttttattctggcgaccacagaggtgcacaagatccccattacgatcctgtcccgctgccagagatatgattttaaacgaatctccattgataccatcacggatcgtatgaaggaactgatggacacggagcaggtacaggtggaggacagagctctgcgctacattgcgaaagtagcggacggttctatgcgagatgccttgagcctgttggatcagtgtattgccttccatctgggcaaagaactgacctacgatatgaccctggatgtgctgggggcagtggatacggaagtgttcagcaggttgctgcgcttcgtcatggaccggaatgtgttaggctgcattgaactgttggaagagatcgtcatgcagggcagggagctggtacagtttgtcacggactttacctggtatctgcggaatctgatgttggtacagacagcggataatctggaggatgtcatagacatgtctacggacaatctggcgaatctgaaggaagaagcttccatgctgtccatggaccagattatccgctatattcatattttctccgaactgtccggacagatccgctatgcggcgcagaagcgtatcctggtagagatcgcgctgatcaagctgtgtaagccggagatggagacggatcaggaagctgtcctggatagaatccgccaggtggaggaaaaggtcgagaacggtattgtagtcacggcgccccagatgcctgccggagctcccggagcacagggagtgccgcaggccggtgtggcaaagccgaagccacagttgccgaaggcggttcccggggatattcaggagattgtacggaaatggccggctatcgtgggaaatgctgagaatcccatgaagatgtatctgaaaaacgcccgattaagtctgggcggagacaacaaactcatggtggtattggaagacggactggcttccgattatttcaagggggaagcccacgaacagaacaagcagcagctggaaatgctgttgtccgatttttccagcaaagagattgaagtgacgatccagacggtggaaagcagcagagaattcgaagataactatgtggatctcagtaaggtcatcaacatggagatcgatgaggaagactgatcctgcgtgaatttgggattgcggcagacttgcagataaggtaagatagaataataactcaattataaataatatggaggaaacagcaacatggcaaaaagaggtggatttcccggaggcgcaatgcccggtaatatgaataatctgatgaagcaggcgcagagaatgcagcgtcagatggaagaaggacagaaggaactggagacaaaggagttctccgcatccgcaggtggaggagctgtggaagtgaccatcaacggtaaaaaagagatcacatccatcaagctggcagaggagattgtggatcccgaggatatcgagactctgcaggatgctatcgtggcagcagcaaacgaagcactgcgcaaggcggatgaagccaatgcagagcttatgggcaaaatgaccggcggcctgggaggatttcctttctaatggaactctacagcggacagatcaataaattaatagaagaactggcagcccttccggggattggcagtaagtccgcacaacgactggcttttcacctgatcaatatgccgaaggaccgtgtggacagactggcgaatgtcatgatcgaggccagagccaatgtccggtactgtaaggagtgttataccctgacagataaggaactctgcccggtgtgtgcgaatcccagacgggatcatcgtaccattatggtggtggagaacaccagagatctggcggcctatgagaagaccggcaaatacgagggcgtgtaccatgtactgcatggcgccatttctccgatgctgggcgtaggaccgggtgatatcaagctgaaggaactgatggaacgcttacagggggatgtggaggaggtcattatcgcaaccaactccagtctggaaggtgagaccacggcaatgtatatcagcaagctgatcaaacctacaggaatcaaggtgacgagaattgccagcggtgtccctgtaggaggagatctggaatatattgatgaggtaacattactccgtgccttagagggtagagtagaattatagttaaaagagggaggacaagacaatggcagtaataaaaagtttatttgggaaaagtgcggaagggaaagagatatctctgtataccctgagtaatgatcaagggatgaaagcagagataacggatctgggcgctactctggtgcgcgtactggtaccggatgccacgggcaaggtggacgacctggtgctgggatttgacaatggtgagagctattacggcaacgacagctttttcggcacggtgatcggcccctgtgcgaaccgtaccggcggtgcagagtatacgctggatggcgttacttatcagctggacaaaaatgacggtgccaacaatttacatacccataagcaactgggattccataagagactctgggatgcggagatgggagagaacagcgtgacattttctctggaggatgaggatggacatctgggattccccggcaataagaaggtatccgtaacctactctctgagtgaagagaatgagctgactctgcattaccatgcttccagtgacaagaagaccattatcaacctgaccaaccattcctatttcaatctggacggtcacggtgcaggcagcattgaagagcatgaactgtggctgagagcctctcactttactccggtggcagcaggatcgatccctaccggtgagattcgtgcggtagcaggcacacccatggattttacacagcccaagaagatcggcagagacatccgggaagattatgagcagttactcctgaccggaggctatgaccataatttcgtgatcgatggatggaacgatgacggtacattacggcatattgccacagtaaaaggcccgaagagcggcagagtaatgaaggcatacaccaccctgccaggagtgcagttttatgcaggcaattttattgatgtacagcccggaaaagatggggtgacctacggcaaccgctgcggttttgcattggagacccagtatttcccggataccattcatcatgagaatttcccctcctatgtatttggcggggagaacggtagagaatacgattctgttaccgtatataagtttgaagcatagctaagaatacatagaatatggtgcaaactttgtcgaactgtttttgaagaggtgcgacaaagaacgctaaaatacctcctgtgcggatgctatagttagtgataactgatagaaacggcatgggaggtgttttttgtatggaattaccgaagaacataacgcagatcggagaggcggacaagcactgcagaatctatgtggaagattatgtggtatcttacataaaacaaatgaatgga

SEQ ID NO: 1009 - DNA, 6097 bp, unidentified
  source 1..6097: mol_type = unassigned DNA
atgtctgcacaaaaaaacaaacaaatggatatgcttaatggtccacttctcaaaaaaatactatttttcgcccttccacttgcagccagcagcattctgcaacagttatttaactcagcagatgttgccgttgttggacgttttgcaggcagcaagtctttggcggcagttggtggcaacactccggtaattagtttgttaataaacctgtttgtaggtttgtcagttggtgccaacgtagttattggaaactatatcggacagggcaaaaaagaaaaagttaaagaagcagtacacacggttatggcaatggctgttatttgtggtgtatttcttttaattataggaacagttcttgcaagaccaattcttatggcaattaatacaccggatgaagttttaccattggctatgctttatcttagaatatattttgtaggcatgccttttgtaatggtatacaactttggtgcagcagtgcttagaagtataggcgataccaaaagaccgctttatgccctgattgtgtccggcattataaatatatgccttaatttagttcttgtaattgtttttaaattagatgtggcaggtgttgctattgcaactgtaattgcagattgtgtcagtgcaagtcttgtgacttattttcttatgacaggggatgaaatggtaagatttaatcctaagaaaatgtcattaaagaaggaacaggttataaaaattataaaaataggtgcacctgcaggtttacagggagtagttttctcggtatcaaatgtgtgcattcagtcagccattaatggctttggtacaaaagcaattgcaggttcttcagcagcattaaattatgaatactttacttattatgttattaatgcctttaaccagacaacagttacttttacaagccagaattatggggcaaaaaagcttgagcgatgcaagaaggcatttagactatgtcttgtgtggggaatggcaattacgggaataatgagtcttattttcgtattgtttaaggaatttttcgcaggagtttacacggcagattcacaggcaattgattatgctgttatcagaatggttcacgtattgttgcttgaacttttaacaggaacttacgagatttcaggtggagcaatgagaggtatgggatactcactggttccggcgttgcttactgtagtaggttgttgtggatttagagtggcatggctttatacagtatttaagatttgtcctactttttcaatgcttatgaatgtgtacccggcaacatgggttataacaggagcacttgttatgggagcttatttaattataagaaaaagggtttcggataaataatctgttaaagaaatatttttactgttgacagactgtggctgcaagagtattgtttgttatgcaacttaatttttagtgggataaatacacaaaaatatgaaaagtatgttttaaagaaatagattatttgctataatttctattataataaaatactgtcagatgattagactgcaatgaaatattttatatacaataagtgtatagactggagaaggaatgaagattattatagtaggctgtggaaatgtaggaattactcttgcagaacagcttagcacagaaggacataacattacggttattgatacaagggaacaggttgttgagagtgtatataacagttatgacattttaggtgttgttggaaatggcacaagttttaatattcagatggaggcaggagttgaagacgcagatttgctagttgcggtaacgggttcagatgaacttaatttgttatgttgcctgattgccaggaaagccggtggctgtcatacaattgccagagtaagtaatccaatatacaacagggagatatcatttattaaagaagaactgggattatctatgattattaatccacagttggcggctgcaagagagatgagccgtcttttaaaattcccatcagctttgaaagttgattcttttgcaaaaagccgagtggaattaattaattacagaattgaagaaggaaatattctttgtaacattaaattaaaggatttaagtagtaagttaaaagttgacgtacttattcctattgttgaacgaggcgaccaggttattattcctgatggtgagtttgaacttaaggctaaggacattatatccattgtaggttctcagccgagaactcttgatttgtttaagaagatgaaggtcccaacatcagcagccaggaaggttttaattgtaggtggtggaagaacttctatttatcttgcaaagcaattaattgagatgggaataaaggttaagattatagaaaaaaatcctgaaaaatgtgaggtccttacagaaatgttgcctaaggcaatgattatatgcggtgacgcaactgataaggaactacttatggaagaaggattgatggagacggaagcatttattgcatcaacggattttgatgaagaaaatattatgcttgccctttatgctaagagtcttactaatgcaaagcttatcacaaaggtacatagaatttcttatgatgagattattgacagccttgatgtgggaagtattatttatcctaaatatattacggctgaatcaattattaagtatgtaagagctatgaagaattctattggaagtaacatagaaactttatatagacttaatgacaacagagttgaggctttggaattattaataaaagaagattcacctatggttggtaagccattaagtgagttaagattgaaacctaatgtattaatcggttgtataacaagaagaggtcaggttactattcctaacggtcaaagtgttatacacgtgggagatactattattcttattacaacaactacaggcttccaccagttggaagatgcgttaatgtaggaggaaatatgaattattcaatgatacgatacattcttgcatgggtgtttacttttgagggaatgtttcttatgcttcctgcaattgtaggtggaatatatggtgaaaagcaggggcttgtttatctggctattgcagcaggatgccttcttgtggggactttaagcagaatcagaaagattagaagtaaggtattttattcaaaagaaggttttgtggcagtttctttaagctggattattatgagtttggtaggtgcattgccattctttattacaggagatattcctgcatacgaagatgcactttttgaaacaatatcaggttttacaacaacaggttcaagtattttgtctaatgtggaagctttaacacattgttcattgttctggcgttcatttacacattggattggtggtatgggagttttggtatttattatggcagttcttccattatcaggtggctcaataatgcatcttatgagagcggaaagtccgggcccggcagtaggaaaacttgttcctaaaataagacatacagcaatgattttatatggaatatacattgtgtttacacttgttgagataatagctttgttaataacaggtatgtctccgtttgaggcaatgacattaacttttggtacagtaggtacgggtggttttggcgttttgaatgacagcattgcttcctatagtcttgcatctcagattgtaattaccacttttatgataatatgttcaattaattttaacgtttattacttattattaataagaaagactaaagaagcttttatgaatcaggaattaagatattatcttggaatcgtatttggttcagcacttcttatagccattaacattaaaggaagttttgataatttctttatggcatttcacacagcgttgttccaggtggcgtctgtttcaagtacgacaggttttgcaacaacagactttaacctgtggcctgaattttccaaaaccatattagtacttcttatgtttgtaggtgcatgtgccggaagtacaggtggtggtattaaagtttcaagattagttgtatttctgaaagctataaaaagtgaggttatgtcaattactcacccaagaagtgtacagaaggttcagactgacggtagaccgttatcgaatgatgcagtaagaagagtcttatgttatttaggtgcttatgttataatagtactagcttctatattattaataagtttggacggaaaagatatgacaactaaccttacagcggttatggcaacatttaataatataggcccgggtcttaatttggtaggacctactagcaattttggagattatagtgtattctctaagatagtactaatgtttgacatgctggttggacgacttgaaatattcccattgcttattttgtttgcaccgggattatggacggttccaaagagacgactggcaaagaaaaagaagaattttgaatagaaagtaattaaccgaagaggacgataatgaatatttactattttaatattactgttttaagaaacagaaatgtttttggagaagttgtaaaaactttagatgatgcacgcgcagaaaaaattagcaggttaagggttacggcagataagcttagaagtgccggcgcaggaattttgattaatttcataaaagaaaagtacaatattgccggagatgttaaggtagacaagtttggaaagccttactttgaagatacggatattcattttaacatctctcattcaggttgctatgtaattgcagcagtttctgatgaagatataggaatagatattcaaaagataaaaagcgacaagcatagaattgctgaaaagaattttttgccaagcgaatgcgcttacataaacgaaattgaagacgaaaaaatcaaccagcagagattttgcgagatttggacaataaaggaagcatacttaaagaacataggcataggacttagaaaacctcttaactctttcgaaatagattttagcgaggacgcacctcagatagttggaaagaaagagtacaagttcgtgcaacttaagttcgatgaaaaatacatcgttacagtatgtgcagaccaaagtgatgaaatatttgatgtggaagaagtactggtagtttaagatagtgaatagggaagatagagaattttttaataaattacgtgtcacataacggttttgttctacgacacgtaattccgcccaaaacaataaaaaaataggttgcgtactaacaaaaatgttagcgggcaacctatttttactatattacaaactctattacttgctccaacgtcctgacgcaccgcaaggaagcaccagtccgtttgatgaaacattaacacctatttcatcagcttcaacatgtccgccgaacttgcttacaatagcagtgttaatcatatagtttaatactgcaggctgaagccctgtggtgtatgagttaataaggaagaataaaggatcatcacttaaaatctttgaacaaagttcaatgaaaggaaatacactttcttcaatcttccaaatttctccttttggtcctcttccatatgaaggagggtccataataatgccatcgtatttattgccacgtcttatttcacgctcaacgaattttacacaatcatcaacaagccatcttacaggtttgtcaataagacctgatgaagtggcgttttcttttgcccaggcaacaacaccctttgaagcgtcaacatgagtaacgtgggcacctgcgtttaacgcagcaagagtagcaccgcctgtgtaagcaaaaagatttaaaactttaacaggacgtccggcatttctgattttttcagaaaaccagtcccaattagtagcctgctcaggaaaaagtcctgtgtgtttaaagctaaaaggcttaaggttaaatgttaaatccttgtaattaatggtccactgttcaggcaaattaaaaaactgccactgtcccccacccttgttacttctatgataatggccattaggtttgaaccatttcttgtcatgctttggagtattccaaataacctgtgggtctggtcttacaagaaaataatcaccccaacgttcaagtttttccccggaagaagtatcaagtacttcataatctttccaattatctgctatccacat

SEQ ID NO: 1010 - DNA, 51134 bp, unidentified
  source 1..51134: mol_type = unassigned DNA
ctactcttgttccttatgtcttttaattgctttttgaatttccttaataatatatttagctccaaccgatgcactactgccaagattatacacatattctttaacaaatcggtctatgctgtccttatatgtatcagaagctgccagcatctttgctgctatatcagctgtcttatcaatttcatcaagcttaagtacacgcccgatttcatatctcatccatatattaagtggctcaattccaatctttttgtattcaggattcattatcttcattggtgtatcaatgaaaagaaccggtttacatgtagtataagcatattcatatgctatacctgaccagtctgtaatcataagatctgcctcaaaaacagtactgtttgatgaaaaatcagtctgaatctctatatctgtatcatccttatatctttctttaagtccttccatcttctcaggcatatgtcttacatgctgtgggtgtggtcggactgtaatcttataaccatgtcccttaagattatcaagtatgtcctcaagacagctgtctacaatattatctttctgccatgatggagcaataagtattgacttaatatcattttccttctttggcatcttttcataatcctcacgcatctcatcaagcaatgaatatccccactcaacaagctccttcttaggaagattatacacttcttcagttttttctatttcttctttctgaatctttcctgtacataatacagaatcatagtgatccattgaaccggttcgcattgtcatattaaggctgtccatgccatgaggaacataaacataattaatatcttttctgatataacttctcttaatgtgataattctcaatatcaggcatagtcataacaacaacgtctgcatccatcttcatcataagtgttataagtttcttttcccctatataataaggtttaatcttactttctttttctgcaattctgaatatctgatcatcaggatcacttgttacataatggattgtaatattcgtattattaagtatgtattcaattatccctttaaaatacttatagaaacctgagccctctgaatagaagacaagatgtttattaacaacagagaaaaactttttataatcagctttttctctcttaatatcttctttgtttctttttccctttttcgtaccaagagcttcaatctctgcaagttctttcttagtttcctcaagagcctcataatcaacgtaattcttaggattaatcgcccagttaagaagatataactgaagaattgcaaatatgttgctggcagtccagtaaagagctactcctgcatatacaaagcatcctaaatataacgacagacctactgaaaatatcatcataccatacttattaagcttactctgttctgcctgtaatacgttacttgcattctgtgcaacacataaaagccatgctgagacacctgctataattggtgttattattgataatccccactgttttgtagtaatccatgtaaggtcatagccacagaacttcatgttcgcaacaccttcattaattccgtctttgataactgcaacaactccaagcagaagtattatctgtataataagaggtataagtgatgccagtggattatatttttcttttttataaagcttagactgttcctctgctatctcatccttatccccataatgcttaataagaatcctgttaatatcaggctgcatcttaaccattttaattgaattcttctgtacccagattgatacaggtaagagaacaatcttacttatcagagtgaataatataattgccaatccataatcatgcagtaatttgtaacaaaaattcattacataacctaaggctgtcgataatatttccataaataactcctcttttgaagattttattgattgtgtcagagtcatccaatataataattaatcatatcacttattatcaattattgaaaggtgtttttacatatccgatatactttttttacatacccaatataaattttacatgttttgcacacaaaaaaaggacattgttcttacataatacagtgtccttttaatattatttatttcaaaaggtactcagcatatttaactgccatgtctcgccagttctccaatgcctctcccatgtctgcaccacatgattccctgtacatagcccatacaaaccagtagtacgcaataatagcaacatatgccatataatgaaatcttgttgtctcattataatcttcctgaaggtattcctttatgaattcctcagccttatcaaaatcatacatggcatcaaccacataatatccaacatcaattcccgggtcagaatatccagaatactcccagtcaataagtataacacttccatctggtcttatcatccagtttggcttatatgtatcgccatgacagaaacatttttcaactccatctgctagagtcatcttatacaactgtcctatgttgttcttaagtccttcatattgaacgaagcacacaggatctttcttctcaagaagcttctccatatcaagtgcatcttcccaaggtttcattccataatcggctgttatatctgccttatgcagctttcttaaaacagccaatatcttctttgagtcctcaaaagaattataatcaggttctctgaattctggaatgaatatggatatcttccagccctcattaacatctgcatatatgtatgtaggatctacaccagcttctttggctttaataagtgattttttttcatttcttctattgattatactttctgttccatcgcctggatgtctgtatatataatcaattccgtcaatcttgaatataaaggatgtgttggtcattccttcgcttacatttctgaaatcaattatatcctcctcatcacatctgaatacaagcttgatatttcttattatctcactgtgcgtatgtccaagatactgtgaatcaaactttctaagctcatcaaaataatcaaattcaaatatattacccggaagatattccttaaaataaatatcaggcatttcatccagcttatcctttacaagaatctcccaatagcagttattatatattccagattcccggacagcctcaacctgattaataaatgcttctgagaattcttttctccagaatgaatgtcccataagaacatagccatcaatcttattatccttagcaattcttgttatctttccaaatccatcagttcttgcatatacttcatccgttgtttcctttccataataacctgaataaaatgtatgatattcaaactgattaaacggattctctatataataactgtcacttacgcatatgtacgtattcttaagttcttttcttgcaagataaagactttcaatattattctttatattaaatgaatcattaataatgaactttacaccatacttgtcttcaagatagtaaaacatctccttcttatagccaagtacaactgtaatattcttaataccagcatcctgaagctgctttatctgtctctcaataagacgttcaccctttacttcaaaaagaccctttggctgttcgagtgataaaggaataaatcgtgtagatgcgccagctgcaagaataacggcattattaaccctgtatggttcaagcgcctctaatccagtctttgtaatactaccagactctttttcaatataccctgtttttacaagtttattataaatatctgtgtcattaagagcttttgtcgcctcaacatcataagtacagccggctcttccaatgcttccattatacaaactgttcaatacataaaactcttcttttctcattatacatatctccttatgccatgtttcctgagaacattcctcgaatcactgctttgattacattttctctacatgattcatacttttttcccgaaagtataagtccctctaccttaatgttctttatatccttcttgtcaactgaatacaaatcatctgaaagaaccaccatatcggcaatctttcctgcctcaaggcttcctctttctttctcgtcaaatgttacataatatccattatacgtacacatccttagtgcttcctgaaccgatactgcctgagactgattcatattattaacagctttgtcaatccatacgataggatccggtgatgtacatggagcatcagaaccgcacgaaacaactattccattctcattaaatgttctgagcggattaagtctttctgctctttctttacccataatacttttaagatactcatcaggttcctgtttccagttaatgaaagcactctgtacaggcatctgtatattatagtccctgcatatcttaattccctcttcagttggaagacagtcatgtataattccatgtctgtgatcttttcttggataatcgtcaagtgccgccttaagtgccctgcatgcctggtcaaatgctttatccccaatcgcatgcatctctatctgcagtccggctctgttagccttcttgcagaaatcaataaccttttcatcatcataataaagtactccgtcaccgcctaaagaatcaatatatggttcattcatagctgcatcgtgtgaaccgaagcatccgtcaagcgcacattcaaaacacccgcctattcttggcagttttctctttaatgcgacatcaacattcattgactgtgggaatacccttacctgaaatccattagttaaggattttgcaaatattttttcaaatgtaatatcaagattgcctgtaaaacccacaccacttacagtatgaatacagccaattccatgagacgcctgaaaatcaatggcactctgcatattcttaaacagttcaataatagaaagtgaattggtaatgtaattagaacattcaaagaatgcctcctgattcatctcacctgtatcttcgtgataacctctcaactcacttactttccccttcagcttatcaagaagcttgctgttaattatgcacgcatgtccatcatatttgacaaccatgatttccttatcaggacataccttatctaattcttccctgcttataagtcttccttctttaactgaatatggtgacgcaccaaatgctataagtgtttttttattaccgcttgactgcacgaattctttaaccatctgtgcaatctcttcattggactctgcatccataacattaagtcctgcgtgaaatgtagaaaatgatgccatatgctgatgtgtatctacgaatgccggaaccagcaccttctttccaagttcaactgtctgcacattcttatactgttctggcagttcattaccaacatacacaattcttcctttatcctcaacgagaaaaccggctactgtatcattactgtcaactgtaagaacctttcccttataacatatcatagacattcaccttccctttatatctgcatttactgttcctgtcccggataatccttataagaagaatctaactgtaccagctcataaaaattatctatctccataatatctgatttctcacaaggtcttacctctaccgcatatctttccttgcgaagcacaagtggaataaactcccagaaataatcattgccctccggctcttcattatatacctgtgcaaagtcttctcttaatcttgcactgtcttcctttgtccagtaagatattccataataattaaagcaatatgtattacccttctgataatctgttatatgtccgttatcaagcttaaaactccagtcatcagtctccaacgaataagagccaaggatattgctgcagtactgatactttgtgataatagccggattagatatatacaggtccgcttcacataaatagcactggtcaatatgttctaatgctgccattgctgatgatatattattggttttatcatatatatcgttatcaataagattgataaatggatacttctccagaatctcatcaaatttttctttcttataaccccttacaagagttatatccttaattcctacagaaacaagtgcatcaagtaatgtatctataattcttactccattaacagcaaccattggctttggtctgtctaatgtaacaggaaccattcttgaaccaaatcctgctgccataataaccgctctctttacccggtaaggctcaagtgcctccagacctctttcagtaatctccatctgatcttcacatcttttaataagagcttcattttctaactcatccagagctttagatatagctgttcctgaaatctttaatgtatctgaaagagttctcatcggatactctttcttaccattcttttcaatatatgtaagtacttcaaactgataacgattcatatttcctccttacagcaccattggaattatatagattccaagtgcaatgcatgtaacaataattgtgcataccttccatatggtgtactgtctgtccatcttaaccttagtctgctcatccggctcttctataacgccaatctcttcctcaattgttggcataacacattcttttctgtgagaatatgcaaaatagaatattacacataatactgttatgattcctgatgtaataagtgctgccttatccgcaaatattaacatgaagcaatacacaacaattgtaaatatacatccaacaactccaagaggagccttataaggtctcttcatatcaggatacttcttcttaagccccatatatgaaagacagcctatcatataacatatagcaagtgatataagcgatactgatgctatgtaattaattgaacctgttgcaataagtataaaattgataacaccaaccacaataacagcaacatatggtgtcttgaacttcggatgaatctttccaaggaattttggtaatgcgccatcttctgccattgtataaatgtatcttgcaggtgcagcaattcccggattaatagtagataaatctccaccaaatgcaataccaatacataaaagtataataggaaatccaacaagtccgactgccttaagtccttctgcatatggagcatctgccgctgcaagaattccataaaactccttaggtacaagacctacaagaaaccactggaataatgcgttaagtgcaaataccataaataccgaaatctttaatgctcttggaagtgtatactgtggatacttagtctcagctcccatagatacacatgtctcaaatcctgtatagcaccaccatacaagaccaaatatatacatcatctcattaaatggaggcaatgagttcattgctattccaccaaaatattcaacatgaaccttaggtatcatataaaggaaccagcacactgaacagccccagaagaaaaacataaatgctgtctgtgccttacctgactgctcaatacctctgaaattaagaataaggaaaactgcaacaaggataatagctataattcttgaatcaagcttaacgatgcttattccaagctgttccataagaatcttaaaataattggcaaatgcaagcgtctcacctgcaccaatagctacaacagatactatataatgccatcctgccatattagcccatactctgttaagtcctctcttggcataattatatgttccacccgcacaaggaagtgctgcagacatctctccatatataagacatggccatatagatataagaagtgcaacaaatgtaaaccctattatccatgagcctacacttcctatctgtgctgaaccacaggtaaaaagtcctacacctacaacggttccaattgtcatactaattgattctttaagccctaaagcacgaaccagctgattattttcattcataaatatcccctctcacagtttattcgttcggtcatatttttgtccatctgcgtgaacagaatggattatagcagataataaactaaattaccagtataaaagtaagcagctataaaccttccatggctatagctgctgctgcatcattaattattaatattcttcatctgctgctcatctttaattacagatatctgtggatttacagcgtccccttctattctgaacaccgaataatctctgtttttaagatattcatctgccgggtacataccttttgacacatcccatggtgctacatgatatcttgactgagaaacaccagccatatcaaaaagcgtatttccataattactcttctgtccaagtgctgcctcgccataagtagcatacagattcttaaatgttacagaatctgaattaacctgcattacatcattatgagtatcagccattttcacaaatacagcagggcgttcatacaatccatatccgccgtgatcggctgtaattataaccgtgctgttatcatacacacctttatccttcatctgctgcatatatccattaatatatctgaacacaccctgtatctgcttatcaagagaagtctctgtttcccccacatctacacactgttcattcatctcataaggtgcatgtgcccctaccatatgatacagtgtaaatgttttatttccagcatcaactgttataccgccattattcttaaaatcagcatacaactgtgaatcatccagttcatattgaataatattgttattctctggagcctgacatgctgcaaaatcatcaccataaaaccagaaatactgttttataatctgtggaaatgcataaaatgccgacattttatatatattcttaaagaattgaactttgtctgatattctgtatttctgtccacctgcagtattggctactgcctcctgattaactccattaagatactcacttgaagtatacaacttaacatcatatccgttatctgacatatcctgaataagagtaccttcttcatatgctttctttctgtaatcagccagagaatgtgttgtatcatactgataacctgtaagcataagtggaactcctagagctgttggtgcacctccgcctatcatattatcaaaataagtaaaatcttttaattcttcacagtatctgtcgataacataattctgtgcgtcctcattatccagtgtatccacaatgaataccactacattgccctgcgaagataacgcaaactcatcattcttagtaactacatatgaataatcaacacttctttttgaagatacaataagaaccacaagtgtcacaacctgtatgcttgaaagaaacaggctgccccactttattatatttgtcattatatctttcttaaagcatacaataactggcggaacaacaataagtactatccatacaactgtacttataatcccattaaccttaaactggctccactgaatctgccttccattaaggactccgaaatcagggttaaggaaatttccctgcacataagcagcaagtgcaccgccaaatatgaccgctgcgtatatgttacatatcttctttggcacaatcagacctatcagtataacaactgctgccgtaattaacgacgctgccataagaagcggtataagtgccgcgaatcccactgcaaattgatcaatattgccaagaaataaagatgatggcataaatatacagaatgttacaataagaaatatcaattgaggataaatcgttattaatttatcttttatcttcttcatagtaatctccctattagttagctgctgctttcaatgaattaagctgatatattctccatccgaattcatcatataatattgaataattgtaatatttctcaaggaccttatcaaaatcatcattataagttcttgatgcaatatatttaacaccaatcttctcggcatctttatagttcagattcaactgtaaaagatcctgctgaacaagttcctcattagtatcctcttctgtaagtgtaagtaacatatgtgcaaatctgttataacagtattcattctctttctgtggatcaagaatattccataaatcccagttaggaacattattacatgtattaattgtcggagcaccacaggcagcaagatacattgattctacccatgaatcaagcattacccatttaccatctttatcttcacttgtaatctcgcatactttcttggcaagtggtttagaatatatagcgtctgttcctacattaactgtaagtgaccatattcctgataagaacacaatacccgcaagcgataacagtgccatattcttaagcctgtcatgctcttttacacagaatacaacaatagttattactgtaaacacaattgccagcgctattattgcatactgtaacattccaccagactcagttatatcatatacagttcttgcttctttccagctgtaataacagcttataagcattggaaccacaacaataacaggattgactttatatctgttttccctgcatacatatatacatcttataagtaatataacctgtaaaagtcctaacaggtctgctgctctttcttccggtacataactgaataatgtgagcctggcaacaatcaatgggaagccaactgtacaatatattgtatatacacatgacaatccaagcatgatatcaagaagaatatccttacccttctgcttaataatgcagtacactgccattaccattggcaatgggaacaatgttaccatcattgagaactcactattattaagagttgccttgaatggatagaatattgtagcaacatattcaaacatcttatataaagaatatccaccagttgaaactcttgaacccggatagattgtattcattatctctgttacatatgtgcttctgtccttgaggtacacaataacaattgatgccataaacaacattgatgctgcgaatacaagccattccttaagcttgattttcttgaaattatcccatgaacttacaaccatccatactacaattccaaaataaacatatcctgaaggtacctggaacgccggatataatattgttatatattctgctccaagtatggcaatacacggactgagtaccatcttctgccacgtcttctctgcatttataaagtaatatatacatacaagcgctgtaagaccacacgacagatactcaacattcatccaccacatctcatatccggagaaggctaccataacgcctccggttactgccagtactttattctttcctgctataatgtaaaagaactgtattgacataacaataagtaatataaatgggaaacaccattctaccgacatacctatgctgtctccaaaaaggtaatagccccatgtttgcggtttagccagtgctgaatatgacttatacaatccagtctgtgctatattttctgtctgcttccccataattatataattatatttaccataatcagtatacttggctgtaagatatcttggtgttgaaacagcccactcatcacttcttatagaatgtgtctctccataaacaggcgttacaaactcacttccctgtccaggctgtacataattatcaaacattcctatagatgaaaaattcactctcataataacaagaatcagaaatattccgacagcaatatagaatcttttatcaaatatgaattcacacattttctttggtccgacaataattaatccgcatacaagcataagaatcagcgtcataaataccattcttactgcaaacacaccataattatcagtatggtggtaattccttaaaactgcataacaaagtacaccattctgtttctctccgttaatgctgtactgcactgatgtatctgttatattctgattatctgtccacaatgtaaacttctttccattcgctgatgtatctgtcgatactttaagtgtataagttttttcacctgatataacattttcctcagcaaaattagagaactggttatcattgatattgactccgctcaccttctggtggaatacaacttcacctgttgtcttatctacaagttctacagttatcttagagaaattccttatggcattagtgctgaaataaagcgctattccattgaattccccatcaatatatatatcctgggttatctccattcctttctctaaaccggcagtctcctgtcttgctgcaaatcctgaatcatacatatctgccactttatcattagtaacattatatatgtgtactcctcttaatacgaacaatactgccacaacaacaagaagcaatatcttaatgtattttgatttattcttcatgtgttttaatctcctaacaattttaatcgttttattatatcacgcaattataaatacatacaagtcctttaccttgtcttaacttttcaattcatgtataattcagtaaatacatatattaatggaggattgtcttgaatttcaatactaagaattataattacaattttattagatttattgcagctttaatggttattatatcccactcatttgcattatcactcggtgcttcatcacagcattatatagatagccatcaccttaatcttattaatatcaacacatggggattccttgctgttgcagttttcttctttggttcaggtttctatattgcgaaatcatgtgagcgcaatgaaagctttctggttttcttattaaagagactgtttaaactgcttccgatgcttatacttgttgtacttatatctatattcattataggacctgtattcacaacactgcctcttaaagattatttttccaatatacttacatggaaatatcttttgaacggaatactgattttacagcataacctgcctggtgtatttaccaataacgtatatatgcctactgtgaatggcgctttatggacacttcctgttgaattcttatgttatctgttctgctacattttttataaaatctttaagaacaaagataatattgtaaaccgtataatgcttgttttatcagttattgttatattaggtgctttcctgttacagagccacatatcatctctttatgatgctttatgtccggctatttcattctggcttggtatccagtactggattaacagagaacaccttcttaatattaagaaacctcaggttttattcatagcttcgattattttatttgttcttgtatttccggttaagagtctttctgcacttgccgtatggatatgtgttccttactttatgttctatgtaatgttcatcagtaagcatcagcatttccaaaaagcggaaatattaggtgactgttcttactgcatgtacctcataggattccctatacaacagagtattgtatatgtgatgggaggcggtccaatcaatccatttatcaacattattattgcgataattatagatatagcaattgcccttcccatgcatatctttatagaacgcagagtcgagaaattaactaaaaaaacattaaaaaagaagtaagaaaaatggttcagacatcaatcaatgtctgaaccatttttcttattattataataactattcaaagcaatctcctgtgccatctttctgactctttctgaatttcttgaaagtgacattgtaagtgagaatataacaagtataataaagacaaaccctaaaaagaacaacatattaatctcattatatattcccagtgccttagatataacattaagaagattaggtattaacgtaattataaatatcccaagctccagaaaaagccatgaaagtgcatattttaattccagtttgttcttcttgataagacctaatatctttaacagtcctaatataagaacaacaattataacgcatttaattcttatactcatctatgcttatctcctctgaaattctcaaacaatattgccagtgtaaccttaaccatataatatactgatttcttaagtgttattgatgagcttccgccctgtctttctctcatgacaactggaatctcagccaccttgaaacctttctttaatattgccacaactgtttccggctctggataatccttaggatacttcttggcaaactgtactattgtacgtcttcctataagtcttaatcctgatgtagggtctgttatcttctgacctgtacataactttatcaagccagtgaaatagttaattccaattcgtcttgccttagatgactggaatccctgtttttctatgaatcttgaacctataaccatatcaaggtcattcttttcaagataatcagccatctctccaaggaatttcgcatcatgctgtccatcaccatctacctgtacagcaatatcatatccatatctttctgcatacagatatcctgtctgaacagctccgcctattcccagattaactggcagattaacaatattaaatccattatcttcacatatctgtcgtgtattatcagttgagcagtcgttgataactacataatcaaatgatggtgcattctctataatatctctgactgtcttctctatactttcgctctcgttatatgctggaattattataagttttttcatattttctccataattgtccatgctttaaatatcaatatctttcagctcctcatcaaatggtccgaactccagaacctcaggtacatgattctttctgctctctactggtggcatcttcatataatcgccaaacattctcttaagaaatacatcattattcttagggactttaaccattatatcttcaaatggcttttcaaccaatgggaacaggtcatctaactttatagcctgctttaaaggatccatctcaccaaagaaacatgcaacccatcttgtcttctcattgttatacttaagtgcgctcttcatataacgtctgttgatgaattttcttgagaaatgtgtccatgtaagtaatctgttcattactatacacattgcacttacaacttttctcttccatccatgcatgaaaagcacaggtttcttgaattctcttaatattcttaacttgctccagaagaatactgataatctctgtcttcttctcttcttggcatcatcaggaacattatcataaggataaagcgcaatatcaattcccataggaaccttagcatccttgaatacatatggtatattcttagttccaattcttgctatctctgcattatagaaaggaaatgtttcctgtgaatctatatcaagtactacatacttatctgtgtatttctctctatatatcttcagaaccttctcataatcatctctgagcattccgatatctatatcatcatcccatggaataaatcctttatgtctctcaactccgattgcacatcctgcaaacaggaaatatgaaagtccgttctcatcacatattttaataaaatctttaaacacctctaattctgcaagctgtaactttctcagaacctttggatcatactgttcattctggctcattgtctttttctatcctttctaatctggtataagatatatcccatcaataatacgcctaataacacaacaagtatcagatagccgagtgcagctccgttaagaccaagtctgcctgtaatcggatccataataatcagcgcaactccgcatacaataagatacagaatagtcatgtatttctgcttacgcattatggcaagtacataatagaatattatattgaccgcattaacgcctccacataacagaagcagaagcagtgtcatcttgtaatccttaagattaacaccataaagccatgacagaaccggtattcccagtatatatgccccgacctcacatataagtgtaaatcctgctattatagcaaacatcctgaatattatgtgccagaaattcttatacttcttctcataataattaacagccattgatgtctgcatcggcttaaatattataccactaaacagattaattaccatattaggcatgaataccgccgtataatacagctgtgctgcatcacctaacattctgtcaacagataatttcgatgaattgataatatagttacttaaaaatgtgcttatagcaagaggcagacacactttaaaaagtacgaaaactcttctgtaatccctgacaatacatatcttaaccctgcctgctgcaacagatgcatcaagacacagaattataagcaatgcaactacattcatacatatcagagagaatatcagatttcttgttacaattactgttacaacaagaaccagtatactgaagaatatcctgtaaaactctgatttaccggacatatctattctttcctctttctggaattcaccttcaaatgtatcagctaccgaatcaagtatcttatagatacatacaagcaatataacagtaactttctccggactgtagccgttaaatacaacgtatactatgcttgccagaaatgttataagacacatcataagtcttaaagtgaaataatatccaaaaggatactcattcttaacatcagtaacctgatatgttcttatttcgaaataggctattgtaacaagccactgtgcaattgaaagaccaatcgagaacattcccgctttagcctcacctaagaaacggcttataacaattgtcataacaagcgtggcaagtgcgaaacatgctgttcccattgtaaaccagatatatttgtacttatcttctggtgtcttatccacacccattattcttgaaataatattcatatatacctcttagtctttaaattccaatttatatgggtaatgattctttctcttttcaactggaggaagctgcatataatctccatacatatttcttaacttctcatcttcgttggctggaagaggcatcttaatatcttcaaaatcatacatctgtaatggatatatctcatcctttaacattatatgataatatggatctgtatcaaataagaatgccattctcttagtatccacatcattatatcttgatgcaatctttaagcatttgccagcaatccagttatgtgaaattctgaacacaacaagtccggcatgaataattgctgttgcaatatgtgttatcttagccttaactcccttataaggaagtaccgggaacgcaacatgtctgagaataagaagcttgctccagaaccaggcagctttagcctgctttttaagttcttcctcatcatctgatatattatcaagcggatacacatcaaggaatattccaagatcacatttgatattcttaagaggttcctctataaatgttgttcctttcatcataattcttgttgtcatcaatggataattcttcattgtttcaacattggcaattgaatacttatcgctgtactctcttttaataacttcaatcatcttgtcgaaatcttttctaggaagcattacatcaatatcatcatcccatggaatgaatcccttatgtcttattgccccgattcctgatccggcatcaccaaaccatgtaagattattctcgtcacacactttgatgaaatctctaagaatttccatctctgtctgctgtacctttttaagggttgcctcatcgtattctttcatcgttaactcctatccctgcttcatattattagattcttcactcttgctgtatgccttagtaagcattttagcaatacatttgggccagaacttctgatacataatgtaatcttcttcagatctcttattatcattaagaatcttagttgtctctgagtcctcatgtattctgtgatatgtgagtatcttattacagaatataaagtctcccttaagctttgataatctctcccatgcttcccagtcttcatcagctctgaatccattaaggaatacctgcttcataagattaggtctgtaatatgttgctgatggacaacatattggtgagccaagcgataacactcttcttcttataaatctgcttccccacattgcctttggacgcattatgaaaagcattattctttttactttaagaatcttattggttgttacaatctcgccatttcttatctctgcataatcggtaaagaaaagcagcggctttttagctttagctgtatacgctaacagattctctacatattcaggcgcatatttatcatcctgatgagctatagtgacataatctgtctgtactttagaataagcaaaattccaatcctgtgtaattccgctttctccctcattgacatacacctttaaattatattttgctgctatgtcgtcaatatacttattaggtgtagatgtagcaataaatatctctgactttacagtctgttccataagtgatgtaatacactcttcgagatatggactctccttataagcgcatatcgcaaatgtatgattagtattgacatgttcctttgtcattatagttcctccaaacgccttgttttaagcatatgtatcttcatactatcttctacagatactcattctttccttcttcacgaagctttgcaagtacctgcttgatttcgcctgcattctctttagttgtaataagagttgcatctttagtatcaacaactacgatatctcttaaaccaactgtggcaataagtttttcgccaccttctattacacagcccctagtattaactgcaactacattgccgttaattacattgctgttatcatcattcttcttgattcttcctactgcaagccatgaacctacatcatcccaaccgaagttgcctggaagtgtgtaaatagaatctgccttctccataataccgtagtcaactgactgtgactcaagattagggaattctgcctcaagcactgcattttcatctgctgttccaactgctgccttaatctttaataaaccttcatatgtatccggcatgaacttcttaaagcagtctaatattgtagataccttccatacgaacattccactgttccacagatatgttccgtcagcaaggtatgatttagctgtctcaaggtctggcttctcaacgaacttttcaactgaataagcattattcttcttgtcatcctgattatacttaatataaccatagcctgtctctggataattcggagtaatacctaccgttacaaggttagccccctcttctgcaatctgaacagcttctttaaatgtatctgcaaacacttcattattcttaataaggtggtctgatggaagtacaatcataactgcatcatcatatttgcttgcaacatgaactgctccaagacctacacatggtgctgtatttcttccaacaggctcacataagatattctcctctggaatacctggaagctgctgctttacaagttctctgtagttcttgttagtagcaatataaacatccttaatatcaaccaatgggctgattcgctctaccgtgagctgtatcatagtctttccgtcatctgtaagagaaaggaactgttttggcatattaacacggctctttggccagaatcgctctcccttaccacctgccataataagtgctgtagtcttcataaattcctccttgttttgcgaagcaaaatcctaacccctctggtgaggagaggaatttgcatccttgttctgccatattgttttaaccatcaattacgacatctgtctgtgcatcataatatttaccatcagctctgatagcacatctatatgtgccgctttccatatctgttgtatctattccacaaaaaaacggtgcatagttaatgttcttatccacaccttttcttaaatgaaatactctgtcacatactgactgtgccttaatcctataacaattctgttcattccacagaaaaattacgggattataatacactttatttccgttatatgcaaatcccctaagctgcatatcatcatgataccctgtttctgtcaccttaactgtaggtgatacttccatatatcctgcagccggccttaatctgtcagctttctgaggttttctgtatattacagaatatatctcatctccgaatctgtagttattctccgtctgcgtaagaagcggactatagaaagggtcatatttctcaagctttggatgtttttcatatgtcatatcccttgcatgcatattacgtctgttcttttcttcatcaacctcatcatcacctcttgagaatgattcatggtgaaaaaggaccacgtcatttcttaagacattgtaatatccctgttcatagagagtcaggcatatatcaacatcattatgtgttacttcaaatgcttcatcaaatccaccagctttatcgaatttagccttctcaatcataaagcatgctcctgtaacacacaggcagtcataatcagcgtaattcctgtgagccttgatattctcatcatcaactgcctttgcatacagatgtgcaaaacagcttgattcataattaattacacccacatgctggatatatgatgagtccggatacagaagctttgcaccaaccgcgccggtactttcctgctttgcctgtccgacaagtactgaaagccagtctgtatcttcataatcctgtccgattatttcaatatcatcattaaggaacagcaacagattaccttttgctttagctgctccaatattacacatatgtgagaaattaaaatctgccttttcatacacatatgatgcctgtccttcaaatgtatctacaagcttctcatactcttttctgttgctgtcattacttccgttatcaacaacaacaatttcgtaattaatatatttcgtgaacttgcggatactctgtaaacagcattttaatatgtctggattatcctttgatggaataattatactcaccagatcatattcattcgtaatgtaatgcacatgctcaactgctgaatcatgcttatctgctacgatgttcacattaatttctgaactttccagaatcattttcttaaaagctgccattccgtcatcagcagtcctgtatgatttactgtcagttcttatgtccttaacaagcacttgatggatatgcccaacatctgacgtcttacactttgaaagaattattaaagacaattcataataattaatattatcaaccgcgccatgattcttacattcattaatagcatctataagagcattcttctttgcaacaaatgcatcgccaatataattgtaagataacagtgtatcccatgaataatcaggcttgcagtcaggaagtccgcatccagcttcctgattatacttttccgaatcagtatatatatatataagactgcgtcctgcccttttctgaatccttatataatgtgaaacaattgctgtataatctttatcgaattcacagctttcatcacacacggctatatattcagcatccattccagacactgctgccagcatgctttcatagcttccactatgtctgcatattgctgtgcagtcagccttattatcagtaatacgctgtttgggtgcgatttttttctgataaatgccatagactttagcatctgtcatattctgatgcatcttctgttgtaatgcatacccgaatgtcttaaagccttcttttccaataatctgcgctgctctcgttaaaaacatttttacctctgatatttactctgaagccaatacatacgcctctgttgtcattgggaaattcctgttgtaatatggatctccctcatccaattctttctgccatttgctttggaaagtttctatctctcccttgaatcttaactgcttttctggcgtatcttcatatcctcttgacttggattcataatgataccactgtgaaaatgcatcatataccacaaggtatcccttgcttctgactttcatgcacaagtcaacatcattaaatgcaacggcatattcttcacataatccaccaacttcatcaaacactgctttaggcaccataagacacgctgctgtaactgcagtataatcacatgacaaatatgctcttgacatataaccatattctttagcatcgagacctataaacgcatgtcctgcaattccacctaatcccagaataacaccagcatgctgtattgttccatctccatatattaatttagagccaacaattccaacctcaggtctcatacagtatccaagcatatctccaagagaatctttgtccaatatcttagtgtcgttattaaggagcagaatataatcaccttttgcctcttttactccgaaattattaattgcagaataattaaattctctctcccatgtaagaactcttacattatcatattctttctgtattttattataataatcaaatgtttctttttctgtgctgttattctctactataataatttcaaaatttctgtaagtactcttctttaatactgaggtaacacataaatcaagatctttataatgatctttgtttggaataacaattgaaatcattggatttcctggtgttgcatatctgattctgtatcctccaaaaagtttactaagctgaacctgtgcttctattcccatcctgttaagatgatcttcgaccgctcttcttccagcttcatggcaatacttcttgctttctggattagctgctgttgaattactatgcattctccaatgatataatatctttgaaacatgtgctattttatgagctttttccgttgttctaagaataatatcgtaatcctgtgccccgtcatacttatcgctaaaaccaccaacttccttaataagttcagttttaacgcaataaaaatgagtaatgtaattgtatgaacgaagtaagtctatattaaaatcaggcttaaaattaggattaacatttttccagtctggtcctaatattttatcttcatcagtatacacaacatcaacatctttatcctgtaatgccttcaccacttcatataatgcatttggttcaagtgtatcatcatgatctaataatccgactatttcaccttcagccatatcaagtgcagcattagtatttcctgctatacctagatttctatcaagaactttgtaaattatccttgaatctgctttactgtacgcatctaatgttgcctcaagttccttatttccctgacttccatctgcgatacataactgccattttccataactctgcgctataacagaatcaatcatttcctttaagaatataatcggtgtattataagttggaactataatgctaataagtggctggtattcaaagttttcattcttctctctttccagctcttcctgagttaccttatgatctgtaaaccatctcttatatataagctcctgattattgcctccatataatccactatatacatattcccttaaatcagaaaatccatatttgccaatatatttacagagacttgctacattatgaggtgttattgctcttatgagtctctttgtcttatctatgttatgaactcttctttgccatttaagttctttgtctatatcgatatccttctgagcagaatctgacatgaattttaatatataaccatctttttcttctacagatattgtaaatccatatgctttttctttatcttctgtatatccgttatcaataagatcatgtctgtcacatttgacataggtataatcaacttttttattatcgcgatttacaacctctatgcttatatctccttttgacaatacccaaccagttattctatacacagtatctccatctggcgtattctcagcccatatgcaatctatattgtactgtaaaagctgatcttcaatagtatatcctatatctttattgtcaagtgatgcaagttcttttgtttctcccgaatcaacaacaacaaattttatttcattaatatcagttttatctgtatcagccttaactataaatcctatttcacaatctctgttaagacctctctctagcaattcatccagcttgtcttctcttgttatatgctcgatactacactctgtcttcttgccattaataagtaattcaaatgaataatcattaaaatccttaggaatataccagcctgcaattctgatatgaagttttccctgattatctgaaagctgtacattaattacattattactctttttcatagccactacctttcaattaacagttcttccatgtatgttcaattcttgcaacacccatatcttcaattcctgatacaacattaaatcttactgcttctttatagtaatcaattggtgttccatctgctttttcaagcacaatatctacccagtactggcttcttgtaagtgtcatactgtcaaactcaataacaatctttccatctttgtcaaggtcaaatgcatcaagtctgtctatcttagtactgcttccgctgcataactgaccatcaattctataaatcatatatcttgcatgaacatcttttaccggagtctcaacagaataatctatctctatcacggcttttcttcctgtttcaagagtttctgtcctcttgccgtcatcacaagacaagataacgtcattaattcttgcctcgaaacttccgtaacgtttatcgttaccaccttctttattctcttcctcagccttcttaagtcttctctgctcggcttcaattcttaagattctggccctttcctgctcatccttgcttaatctttcctgattcatataatcaagataagcaatgtcaacttctcttggatcaccttcctgctcaatctgtccatctttaatccagattgacttgtcacatatctcttcaatctgtccaagggcatgtgatacgataataatagttgttccgttagccttaatctctcttaacttgttgaaacattttgcctgaaaatttgcatcacctacagcaagaatctcatcaataagaaggatatctgcattaacattaattgctactgagaatgcaagtctcatgtacatacctgatgaatatgttcttacaggattatcaataaactgctgtaattctgaaaactcgataatatcctcaagtctttcatctatctctttcttagtaagaccaaatatcgcagcattagtgtatatgttttctcttccactcatgtcagggtggaatcctgctccaagttcaagaagacttgaaactcttccgcacatttcaatagaaccgctgtctggatatataatcttagtcaacagcttaagtgttgtactcttaccacagccgtttcttccaataagacctactgcctcgcccttctttactgtaaagcttatattattaagaacaactctgttttcatatctgtttctcttccagaacagcattttctctttaagttcattacctttatcaaaatacactttaaagcttttggatacattccttacttcgattgaattctcgttgttaagcatacttatctctctttcttaaacattaaaactcttctgcgaatccgcgctgaagtcttctgaatataattgctcccagaataacaaaaacaacgcctgttataatagcaaccaataatgtagacaaatctggaatttccttatagtaaagaatctgtctgtatatattgattattggtgtcattggatttaagttaaatattgtctttaatatctgtggaacattagcattctctaccatatcagcgccatacataactggtgtcatatactgtaatgccataactacaattccaagaatgtactgtaaatctcttaaataaacagtaagtgcagaaactataagtccaattccaagacataatatatattcaacaatcattacaacaggaagatataataatgcaaccagattaattcctcttcctgagataagaagaacgataaacacaacaacaaatgtaagaatcatattaatgaatgcacttgttactgtagatattggaataacctctcttggaaaatatattttcttaaccatgttagattcacgcattatacatgttgagccatcctggacacttgagccgaaaaacatccatggtacaagtgctacaaaaaggaacagataatactgttcataattggctctcataattattgagaaaaccaacgtaaacactaaaagctgtaacaatgggttaataaatgtccacataaatccgagcacagagcccttgtatcttccacgtaaatctttctttaccagagaaaatatcatttctctgtattcatacatttcctttaaatgtttcataaatcctccatttaattatggctgtcagaaattcgcatataagaatccgcttccagcattacttgcatatcccataacaaatattgctaatataatgccgtaatatattagccaccttactactattggctttgctgcaactgcaactctaatctgtacgcctctttctttgaggacgcttattattaatacaacaacacatcctgctaataaaaatatataatccactgatgttaatccaatgttcttaaacattgctgcattaagctggtcaaaccgtaaatctgttatcattcgctttatcattctgattgcagaacccatacctgctgcactgcaatcaaatacccatccgatattgacaagtataaatgttcttaatatctgcacacactgccaccacttcttatgtgggttaatatgacatgcatgtaagcattttttataaagtggctctacaaggttactgaatgctattattacaccattatacataccatacatgatgtaacgccattctgctccgtgccatatacctactataaagaatatcagaagattagaaagacatattgggagagtctttccaagatgatctccaagatgcttcttgccccactttccgaacttgttcatagcctttgataaacagaatggatagaagacataatccttcatccatgtacccaatgtaatatgccaccttctccagaactctccaattgatttactaaaatatggctgtctgaagttctcatccatagttacaccaaaaagctgtgcaacacctattactatatcaataccgcctgagaaatccgcatataactgaattgaatacataagcaccgctattattgccattgcaccaccatattcatcaggcttattaaatattatattaacgaatactccagctctgtctgcaagaaccatcttcttgaacaaaccccagaatattctctgaattccaaactgtacattctgaagattaaatgcacttcctgcaaaaagcgttttctgcagcttatcaaatcttccaattggtccctgcataatctgtgggaaaaatgatacaaaaagacatattctgaaaggattcttttctgctctgtatttcccctgatatatatcaataacataagatattgactgaaatgtaaagaatgataaaccaagtggcattacataattgcttaatgcatacacggttttgtcaatacctatcttattaagaactgctgtgatattgcctgtgataaacccaccatattttaaaactgcaagaactccaaaattaataagcattgctatcacaagaattattctctttttatgcttaacagaattcttaagtttcttcttttgttccctgtcaatctctgctttgtgttccttcagatatacatctgacttatcctgtatgtattccattgctaacgccgcaagatatataacaagcgatgctgcaaccatgaaaagactattcttcacattgaatgaaaaataatacagataacttaacacaagtaaccacatccatcttactttagatggaagtacataatatataactactccgattaatataaaaaaccaaaataacgctgttgtaaatgacattttatttctccactactccatacaattccgcttcagtattgtacatttcctgaaatgaactgtagaaatatctattaatatctttagttccctgtttatgttctttaataactttgccaagaaattctgaatattcttttgcaaattctccattcatatgtccttctttatcaacaaagtccgaatcctctcttggcaatatgtcctgtctcgccatattgaaatcataatagaacactccattgtcagcaagcagtttgttaattgtatcatggacattctccatatgaagaatacccacactacttggagttattggagatgttaccgcaataagatcaatatcattatctctgcaatactttattattttcttaatatacttcaaaggataacctgttatttgctctttacttcttacactccagctttttaaaagttcttcaccagcgagttctccattaacaggactaatgtagaaatatcctcttccggcatatgttccaccatctacatcaagtgaataaatatccgcttctttgtaaccttttgacaatttctgttcaatattatctttcatattagacggagtaaacgtacatgcctgtcttcttgtgaaaacattccttatctccatacgttccatgttatcgtatatatattgccactttacatatgaacgccaatccatctgacattgaataaactgttcagtataaaacccttctttaggcggattgaaataatactgataatcaatatctagaattactgtcttaatatcattagttctgcacgtatcttcaagcacataatatgaatcttttaccgtttctcctggaatcgccatatttattgaatatgttccggaatatttatcaataatatccggatctgatgatgcccttgcatgtgaagctccaattatgacagtatcataatcagttttattatttttcacacatacatttcttaaaatataattaacataacctgtctgtacacaggcaaaatcaatgactcccattatagcaataagtcctgccaggaatatcacacatcttaatattggtttaaactttttcataactaccttctatattgtttcttataaagaatatcaactgatgataatattactaattaatcaccttgtcaatcaactttttccatgtatctttcttaacctctcactgacaatatccgcagaacgcttatacgccagatgttcccttgcatatttctgaccattcccagcaattctttcgtagaaatccttatcctcataaagccttctcatatagtatgctgcctcatcaacatgtgcatcagcccatacatttcccttcttgaacggctcatagtccttatcaagctctatcatgtcgtatccgaccatgcatgctgtatcactgttcataaactctgtattgcctgaccagtcagttgcaataacaggtgtaccaacatacattgactcagccataacaagtccgaagccttctgaacggtggagcgaaacatacacatcaacatcagcaagaagtgtattaacctcacatcttcccatatgaccgcacatataataaatgttattgcagtcctctattacagaaccaataatcttttcatcttctgcagataattctgcctcacttatcttaataacaagtccgacatccttgtatttttctttcatctgttcatctttgcagaatgcttctttaaatgctttaatagcggcaagcggattctttctttccataacgcttccactgttatacattacaaggaataagaacttatcttccggcagattaaaatgctttctatcaaacttcacagtatccgtatcaggtgcaacacagtgtgggactgttatcacaggcttgtctgtatatttcttcaaagtattcgtaacaaaatcagacggtgtccagacttcatcaacaagcttgaatgccggaagccactcttctggaaatgtctccagctcccatgcccagtatcctatgttatatctgtaatcccatacttcttttccaaggcttaaatatgctaccatgaattcacttgcattaacatgaataatattcacatcaaaaggaagctcctctgtgagtctgtcatcatacgtatcattgcttcttgaacctcctggtggaacaaagaaatcccttataacatgaggttctttattctcatcaagcagcctgcacataattcttgcgctttgtccaagtccattatctcccttaatattacctattatattggcaccacatttgtatcttcctgcctcatatttttcaatagaatcagccgacagcttgtctgtggcattattaattatccctgctttcatcttacttaaaagcttcataggaataatctttgtcagcaccggtctcaatgcttctcccgtattaagaaaaaattttgataaccccatataaacctcaacattctatctgttattcatctggctgttaataaagtctctcaccataccaccaagtctttccggtgtatacttgtccaacgcatgtctgtatgcattctcatcaacaagtccagaattaatcttcttatctatattcttcattccattcacaagacttataaccttatcatcatcatcaccggcaagactgaatctttccacacagtcacctactacctcgtcaaatattttaagattacttgcaagtattggcttattatgcttcattacctctaatataggcattccgaagccttctgccatagaaggaaacacaaagcatgaacaattgttatacaggtcatatcttgtagtgtgtgatacataaccaagataagtaagaccttcaacctctgtaagtgcagtctcaagaagctgctcaatatcatcctcctgcatcttaccggcaagaataagaggtcttgttccgccttcttccctgtatcttctgtacgctttaataaggatatcaacacccttacgcttctccatattacctacatacaagaaataattctcatccttaggcggtacatatcttgtaagcggattagatataatgtaggcattgcagcttggaatcttcttagcctttggaaaatacatctctgtgtcgtccttagtctgctccgaattatacagaatcatatctgtatgtcttaaagtcacaccaagattaaacttaaaataatagctgtatatttttccaaagtatcttacatactgaataggaaacatatcgtgtattgtgataagtgtcttaaagcttccaccgagattaataggaataatcgaattaacctcccagaatatatccggcctcacctgctttaattctttcttaataaatgcaaaatatgcatacacacccgcacttctatatacaggctttccccattcaataaccttgattcctctagcctcaaatctcttaatatattcactctctttaacatctgtaaaaagaatccattcaaattcatcatatgttatgagctgttctaagaagtcattaagatacatgcccacaccgcttggtctgctgcctaaagttcttgcatcaacagcaatctttaatttcttcataactgtattctctgcccccaataaataatcttttattctatcagagtatttccataatatgcatgttcaaactacccctataacaaaacatgctttttttgattttaccatattatagatataattgctatatattattttctacacacaaataccccagcctctttggttattgtcataggtttcacaagctttttctctacatattttttaaaatctgtatacttatccacaaggtactctttctgattgccatgacatgatagtatataatctaccagcggttctgcttcatcaacaacaagcgcatctttataatctcttctttcaacatctgaaaaatgtttctttagaatcttatatccatcatcaagtccgaatttttcaaaaagcttatctgcttcaagtgcaattctcttatcgtatcccgacacaaggcggcttatctcctgcatatgcctgctgccatatgtactgcacacaagcacccctccaggctttaacaccctcacaatttcatcaagtgccttattgacatttttacaataaaacagcacatgattagcaatcaccagatcatacgattcatctttcgcccctgtcttttcgcatgaagccactctgaatctgaatgacacatcaatatctctttccttccagctctctgttgctttttttatatttcttctcgcatcacttatcatgccttctgatatatctgtaagctctatatatatgttttttttcttccctgaaaattcatttctctttcctgtcatggcaagctgacctatattgtcaacccacaatgttccatcaccacacccaatctcaagaattctcatccccttaacaataccacactgctcatatacccaaggaaaccatccctgtttattaactgaaaacctgttatgaagattaattcttgcagatatatttccagcattaatgtactgattcttcatgctgtcttccatattagtaagatggataatctccagcatattactccagtcaactccttttccctctttaatagagtcttctgtttcttcaatagctttacatacaagctgcatctgtgcaatcttgtcctgaatcattcgcttttgaagttcaagtgaattcttaagtacatgataatctgaatcaccaattgtcatatttcttatatcgtccagtgtaaatccaagatatttaagcaataatatctgctgtaaccttgtaaaatctgaatccgtataaaatctcactccctcatcagtaagaagtgaaggctttaatatgttctgctggtcataatatcttatagtccttactgaaacatttgctttcttcgcgaattcccccgaagaataatatccctctttatgcatatattactccttgtaaaaatttttcaaaaaacacttgaaggtgacgctgcgtcaccttttattatatacatgacttaaaaaatgtctacttgaaaattaacataacattttaacaaacaaggaggaacttcaattatgaagggtattattttagctggtggttctggcacacgcctttacccactcacaatggtaactagtaaacagcttcttccaatctatgataagccaatgatttattatccactctcagttcttatgagtgctggtatcagagatattcttatcatctctacaccacaggatactcctagattcaaagagcttttaaaggacggaagccagttcggtgtcaaccttacttatgctgtacagccaagcccggacggacttgcacaggcatttattataggtgaggaattcatcggtgatgacactgttgccatggttcttggtgataatatatttgcaggtcacggtcttaagaaaagacttaaggcagctgttgagaatgctgaatcaggaaagggtgcaacagtatttggctactatgttgatgatcctgaaagatttggtattgttgaatttaataatgaaggaaaggctgtctctatcgaagaaaagccagcgcagcctaagagcaactactgtgtaacaggtctttacttctacgacaacaaggttgttgagtacgctaagaacttaaagccatctgcaagaggtgaacttgagattactgatcttaaccgtatctacttagagaaggggactttaaatgtagagcttctcggtcagggatttacatggcttgatacaggaacacatgaaagtcttgtagaagctactaactttgttaagactgttgagactcatcagcacagaaagattgcatgtcttgaagaaatcgcttacttaaacggctggattaacaaagatgacgtcctcaaggtatatgaagtattaaagaagaaccagtatggtcagtacttaaaggatgtcttagacggcaaatatgtcgacaagcttcatgaataattaagtacatttagttaaaacatttttcatataagaacacattttaaatattaaggagattaattatgacaattattgttaccggtggagccggatttatcggaagtaactttatatttcacatgttaaacaaatacccagactacagaatcatctgtcttgactgcctcacatatgcaggtaatctttcaactcttgagcctgttatgtctaaccctaacttcagattcgttaaggaaagcatcacagaccgcgaagctgtttacaaacttttcgaagaagagcatccagatatggttgtaaacttcgctgctgaatcacacgttgaccgttctatcgagaacccggaagttttccttataactaatattcttggtacacaggttcttatggatgcctgcagaaagtacggtattcagagataccatcaggtatctactgatgaagtatacggcgatcttccacttgacagacctgaccttttcttcacagaagagacaccaatccatacatcaagcccatacagctcatcaaaggctggcgcagacttacttgttcttgcctaccacagaacttatggacttcctgttactatttcaagatgctctaataactatggaccataccacttcccagagaagcttatccctcttatgattgctaatgctcttaacgataagccacttccagtttatggcgaaggtcttaacgttcgtgactggctctatgttgaggatcactgcaaggctatcgaccttatcatccacaagggacgtgttggtgaagtatacaacgttggtggacacaacgagaagagaaatattgatatcgttaagcttatctgcaaggagcttggcaagcccgaatcacttatcgttcatgtaggtgacagaaagggacatgatatgcgttacgctatcgacccaactaagattcacaatgaattaggatggcttccagaaactaagtttgaagatggtatcaagaagacaattcagtggtatcttgataataaggaatggtgggagacaatcatttctggcgaatatcagaactactatgagaaaatgtatagcaaccgctaattaacacatttattctgtaaggagatttgacatgaagatattagttaccggcgttggcggtcagcttggccacgacgttatgaatgaactgataggcagaggtcatacaggcgttggcagcgacatcgcacctgaatattcaggaattgctgatggaagcgctgtcacaacagccgaatatgtacctatggatataactgatgctgcccaggtttctgaagttatcactaaggtttcacctgatgttgtaattcactgcgcagcatggacagccgttgacgctgctgaagatgatgataagaaagccaaggttaaggctatcaatgcagatggtactcagaatattgccaatgtctgcaaacagcttgactgcaagatggtatacatcagtactgattatgtatttgatggtcagggtgaaacaccttgggaaccagactgcaaggactacaagcctcttaatgtatatggagagactaagcttgccggagaacttgctgtttctaacactcttgataaatactttatcgtgcgtattgcatgggtatttggtgttaatggaaagaactttattaagactatgcttaatgtaggaaagactcatgacgaggttcgtgttgtcaacgaccagattggtacaccaacttacacattagatcttgcaagacttcttgttgatatggttgaaactgacaaatacggttattaccatgcaactaatgaaggtggatacatttcatggtatgactttactaaggaaatctatgcacaggcaggtctttctactaaggttacacctgtaactactgctgaatacggcatttctaaagctgcaagaccttttaacagccgtttagataagagcaaacttactgctaacggattcactccgcttccaacatggcaggatgctcttcacagattcttaaaggaaatcggtgagatttaatatttcaaaggagattttatcatgggacagattacaattgaaaagaatgtcgcaggtatcgaaggactttgtgtcatcactcctgctgttcacggcgataaccgtggatattttatggaaacatacagccagcgtgatatggaagaagctggtatcaatattaactttgttcaggacaaccagtctatgagtactaagggtgttcttcgtggtcttcacttccagaagcatttcccacagacaaagcttgtaagagctatcaagggagctgtttttgatgtagctgttgaccttcgtacagactctgaaacttatggaaagtggtacggaatccttctcacagaagagaataagaagcagttccttatccctaaaggatttgcacatggattcctcgttcttactgatacagcagaattctgctacaagtgcgatgacttctatcatcctaacgacgagggtggtctcgcatggaatgacccggcaatcggtattgaatggccagagcttacaggtacttacaacggctcagcttcaggtgaaggctacgctttaagcgatggaacaaagcttaacttaagtgataaggaccagctttgggatacacttgagaacacatttaagtttgactaatttcgagatattatatttctagattttatcttgcttttaatgtatttgtcttactttcaaggtatttatctgattctggatatttttacccggttatgaatacttttatccggttttcaggggagattagccggtttttcgcactactatgccgaaagacctactaatctcctcttttttatttaattagtgcgctttttcatctctttttctgactcttcatatagcattcacctactaatctacatattttttacttttttgtaggtcttttcttctttattttcctgtcctggttaagaatctgctgtcgaaaaacctactgataacacagcttggcataatttcgtaggctttctctcttccaacaactttcttcctgttttatttcacccactattcgtcagactttaccttgtttcgtaggcatcccctatcctagcaaaattttttcttatcatttcaccatttatatatatttttgatattgtgtttatcatagttatattgtatagtattaatataattatataaggaggttgatatatgaaccatatagccaataacagaatattaaatgcaatgcttttatcacctgatttaactatcagtgctgtttccaatcgtcaatccgaacttattttgcttctcaacactatcaattcaagactaagtaatgcccctgacggaacactccgcattgctaagcgtggcaacgcccatcaatattatcacagaacagattctactgacagaacaggaacatacataaaaaagaaatctaatcttaatcttgcgaagagtctggctcagaaggaatatgatctgaaagtcaagcatgaaatccaacatgaacttcatgctattgaaacttttcttaagaactattctcctgaacagattgagcatttatacaattctcttaatgagataagacaggaacttattacaccagtctatacacctgccgaagatacattgaatctctggaataatgttcaatataattctcttgacattcctgatgatactcctgacttctactctgataacggagaacaggtgcgttctaaatccgaattaataattgccaacaaactaaaacagcacaatattccatataagtatgaatatccgcttgtgctttctaccggggtaaccgtccatcctgattttacctgcctcaatattaatacccgtcaggaattcatatgggaacacttcggcattatgggagattctgattatatgaacaaaacattaaagaagattaacgattacgctaaatccggttatgtattaggcaggaactttattgccaccttcgaatcttcttctattcctctcaattccaataccgttgatattaatattaatgaatatcttttatagtcaatgaagctttaatggtgcaattctttcacacaacacctactcaattaaccaaagttgttaattgagtagatgtttttcgctcccccaaaaatcaactagcaacttgaaaagcacactaatcttagtaatatatgctatatagtaggtctttttcccaccatctcatctcccagctaataaattccaacgattttctataaaaaagacctaccaacatccttataaaaagcatgttagtaggtcttctccaatatctaattcaaatctcaccagaaatatgcctactcaactcttgaaaacaacataattagtaggtcttctccattaatgttcattcggatgataagtatcaaccaccttcttcagtgattctcttatattaccagtttctgaataagcttcttccttaagcttctcaaggttatcaaagaaattctctttatcaaactcaattggttttccaatgtggataagcttgttatctgtctcctgaagaccttcttctttcataagaagctcttcgtagagcttttcgccaggacggagtcctgtgtatttaatttccatgttgacgccaagtgtataacctgacagtctgataaggttctttgcgagatcatcaatcttaacaggctcacccatatcaagaatgaatatctctccacctttggcatatgcacctgcctgaagaacaagtgaaaccgcctctggtatagtcatgaaatatcttataatattaggatctgtaaccgtaaccggtccaccagcctcaatctgtctcttaaaaagaggaatgactgagccgttacttccaagtacattaccgaatcttacagcaacgaaatctgtcttggatatctcgttatacgtctgaacaatcatctcacagatacgctttgttgctcccattacattagttggattaacagccttatctgtacttatcataacaaacttcttaaccccatacttatcagccatccttgcaacattccatgtaccgacaacattattcttaacagcctcatcaggactgacttccataagcggtacatgcttatgtgctgctgcatgatatacaatatctggcttatactgtgcaaatacgctttcaagtcttgaaacatttcttatcgaaccaataagagtaacaacattggcatcaggataattaatctttaattcctgctgaatatcataggcattattctcatatatatcaaatataatgagctgcttaggcttgtgacttacaagctggcggcaaagctctgaaccaatagaaccgccaccacctgttaccataatgaccttatccttaacataacccatgatagattcaatatctacttcaatcgggtctcttccaagaaggtcaagcacatcaacattacggatagagttaacattaatctctccatctaccatctgatatacacctggcagaatcttaagagtacaatcagtctctttacaaatgtttaatatatcccttttaacttcattagatgctgatggaattgcaaatataatctcatcaatatcataaagctttgctgcttccttaatcttgtcccttgttcctataaccttgacgcctcgtatgtatttaccaaccttgcggcggtcatcatcaataatacatgcaatattagagttggcaagatagctcgaattctgtatttctctcataatgacattagttgcctctccggcaccaataatcattacattgttggaagtcttaatatttctgtatttgttaagaacagttcttatcattctgtacataaaacgacttgcacatattgcaataataaggtatattgccgcattaaaataacagcttctaggaagcatattacccgcaatcttattacttaagaaatgcactacttctacaataatacacgcttcagcaattctgtacacctcagctatactcgcatactgccacagactgtgataaagtctgaacagccagaatataagcagagacattatcgtgtacggaagcatgttctctacataattactaatatactgaggttctatagatacaatacctacatcaaatctcataataagcgacagatatacgcatgcattcagtaaaaatgtatctgttaaaaacaagaaaaatcttcttaccagaagctgtattctatcctttttagtctcacccatcatctgttcctcgtttctttagcaggctttttagcagctaacccacatactgtaccaattccataagaaatatgcaacaggaaaaataaaaatggcagtgcaaaacatgttttattgcgttccttcttagctcctattactgcaactaccgacataaccaccgccaacagccagtatgctccccacataagtcctgtaagtccgtatacaatacgagaaaaaaacgacttcacagcaagtagcttacatgacacacttgcaactgttgtaacaataatagccatgacaaaagcccacggaacaaaatgatatacagaaaggcatcctggacataccttgcttgtctttccaatccagtatccattgccatatttctgcttaagcatcttaggaagtgaacttcttgtatgctggtatgatattatatccggacagaatcttaatttaaaccctgcttttctcatacggtaatgaatttcattatcctcagttcttgcaagagactcattataatgtccgattttttcaaaaacttcccttctatatgcagcatggaacagcgatttcatatatatcttttcttccgttccattcccgccattacggtaaggtgctatgcttgaaccaaacatagaactctcggcaagaagaagtgtatccttccatggtgtctcttcatcaactatattaggtcggacaccaccaacaaccatctcgccttcttctaaaactttaacattcttgctgacaaaatccaccgggatatgtgcatgcgcatcaactcttataacagcctcccctgtataattatcgagcagcacgttccatccacacggaagcgtcttcttaggattatcaagcacaactatctgtcttgctcccatcttattctcatcagcaaacttctgcataaccgccttcgttccatcagttgatgcagaatcaacaagcacaacttccataagattatgatcataatcctgcctgcttatgtcatcaagaatattctttatcgtattctcctcattatatgcaataacggcaattgtaataaacatactctacctacttcttaacagtcattctttcacttccaactactgatgtaaatgtatcccacaatacagccgcatcagctttcacgccaaaatgtttcatactttcaaggttataacgcatttttgccggtaatacttcattcagatatatattatctgtacttttttcatcaacagcctcaccaagaagcttgtcctcatccttataagcaatacttgtccttgatgtaagtccggcaggaagaagaagtgtcgcatacatctccttagtgtacttcttaacatacttaggaacttccggtcttgttccgacaagagtcatatcccctgcaagtatattaaaaagctgaggaaactcgtccattctgtactttcgtaaaaatgcaccaaccttagtaattcttgaatcattatctacagtcactgctgcccctagcttacttgcattgtcaaccatagtcctgaacttgtatatacgaaaaattcttccatactgtgttactctcgcctgcctgaaaaaaacaggtcccggtgaatcaagtctgattgcaagtgcaattattcccattggaataattaaaactgccagcataataccagcaacaataacatcaagcactcttttcatctctaaccacattctgtgtttcataagtatattatagtattttcttacttccttagttctcatttcatcaggaagaagctgccatggtcttaactccatcgtaatcaatcccctttttgttgttgtataactaatgtccgattatttcattctgttaaactgctctattacatattctacctgttcatcagtaagacatgtatgaagcggcagtgtaatctcattacgatacatattatatgaatgtggaaaatccttaatatcaaatcccatgttcttatatgccgtatgcattggaagcggcttaaaatgtacattagttgcaacacctgcctcagcaagtcttgtaatcagttcattacgctccttaacatcctttccaagaagccttacaagatacagatgaccacttgaagtatattcatctgtaaaatgcttcataatatccacatcatcggctgcaatcccttgtgtatatctctcaattatatctcttcttctcttaagaagtcccggatatctcttaagctgtacaagcccaatagaagccataatatcagtcatattgcatttgtaataagttcccttgatatcatattcccatgcgccaagcttagtctttgcaagtgcatccttagactgtccgtgaagtgagtaaagcattatctgcttatagatatcctcatcatcaactcccggaatacttctccatgtaagagctccgccttcagctgttgtaaggttcttgactgcatgaaatgaaaagcttgtaaagtcagccttcattccactcataacaccaccctcacttgctccgaaagcatgtgcagaatcagcaacaattgcgactctgccaagtgcctcctgaagcggtgttgaagccttaaatatattctttttactatcgacaatctttcttatcctgtcatagtcaaccataacaccacctatatctacaggtattacagccttggtactctcattaattgcagcttctagcgcatcataatcaaggtgatatgtgtccttttcaacatcaataagaacaagctttgcattaacatgcgcaacgacacttgcagatgctgtataagtgtatgcaggaacaataacctcatcaccctcaccgattcctaacagacgcagtgctgtctctaaacatgctgtagctgaattaagacatgccgccctgttacagcctacaaactgagcaatatttctttcaaactctttagttcttggacctgttgtaatccatcctgaccttagagcctcagaaactgcctgaatctcttcctcggttatatctggtggtgaaaatgcaatattcataactcttatctccctttcgtactctactttgtagatgactttgttgttgcaggagtgactgttggaacatgtacctgtgttgtagtctcctgggtacctccacttatcatttctggaaatgcatatgtcagatctcctgctgtattagcaattgatattgtataactaactgtattatatccattctgcgaaagtgtaatcgtcttctttccagatgatttgttaaatgaacacggaacagttcctatgtattcactattgacataaagaaccgctcccttaggtgctgttactgataccttatatccacttgtattatctgccgctgtacttgttgatgtacctgatgaagtcatgtcgataaccttcgtaacataggctgaattaacatttataatctcagaatattcctgatagtggttggctaccagcttaactctgtgagttccataagaaagtgaaactggggaagaataatcaacctcaacaccatcaatgctcataaccgcacccttcggagtaactgaaaaattaacagcccccatcttaaccggatcactttgtacttcagaaaaatcaactgatgtagtctcatctttagctatagtcactgtcttacttgctgacaggctgccattacgtacattgaccgtatatgttccaacaggtgcagtcaccagcatatcctttgtaatacccagtaattgtttattacctatgcttacataaccaccaacaagtgcatctacgcctgtaagtttaagatatccgtgtcctgcagttacattcaccgaatatactttctctccaacgcccctgataaccagcttatcctggtcaacgagctgtgcaatacttatacgttcttctcctgaaagcacaactgtgtaactttcatatatcatattggaagccccaatgcttaacttccttgaattctcatctacggttattcctgaaacatcatatcttacccaggcatcactgtttccgtgtatcttcaccgccttgcccttcttatccacatatacatcatatattccacccatatccatggtagaagctgcttttatctttccgtaagcatcctgaatatctgtactgcctgtataagggacttcatattctgttcctgtctttatatctacaaaccgcattctgcccgtgtcagcatctctcaatgtaagaactcctgtaagtgtaggattctctccatcacccttaatctcctttgcggcacctggtgcgggggtaatactgcttcctggtatcaccgccctgtcattatttctggaaaatgtgcatgctgtctgacttacaattaacaccataagcatacacactgcaattattcttttcataagcattcctcgcaaatacttttacccttgtatcatcagattttatcacataccacacattttatcaattaattctcttctgcgcatattctgttcaataacaatctttaatttatctatattcttagcaggaacccacgcctttcctgcgttatagtactgatttataatcttccagaatttttctggaaagctcaataatgtcacaagcatgtcaatatcatcatcttcaagcggctttaatctgtcatattcatcaaccagtctgtatgccacattaatattccagtcatgcttttccataacctttcttaaaaactggtaaagatctgcaacctgacagtcattatgacatttttcaaaattagtcactgcattgccgccattaccaacatcaagaaacacattatgataattatagcttccatgcacaagctcattagtctgttccatcctgtcaaagcgctcatcaaaacgttttgaattaatattcctgctcgcttcatccgcttccctgaaaaatgtatcaaccgcaccaagcgcaatctgttcaaattcatttttctttttcttgccacgcatataattagctgcctttttaatttcttttgtatgtctttccatattggtgcgtaaccctgctcccctgtcaaaatgtacagcattatgtacgatgctttcactggcctttaattctgactcgggctgctcatctgcggtctctgcaagtgccatacattcccattgctttgtaatatttgtatttacattattccttaaatatcttacaccattagacgaaacaacatttagacaaatatgaagtcttgccagagtccttaccgcctccatcacgtcatccacagacttgacatcacattccctgcctccaaaccagttcttcattacatatctgtgcccatcatctccaacagtaaaaagctctccatcctgatttctcacatatgtatccacattttcaaagcctgcatcactaactgcctttgtcactgcctcatctctcagataaaacccatcatttcttgaacactcgagaaaaagtctgcatcctctgtctgtaaaaagaattactcctccacgaccttttaccattttattaacctgaatatcataaaatctaatacattccaatgatttatcgttcatataatcccccatttccgcacttaatacagacgccctttgctcatacgcctgcgtctgccttatcttatgacatttatggctgctatattccttggatttaatgatacgacgaattaagaaaatcataatcttgatgaaaatgtaattttttcttataatagatagatgtgagcttttttcacatttataataaatattattatagggggaaatcatgcctgaaaactttcatattgacatgccggaagctgtcaggaacattatacatacaattgaagaacacggcttcaaagcatatgctgttggcggctgtatacgagacagtatccttggacgaaacccagatgactgggatataaccacttctgctgttccatcacagataaaaactttctttaaaagaactgttgatactggaattgcccacggaaccgtcactataatgatagataaaaccggatacgaagttacaacctacagaattgatggcgaatacgaggatggcaggcatccgaagtctgtagaattttcagacaggcttgttgatgacctgtgccgccgtgattttacgataaatgccatggcatacaacgacactgatggatttgttgatgaatttaagggtcttgatgatttggatgcaaaaataatacgctgcgttggtgaaccagaattaagatttacagaggacgctctgcgaatgatgcgtgccataagattttctgcacagcttggctttaccattgatgaagcgacatggaatgcaattaaaaagctttccccttcaatcagcaaaataagtatggagcgtgtgcatgtagagcttggcaaaacgcttatgtctgcacatcccgattatgttgcgcaatattcagaagcaggactttttgccccaatactcccggtaattgacaatgctctaaagagccgctacaagcgcaaaatacttgcaacattacaacacacacctgataatatatacttacgctacgctgcacttttcataacttctacacctgatgaagccgctaagactctccgtgcacttaagctggataacaagacagttgacacagtatcaaagcttgttgaattatcaaagatggatatagaagaaactgaaccggctgttcgtactgcccttaataagtatggcagagatttcctgcctctgtggcatgagcttatgatggctgtaatccaggcatctgaagacatcacaggaataagtaatccggcgaaggtaaagcatcttctcacattaaagcgtcttggaacagatattcttgcacgcggtgactgttttacaataaaagccctcgacatatcaggaaatgaccttattgaatatggccttcagggacacgaaatcggtgaaacactgaaatccctgcttgatatcgttatagagaaccctaagctcaatgataaagctactcttattgcaatgattgaacatatcaaataatataatcataaaataaccctcaccggctgccttctattctggatacatatcaattacatcggctttggtgagggattcttttaattaattgcgagtttatttttaattatatcaatgttgtaatcaggtgcagccgcaatcactacatcatatatcggcttgatatctgccacttcttcctcaagttctgaggctattgtctccagagtttttgatttctttaccttttttataatctgattaatcatcatagattgttcgccctccgcaaatgctttttcagaagcctccttagcagctttctctactatttcctgcgccattccctgtgcaacttcctgcgcatactcctcagccaacactcttctgacttcttcctcatcataatcatatatactcacttcgacgacctcctccctgtgctgttcgaagaaatcgacaagtatatcctcatctatgcattcgttcattgcctctgttactgcaattctgacattgtcaccttcaacacccatcttgaacctcaccttattaacaaatgtcatgtaatcacgcagcgttttgcacttattaaggatatgtacatctttattaatgttgataacacgcaccttaagctccagttccggattgtctgtcggaatctcgtacatatctgacagcctgatttcatcctcatcttcaacccatttttccagaccattgtagaatgtcacaaaatgcggaacaggaatcttaatcatacttctcctgtgaagcatggaattactgaacagctccctgaatacatcagacacatagtgcaaaaatcttaacggcatattaggattcttactcgactgctgctcaaacatatacaggctcatacatagtaaaaatgaagcatcattcttatacttcatatatgaaccgccgtttaatgtagtcacctgcaaatcatccacattcgtgtaagctgaattgttaagtgcattatacagttctaaaagattcttcttatccctgtacagcatacagaatacattgtccttaaatttagatgttacattgtctttcttctctgccatagacatcctccccgtctcttttgcaggcagatatccacgcacatatactaatattgtctatataaatatattagcatctacagatatctaaaacaagcctgcattattcaattatgtgttaatgggttattgctgaatgactatccagctttgataagcaactgcctgattagataaaatcatgtcaattgcgtcagatataagaaacatttcttttaatatattgttatcatattttcaattatatgtcaatatatattttatcaagaatatgtataaatgtaaaatcccctccagattataaaaaagccccctccggcaatactgccgaaagggactccattctcaaaaatcctataaataattatgattaatatgccttaccccagtaaaccatagccttagccggcttaccacagcatacgcacacatcacttaacttctcctgtgcaaatggcatacatcttgatgtacatgtagtatcttccttaatcttgtcctcacaagcctggtctccacaccacatagccttgatgaatccagccttattagctgctgtatccttgaattcatcataattaagagctgtatatgtatgagcttctctgtgagctcttgctctctcaagcatatccttctggatagtatcaagaatttctggaattctgtctgcaagctcatcgatagatacagtaatcttctctcttgtatcacgacgaacaataacagcctgattagcctcgatatctcttggtcccatctcaactcttacagggataccacgcatctcctgctcagagaacttccagccaggattcttatctgaatcatcaaccttaacacgaagccctgctgccttaagagcctgtccaacttcataagccttgtcaagaacgcctgccttcttctgcataataggaataacatcaacctgaacaggtgcaaccttaggtggaagcacaagtcctgaatcatcaccgtgagtcataataacagcaccaataagtcttgttgttgttccccatgaagtctggtgaacatattttaacttattatccttgtctgtgtactggataccaaatgctttggcaaatccatcaccaaagttatggcttgtacctgactggagagccttgccatcatgcataagcgcctcgatagtataagtagcctctgctcctgcaaacttctccttatcagtcttacgtcccttaattacaggaattgcaagaacttcctcacagaagtcagcgtaaaggttaagcatctgctgtgtacgtgcctcagcctcttctgctgtagcatgtgctgtatggccttcctgccataagaactctcttgaacgaaggaatggtcttgtctccttttcccatcttacaactgaacaccactggttatatacctttggtaaatctctgtatgactgtatctcatctttatagaaatcacagaaaagtgtctctgatgtaggtcttacacacattctttcctgaagtggattaagtccgccataagttacccatgcaacttctggtgcaaatccttctacatgatccttctcaacctcaagaaggctctctggaatgaacattggaagataaacattctcaacacctgtttccttgaatcttctgtccatctcattcttaatattctcccagattgcatatccagccggcttaaaaatcatgcatcccttgacgcttgagtaagacataagctctgccttcttacacacatctgtgtaccactgagcgaaatcctctttcatggatgtaatcgcttctactaatttcttatcttctgccataataaacctctttctatgacattacagccccgtttcatacggagcctgatgcgaatgctgcttcgcattgtccgcctgccattgacggcaccactagagtttatcatgttctaaaatgcttttcaagtaaagaacaagtgcttttattatacaatatgatattggtccaagaataaatcctacaaccccatacacaagtatcccgatatatataaccgcaagcattgtaaatggcgcaattcccattctgtcacccatacattttgactccataatctccctcacaaaatatgtgacaatatacaacaccacaagaatcaccgcatttttcacatgtccgaaaagcaggcttcccacagcccacggtatcagtaccgttcccgtaccaaatatcggaagtgcgtcaataataccagtcagcacaccaagaagaatcgcatatggattgcctatcattaaaaatgctgttgaacacaccacaatatttatcgacattataataagctgcaccctgaaatatacatttatcaaattgcgaagccccacatgcaccgccccgacttcgtccttaaatatagtgttctcccgccagcttctgtacttctcaattccagccgccgcatatatcgttccaataaagcacaccacaagtccggcaaccgccataacgcaccatgttataaccggaacagaatgttttctcataattgtaaagaacatctgctgtccgtctccatctataattatccctttacatttttcaaaaaatgcgtaactgcagccttcttttaacttaatccagccatcaatacgacagcatacaagcttaaactgcccatcaaggctgttaatattctcatcaaaattggctatgaaatctttaagttcgcgaaacgccatataaccgacatacaacagcactgaaagaataataagcgttaccattgttacaactatactcgcagcaagcatctttttctcccttaaaagtttcgccagccccactatcggcttctgaagcagcaccgcaaaacaaaatgcaagcaagaaaggccacacataatagaatagtactttaaatataaagaaaaccaccgcaataataacggcactcgccaaaagaagcgtcagccgcttcctgaaatcccacacattttcacccatatg

SEQ ID NO: 1011 - DNA, 51036 bp, unidentified
  source 1..51036: mol_type = unassigned DNA
tctaagatgaaagatgcttttgaagcgggaatcggtcagatgcagggctatcaggagcaggtatctaatgcgaaggctgatgtaggaaacagacagataagactggatcttacgaagacacgacttacagaacagaagactaatttcactgatcttaagtctcagaatgaagacattgatctggaagagattgttgttacatatacatcagcacagcttgtatatcaggcagcattatcagctgcgagcaaggttgttcagcagacactgcttgatttccttgggtagccagcataagagaggaatacagtgaggcaggctgagagttaagctgtataaacagcattgacagataaaggatagaattaagatttggaggtttgacatgaaagtacagactaaatggtttggagagattgaagttagtgatgataaaatcatcacatttgacaagggaattattggatttgaggactggaagaagtatactcttgtgtatgatgcagagaaagaggagaatatatcaattatatggcttcaggcgattgatgagccaacacttgcacttcctgtcatgaagccggaattcgtgtatgagacatatgatcctgttgttgaggatgagcttcttaaatctctcggagatgatatacaggatgataatatcagagtgtactgtgcgcttacggtaccacaggatattactaagatgacaattaatcttaaagctcctatcattgttgattttgatacaatgaaaggaatacagcttatagcagataattctgaatatcaggtaagatatcctatatacgatattctaaagaaggaggagaactaatatgctcgcattatcaagaaagaaagacgaagcaatcattattaatgatgatattgagattacaataatcgaaatcaagggcgatcaggtaaagcttggcatatcagctcctaagtcagtgcctatatatcgtaaggaagtgtatgcacagatacttgattctaataaggaagcagcaagttcggttgatgtgaagtctcttaaccagttatttaagaaatgatttgttttattagtgtatatttttgtccaaagggttaaattttacttaacattttccgatatatgcagtacaacatgaatgtaactacaggataaagttttgttttcacacggaggtggaattgtatcatgggaatggaagttaatggagtagcggcagcgtcaagctatcagagccagaattcacaggctgccaagccggtatcacatgtaagcagtgttacaacaactacagataagagcaatgaggttgttgttgattcagcaaagtcagcagcatctaatgtggcagtttctgtaggacaggcagcagacagtgagaagaatggcagcagcgctaaagacaatgacaaggctaagaagcaggctgaatcaatggctgatgttaaggatataaggaaagtccttaacaacaatacaattgcagaatttggctacaacgaaccaactaacagaatcacaattaagattaaagataaagatacagatgaagttattaaggagataccttcagagaaagctcttgagatgcttgccaaggcatgggagcttgcaggtatcatagtagatgagaggagataagctatggcaataagattatctggtatggtatcgggtatggatacagaatcacttgtttcagcgctcgtatcatcatataagttaaagaaagacaatcttgttaaagcacagaccaagctttcatggaagcaggaaaagtggaagaccatgaatacaagtatttatggcttttatagtggaaagctttcaagtgcaagattttctacaagttataatctgaagacatcaagtgtgtctaatgataagtatgccaaggtaacagcaagttcatctgctgttaatggtacacagagacttaaggttaagcagctggcgtcaacaggatatcttacaggtggacagattaaagctgctgatggaagcaagattacaggtgatactaagatatcagacatagttggaacaacagatggttctataagttttaagactgcttctggaaccaagagtattgatataacatcagatatgaatgttaaccagttcgtatctaagttaaaggaagctggcgttaatgcaagttttgatgagaataatgcaagattctttataagttctaaggagtcaggcaaggataacgatttctcacttgtggctaatgactctaacggacttaatgcattacagaagcttggaatatatacagttaatgatactgattcagcagaatacaagagactggcagctttaacagagggcagtgatgcatataatacagaacttgaaggtatgtatactaagattactgccaaggatacagcgaagagttatgctgataagtataatgcagccaaggataagcttgatgcactggcagcagatgatacttgggatcattcattgacattagatgaatatgtcgcaaagcttaagacagagacaccagatattcttaatgcttatgataagtataagaaggaaaaggtggattcagagggcaatacagttaaagattctgatggcaaagttgtgtacgaatatgacacagaggctatggaaaaagatggtgtcaaggatgaatatgaggctgcggtaaagaaaaaagcgtctaatgaatcactgattaaggtgtatgatgataattccaaggttatacgggatactaaggattatgtgacaatcggcaatgatggaaaagctgtggcagatgcttctaatgccaatgtattacaggaagtaagcgatactaatgctgacagacaggctaaagctaaggcactgcttgactctaagattgcaatggcatcaaatgttactggtagtgcatcatcttcgggtgctgtcagaataacaggacaggattcagagattgagcttaatggggcaacatttactaacaactctaataactactcaatcaatggtcttacaattgaggcaatggaagttactggtaatgatgaagtaactattacaaccaacacagatgtagatggtatatatgatatgattaagggcttccttaaggattataatgaccttgtcaagtctgtagatgttgcctacaatgcggcaagttctaagggatatgagcctcttacaagtgatgagaaagatgcaatgtctgatgatgaggttaagaagtgggaagaaaagattaaggattcacttcttagaaaagactcaacacttggaagtgttcttgatactatgaagaatgatatggcaaaatcattcaaggtgggagataagtcttattcactttctagttttggaatagctacacttggatattttaattctccagagaatgaaacaggtgtatatcatatagatggtgataaggatgattctaagacatcagctaatacagataagttaagagagatgatatctaatgaccctgatacggttatatcattcttttcacagttatctacacaattgtatactgatcttggaaagaagatggcagcatcatcaacaagcagtgcttatactatatataatgataagcagatgaatacgcagtattcagagtataatactaagatatctgcggcagaagacaaggttactacatgggaagattattattatagtaagttctcagcaatggaatcagcgcttgccaagatgaatgcgcagtcatcatcgttatctggactttttggataatagtacatattaacaaccgcataagcatggaagcttatgggaaatgaggaaaacatggcatttaatcagaatatagcacaggaatataacagaaataagattcttacagcaagtcctgcagaacttacacttatgctttatgaaggggctattaagttctgtaatatagccctgatagctatagaaaagggtgatttacagaaagctcatactaatattaagaaggctgaagatataattacagagtttaaggtaacacttaatcataaatatcctgttgcagaagattttgagaaaatatatgattacatatactcccttttagttaatgctaatgttaagaaagatccagagatacttaatcaggcattagatgaaataagaggcatgagagatacatggaaagaggttatgaaccgtacaaggggaatgaaccagtaggagattaatatatgactactaattatcttcagatgatgatagacagccttaataagaagaaaggaattcttatcagaattatagagcttaatgaagagcagaatcagattctttcagaagaaacattgaatggtgatgcatttgatgataatatgaaagcaaaaggaagctgcatcgatgagcttgatttgctggatgagggatttcagtctctgtttaacagggtcagagatgcaattaatgctaataaagaaatgtatgctaatgagatatcggtcatgaagagactgataacagaagttacagagcttggagctaagatagaggttcaggaagcacgcaacaaagtcaaggtagaggctatgtttcgtagagaacgccaggagcataaggaagctaagagaagtgcatctatggcaaagtcatattatcagaatatgagcaaggtgagcaatgaaccacagtttatggataccaagcagtaatttttaaaaaagttatattacggactaaagttttggtactaaggtccgatatataaagtacaaggaaacagacagtttcctgtaaaccataactagatgtagcagggacgctgcatcataatataatttcaaggaggaaaatattatggtagtacaacacaatttatcagcaatgaacacaaacagacagatgggtacagtttctagtgcactccagaagtcaacagagaagttatcatcaggttacaagattaaccgtgctggtgatgatgctgctggtctttcaatctcagagaagatgagaagccagatcagaggtcttaacaaggcttcttctaatgcagaagatggtatctcacttattcaggtagctgaaggtgctcttaatgagacacattcaattcttcagagaatgaatgagttagcaacacaggctgctaacgatactaacacatctactgatagaaaggctatccagcaggagcttactcagttaacatcagagcttgacagaatctactctacaacacagttcaatacaatgaatctgttagatggtaagttcacaggaaagagtcttcaggttggttctctttcaggtcaggttattggtatctctattgctagcatgaaggcatcagctcttggtatcaaggcagcagatgttaaggttagcacaaatgctgtagctggacagtcaatgtctattattcagaaggctattgacacagtatcttcagagagatctaagttaggtgctcttcagaacagacttgagcatactatcaacaacttggatacaacatctgagaatacatcagcagctgaatctcgtatccgtgatacagatatggctacagagatggttgagtacagcaagaacaacatccttgcacaggctggacagtctatgcttgcgcaggctaatcagtcaactcagggtgttctttcacttctcggttaataacaattactactataagcagaagagccggtgcttgcaccggctctttttgcaattaataatatatcataggggaatagacatatatggaattatctaagagtttttttgaagatgaagtaagagatgggttctatgtaacatcagatatgaaacatgcgtgggcagctcagttagaagtattgaatgatgttgataaagcctgcagggagaatggaatacagtattttgcagaatggggaacacttcttggagcagtaagacatcatggattcattccctgggatgatgatatggatatatgcatgaagagacccgattataacagattcctacagattgcagaccagataatgccagagggatataagatatttaatataagtagtgatgaagataatgataatatgcttaccagaattattaatgggagagcaattaattttgagaagacacatttggaaaaatttcatggatttccatatgtttcaggtatagatatatttccattggattttatagctcccaatagggaagatgatgattttcagtgtgaattaataagcattgttaattcagtagccaagtttatcaggacattacaggagaatgaagaatctatcaatgaagagaatcttcaggaacttaatctcaaaattaatcagattgaggaattatgcggagtggagattgacagagataaggatctcgcacagcagcttaatgtactggtagacagattatgtggattatatacagaggaagaagcgggatatgtaacaataatgactatatgggcagaggaaaggcagtataagcttccgaaagaatattattccaaaacagtgcggcttccttttgagaatattaccataccggtaccatattcttatgatgcgatattaaagaagaaatatggtgattatatgaagcttgtacatacatgggattcacatgattatccattttatgacaggcagaaaaagcttcttaaggataatggggttgtatttaatgagttttgtgatacatatgaggattatattaattataagaaacaggtcaatggtataagaaagacaagaaatgcgataagagaaaagaatataaaccatgaaactgcagtatttatggtgtataaggcagaatattgggatatgcttgatggattgttcagagaatatgaaaagagaaaagaacaggaaatagtagttattccattgaggtattattataaaaatattgatggaacagtagaagaatgtgcaagtgatgcagttctgccagaatatgttcagaaatatataaacagtgattataatattgaagaggagaatcctgagacaattattattcagaatccatatgatggatataatggttctgttacaatacatccacgatattacagtaagaatctggctatacatacaaataaacttatatatatgccatattttgtaacggaagagattaatcctatggatatgagagcatatataagtatggatgcatatgtaaccatgccaggtgttgtgtatgcagatgaagttatgctgcaatcagaagccaataaagaattatacgtaaaaaagctgaccgaattctttggagaagaatcaaagaaggagtgggaagataagattaatggccggggagctttgtatatagagaaaaaagatcctgttcttaagtataacataatgccgtcagagtggaaaaatatggcattaaagaatgacggcagctatagaaagataatactatattttataagtactaatggagtgctggaacataagagaaaaatgtttggaaaaattagacgctcaatggatgtatttacagaatatcagtcagatgttatgccacttctagcatttgagggcaatatggaagatatattggaactcgaagatgtaatgcttttgatggattataagactatattgagaaaatatgaaaaaaatatagtcagacctgatatgttaaaaagagctgttgatgcatgtgatgctttctatggagaggcaggagcagaagcacagatgtgcaggaatcaggggaagccggttatgatagaagatgttgatatatagtgaggagaaagtatgcttcaatttccagaagaatattttgaagatgaagtaagagatggattttatgtaccatctatgataaaaagagcttgggcaactgaacttgatgtgcttgatgaggttgacagaatatgcagaaaatataacataacttattatgcggaatggggaacattgcttggagcaataagacatgccggatatgttccatgggatgacgaccttgatataggaatgagaagagaagattatgtgaagttctgtaaagtagcaccaggtgagtttgtggaaggatatcagataatcaatttcaggactaacaaagattttcatcattttcttgccagagttgtgtgtaagaacaggatatgttttgaggatgaacacttgagaagatatcatggatttccatatcttgcaggacttgatatatatgtgcatgataatgtgtcaaaggataaagaagcacaggggaaatgcgaaaagacggcagaatatatagttgcggtcgcagatgctattgaggcaggacagatgtctgcagcagatgaactggcggctgtaacaagaattaacatgatatgtggaaccgatattaaggttcaacaggataaatgtcaggaaagaattgaattatatgctgcagctgaaaaagtgtttgctacatttaaagatgaagactgtgaagaaatgactcagatgatgccatacagtctgtatggaaatcatatgaggatacctgtaaaatattatgagcgtgtagtaagggtgccttttgagaatacaacaataccggttccgattggctttgatgctatgcttaaaagcaggtatggagattacatgaggcttgtgagaaatgcaggaggacatgattatccattctatgaatcacagaaaaagcagttagaggttttgatggattttaaactgccggaatatacatatgatgagaaaaaagcagtaagggcagctgatttagatgaattggcaggctacagaaagattcttaaaaactgtcttgataatattgataagcaaattgaagaaatcggacatatgcagaatgtagaagtgataagagaagaacttgttgatatacaacagacagtaattgacatgggagggcttattgaaaaagttaaaggcgagggaactgaaagtgtgagaagctttgaaaaattctgcgatgttatatatgagatatatcagggaaataatgccgatataaaagctgaatttgataaagttaaaagaataatagaaagagatattatcgcaaagaaagaagaactttttctagtgagcaaagcttcagaatggaaatatatagagaatgtatggaagaaacataaagaggaaagagatactgaaatagttgtggctgttgttccatattattataaagaatattatggaagcataaagaaagaagtaaatgaactggataaattcgccacagatattggtgccattgattctgcacagtatgatatggaacttcatcatccagatattatatatatacagaatccttttgataatgagaatagggcaataggaattgacagaaagtattattcagacaggttaaaatgctgtaccgacaagcttatatatatacagtcatttgaacttgaagaatttaatgagtctaatgaacgcgaatataagaatatggcttctttctgtacagtaccgggagtaataaatgctgatgtggcatatgtacagtcttataacatgcgtaatatgtatataaagaaattaactgagtttgctggaaaagaaactgaaagtatatggaatgataagatacatgctaagccagagtggatgatgaataaggagcattgcattgctaatggcaatggtaagaaaaaaatattgttctatacttcaataagcggacttatgcagaattcagagatagcagcaggaaagataaagaatgtattagatatatttaaacaatactcaggtcagatcgaagttgtgtggtgtgttcagagccttgtagatactgttatggaagatatagacaagaaactctatgagcagataattgcaatcaggaatcaatataatattgaacaaattggacatgtatgtagcgacagggataaagatatgcttaattcatgtgatgcatattatggcgatacatcgtcaattgttcaggattatagaaatgcaggaaagcctgttatgataatggattatgaaatataagaattggagaagccggatgaatgggagaatattattcataacacatcagttgtcgagaacaggagcaccaatagtgcttctggatatgataaaattatgtaaacgtgagagagcagatatagatgttataacaatgatggatggagaactgggggagcagcttcataatatgggaattgattataagattatggaaagattctatccggaaaaagaaagactgttatcggagtggagtagatataatcttgttgttgctaatacaatagttacatatgaagtaattcatgttcttaatggcagcaaaattccagtaatatggtggcttcatgagggaagacagtattttgaatattttgcaagcgtaataccgcattttggtactataggaagtaatattcatacttatgctgtaagtccttatgttaaatctgtaattaaagatatatataaatgtgatgttcccatgatgcattttgctgtttatggatatgaaggtgaagcagataagcattatgcgagaaaaagagatgtggtaaaatttcttacagcaggaacattttctaagataaaagggcaggatgttcttgcagctgctataagaatgcttccagacgaatatatgaaaaaagctgaattcagtttctgtggcaatgaagctgcagttgatgaagaagtgtacacaagtgtatgtgaattagaaaaagattataataatgttcatatgctgcatcagcttacaaggcagcagacaatttcatgtatggaagatgctgactgtctgatagtaccatcaagaattgaaccactttctgctgtggcaattgagatgatgatgacgggcggaacagtattgtgtacagatgtgtgcggaattgcttattatgtagaagatggtgagaatggatatgttacaagttcagatgatcctcagaggcttgcagaaagtataataagagttatagatgattatgataactgggaacatattggaaaaatcggacatcagacatatatgaaacatttttcaagagaagctgttgagccggatatagtgcggatagtagagaaatatatgaatttgtctaaaagaataatattcataaaaggaaaattagaaactttggattatttcatagaccagcttgcagacagtgcagacaagcttggaatagaatattatattatcaatacagggattcctgaaagctacggtgaggctcttgaagaatatgtaaagctgggcagatgcgcagtgtttatgataaatcagataggtttgttattgagtgagaatggacaaaattactggaaagagagaaatattccagtatatgacctgatagttgaccatccgtacaattatgcagatgcattagagtgtcctccagcagatattaatgtaattgttatagacaggaatcatgagaagttcataagaaaatattatccggaaataagaaatatatatttcatgcctgatggaggaaatgaagcagaaggcagaatgcagtacaaagacaggccaatagatatattgtatgtgggagattgtcaattatctacaccatttattgaaattccagatatgtctgataaaggaatggagatgtattcaacagtatataatatacttcttcaaaagccgggcttgtctatagaagaaactatggagttatattttgaagcaaagggcggatatacaaaagagcaggtaaagcagtatatattaaattatgggtttataatatctgataatgtccgcagatattataagttaaagacaatgcacgcattagaaagtacaggtgccagcatagttatatatggaaaaggatgggatgcgcgtgatgaggcatggcagcctaatgtaagcatcaatgcaagaatatcttcagaagaatgtaaccgaatgcttggaaaagcaaagattggacttaattgtatgccgtggtttaaggatggatgcagtgaaagagtattcaacataatgcttaatggagctgtgtgccttacagatacaagcaagtatcttcttgaaagattcgagcatggaaatgaactggtattttataatcttgaagatatggaaaaaatgaaacagaatgtttgctggctgcttgagaatcctaatgcagcaagccagattgcacaggcaggttatgaagctgccataagaaatgatacatggctgtgcagaatgggcgagattgcaaagatgatggggaaaatgagatgataggatatatgatgggatacagaagaaacttatgattatggagagtgggtatgaatatacttgttattggagagaagttgtttacagattatgcattacaggcattagatgatactgcacatatggttgatgtgtattattgggatggtacatttggaccagaactgtttatggattcaggtattaatgattatgactgtattgttgttatgtttaatgacgataagttatcagcagatattacatctatgattgagaaaatagttactaatgagaattgtatagtgtttaattatattttatggcataaagctatgctgcctgcaatgagggctgatcttgttatgagtaatcctttggcttgttcatatgacggactcattatgggtttatctcatgcagaggttggaatactagcagacagattaaaaggtaattatgctaatcttgctgtttcatcacaggatatatattataattacaagacgcttgagtattgcattgataagtatggggaaaagataaaaaacttgaaacatataattatagatatgtatgactatgagtattttaattttgatacatctcttgctaagaacatatacagatattttttgtggggaggttacaatcttgatggacataatatgacacgcaataagatatatactaacagccttgaagaggtgcgtaattatctgttgtatagtaaatataaagggctggatataagtaagcttggaatgtggaagaaactgtttccagatacatattatatgaatgggtattctgattacagatgtgccagagggattgaacagagaatagatatgattacggatagtctggttgaagagtataaagttacatcaagtactgtgttgaatgagtatccagaaacaatcagtgaaaatgtctctattatgaatgatatgctttcattaatatatagaaagtggccgcatattaaagtggatatagtacttcttccggtatataaaggcattcttgataagagaaaaaggtactatactaagtgggaagaacagtttatgggggttatagaacagctgggtaatatttatccgttcagattcacatcttatctggaagatgcaatgaccgcagataagaaatattattatgataaggatcatcttaattacctaggggcatatgtatttacgcagaagttaaaggagatgataggggaatagattagatgggaaagtgataaatagattattaaataatgggataaaaataaatatacataaagttaataactcaaatttaatgtccgatataatatataatactatgtggatatggatgttagataagtgattttgatagaagttctgcgcatatttatgcagaagttttaatgaaaagaagaggaatacatgatatgactagagaagaatatattgtagaaattgcagaaaaaatagaggggatgaaagaaaaaaatatttatatatttggtataacaaaagcaacagttttcttagcaaattatcttgttggtagaggggtaaaatatattgggttattagataataatcaacaaaaagtaaatgaatataatgaaatgtttagcatgttaattaactatgaaaaagatattcaacattattacagtgatgaatttaaaatatcagcttttagtcctaaacaaataaaaaatatagatgcttataatatggagataattacgatttctcagtattatagagatatgaaaaaacaattggatgaaatatatgaaggatttccatcaattaattttaaaaaaattggagatagctctgtctatgcagaattaccacttgcatctaaaattgaggtaaaaaaaatattaaaaaatagatatgagacttatcttatatataatattatggataccacttataggttgagggatcaaggctttaaattagaacaatataatggattagagaaagatatattattttcaaataaagcaatatcattatggatagattgtatgtattatggtatatatagagaaatcttttgggaaaatatatatggtgctatagataattatgtaaaaaacattaagtatacagtaatagatattggtgctaataggggatatgcttctatatggtttgcaaataagaaatggtgtgaagaagtaatagcatatgaattaatgccagaaaattgtagcaagatgaagaaaaatcttgaagttaataaaaaactaaaaatagttttaaatgaatttggtctaggggcggaaactaaaaaattaaaagcatattttttcccatttagagatgcaatatcgacaatatataaagagtttattgatatttatgctcctaatcaagtagataaagcagatgtaatagatgttaatataaagaaagcatcagaagaatttaaattgcttcgtaattgtgaacatataattataaaaatagatgtagaaggagcagaatatgatatctttcaggaattatctgataattatagtgatttctttaaaaaagttgattatattataggagatgcacatatgggattagaaagattatcttgtatattatgtaaatatggatttaaacttattgaatcatattatacagaggatgcagtagctccttttttgtatatgcgggaggataaatgtgaaaactaattatttcgtttgtggcgcaattcaaaataataaaatatattggcaaaatcgtgatgatggagaattttgttgctttgatttaaaaaacaatatatttaaatatttatatacaattggtaaaatgaaattttcagctgttatatgtgcggatgataattatgtatatggaataagtgaatcggggaagtatttttggaaatattctatattaaatgataaaatttatatttttgaaattaattgccaaggatatgcattagactggatatgtaatgcagtactgacagaatcatatttagtaattataccaagtagggctgagattgttgtttggattgatataaaaaatggaaatgttgttgctaaaaatatttataatgaagtacaagtcgaacatgaaaaacgtatttatgtgaacgagaaagtatttttaggacaaattaataataatgataaaatggtggcattcaattataaagatagttatgttttagaggtggattacataaatttaaatattaaaagaaatgtttatcctaaagaaattgtgggaatagcagatgttgaatatataaatggtttgttttatattttaaatgagagtggagctttatataattataacttggattcgggaatgatataccttatagcagattgttacaaaggtatggagagattatttgaaaataaggaaacactatggcttttgccgagatgtgaagggaaaatattaaatattgatttaagagggaatgaacttcaaaaatatgaatatccaaagaaaacaagatttgataaaaaagttatatatgatccatatatgactaataatggatataaaattgaaaataaggagacaatatttttttctatatatggctgtaattacattttctcaattgataaaaaaactaatattggcaaattttataattgttttaatttcgatggggataatatgaaattatgttacagtatatataaaaatgacgtattttatgaaaaaaataaagatttggttgcatttttaaattatatctcaatagatttataggagtagaaattagatgcttaaagaaatcaatatttatggagcaggtggaattgcgagagaaataataaaaataattaaacagtctaatcttgatataaaaataaatgttgttgtaacaaaattagataataattatgataggtgtgaaaattataaagtacacgagtacaaagaatttattcagaatactgatcttagtagacttacatttattgttgcaatatcaggagaagagggagattatataaaaaagattctcacattagatagagtgaagaaaataataacagttgaagaatttgggaaaatgttattttcaaagttttgggaaacacccctgaaaaaaaatatgattgttttttcaaattttgatggaaaaggttatggggataatcctaaatatatatgtaataagattgataaatcaaagtatgaatgcatatgggttgtaaatgatatgaaggaggtcatgcctataggaataaagaaagttaaatatggttcactagaacattatagagctttggctgaagcacatttttgggtagataacatgcacaaaaacatgattacacagaagagattaggacagatatatattcagacatggcatggagaaggtccattaaagaaaattgaatatgactcacaagagttacctcaaagttactataacattatagatcacgatgtaaatatgatagattactttatttcaggatccgaatttaaaacaaagcaatgtaaaagagcttttagatatcatgggtgtatattagaaacaggaaatcctagagatgatatatttttttgcaaaaaaaattataaagaaagcatatttccaaatttaaaacataaaaaatggatattgtatgctccgacatatagaaaaaaaaagagcaatgtaattaatccagatattattataagtagatatagggaaaaatttaatgaagattgtattattttgataaaagaacatcctaatatgacgaataaggcaaacatatacaagtattcggaaaatgtaataaatatgagcaattatccagatacacaagaattattgatggcagctgatatattaataacagattattcatcaattatgtgggatttttctttgcaaaaaaaacttgtgattttgtttcatccagatgttgaatcatataataaggaaagagaatattatttaccttttgaaaaacttccatattgtgaagcatttaatattgaggaagtgtgtaattatattacaaataccaatatgcaggagtatgaaaaaaatttattgctttttttcaccaaatataaaagctatgataatggtaatgcttcagaaaaaatagctgcattaatagataaattaaatatataggagtgagttatgatttatatatggggattgggatttttttataaaattaatgaatttagacttaaagaatttgaaattgctggttatattgataataaaaaggctttagaaatgtcagaatataaagggaaaccacttattaaatcagctgatataaattcaaatatgacagtattagtcatgtctaaaaattttgttagtatggtatatgaacttatagaaaaaaaagtaaaaaaaataataattggaacatatatttttcctgatagcggtcaggaagaattattaaaagaacatggggaatttataataaaagaaaaaaatttgatttttaaaacagaaacggatgaaatttgtataaataatcaagaagatttgtcaaaaatttatagaaggttgcatagtgacggcgggtatttgtctggttatttaaaattacctataaaaccattttgcagagagttcggctatactgagggaacccctgttgatagatattatattgattgttttttagataaatacaaggaagatatctggggtgatgtagttgagatagctgacagtacatacacaataaaatatggtggtgaaaaagtaaaacattcatatataatgcatgtaaatggatgggggaaaaatgttataaaaggaaatcttgaaagtggagaaggtattgaagaaaataagtatgattgcgcaataattacacagacactaatgtttatatatgacttttcttctgtagttaataatatatataaaatgctcaagccaggaggagttgcattaattacagttgcgggaatatcgcaattggcacgggaggatgctggtaattggggaagttattggagttttgaacctgattcgttgagaaaaggttttgaaaaaaagtttatcaataatgttgtgatacaatcatatggaaatgttaaagtagctgtagctatgttatatggtatgtgttcagaagagattcctaaggagatttatggatataatgatgaacaatatccattaattattggtgtaagagtaaaaaaggaaaaattatgattaaagagaatttaaaaaatattattggtgataaacaaatatattgttatggtgcaggtacttatggaaaaatcgtcggatatgctttgttagatatgaaaatacattttagaggttatttagtatcaaataaagatgtaaagttaaggacagtgttggggaagcctgtttgggagttagataaaataaatatatctgaatcagattttatattaattacggtaaatgaaatgttacaaagtgaattggaaaatgaattaaaaaaaagaaatattgtcaattattattgcttaacagaatacgaaatggatgagttggataagacaacagaatttgaatatcatggagaaactaataattacataaatgtattgctttatcatagagtgagcaatttaaattttgacccatggaaattagctatagctcctgaagaatttgataatcatatgagatatattagagataattataatatcatgagatttgaagatgattggagcaatataaatgaaaagactattatagtaacatttgatgatggctatgcagataatttttataatgctatacctatattgaaaaaatatgatattccagcaactttttttataagcacaaataatataggaactaatttggaattttggtgggatgagttagcaacaatgttttattatataaataaacataaaataaagtttgattatagaggaaaagcctataatttagaaaaaatcgatggtgttagaaaagcttgtatggaagttagaaatattcttatgaatatgaattcagaaaagagaagagaagagttaaatatgttacatgatagaatgtctattccaatacagggaaatgatatgaatagaactatgaatcaatgggagattcaacagttgacaaaatttaacaatatttctataggtgcaaatactaagtcacatacaaaattatctcaattatctgtggattctcaaaaagaagaaataaatgaatcaaaagagattttagaaaaaatttctggtcaaaaaattgaaatattttcgtatccatttggagaagatgaggattatactgaacaaactgtggaaatattaaaaacatgtgggataaaaaaagctgcagttgtaaagcaaggattatacagtaaggaatatggggagtatagaataccacgtaatactgttaatggaggaacaactgtaagacagttaaaaaaaataattgagaaaagttggtttgaatatggagaaaaagctatatagtatagaagaggtgtttttaattaagtaataagttgatatacgagaggtagaatatgcttcatttattgaattatttgccaaaacagttggctgaatatataaaagagaaaaataaaaaaatatatatttatggagctggtatgatagggcaaatggttgttccagattttcttattagaaataatattgatgatagagtgatatgctatattgatattgataaaagaaaatctagagatattattaaggttggagaaagaaaaatagcaatatgttctttggaagatataaaagaatggaatgagaaaatatttttaattataacaaatagtaattacagtgaaattacttctatatttgatactttagaatatatgaacggtatagatgcggtgatttatccagtaattaaaactatagaagtagaaaataaaataaagactgatacagatatattggtggattattgttcagacaagattccaaaggtgatacattactgttggttttcaggaaatcctattccagattatttgaaaaaatgtatggaaagctggagcgagatttgtcctgattatgaaataaaaagatgggatgaaagtaattacaatgttgagaaaaattcttatatgaaacaggcctatgaggaatgtaagtgggggtttgttccagattatgccagacttgatatattatataattatggtggattttatatagatacagatgttcagttagtcaaatcattagaaccattaagaatgcagggtggcttttgcggtgttgaaaaatggggtaatgttaatatgggcggatgtagcggggcagtaaaacatcatccaatgataaagaaaatgttggattacagagctaatattcaatttaaatatgaagatggaacattaaatcttaatacatgtggagtatatgaaacacaaccatttgtcaacttaggtatgaaagttgataatacaactcaaaggattaatgatatgacagtgttttcatcagatttttttcatccatatgattatatgagtggaaaaactgttatcacagataatacattttctattcatcattttaatggtggctggcttgatgagaagactagaagtattagaatcatgagttcacaaaaatataatcatgttatagagagaatggaaaaaactaatgaataattgtaagatatcagttattataacaatatataatatggaacaatatcttgataaatgcatacaaagtgtaataaatcagacatataagaatctggaaataatacttgtaaatgatggatctacggataaaagctttaatatatgtaaaaaatatgccatatctgataacagggttgtcgtagtaaataaaaataatgagggattagtaaaagcaagaatatctgggattatgcaggctgtaggagattatattacatttgttgatgcagatgattggttagatagtaatgcatatcaacatgttatggatatgtctaatagagaagatataatttcatatggtttaatagaagattacaattttaaaagtgttcaaaagtttgatcagattgatgatggaatatatagcaacgatgatataaaaaataaaattctatataatatatttgatactaataatttttttatgtttaatcttatgcccaatcttgtatgtaaacttataaaaagagatatattatgcaattgtctcaataaagttggtacttatgtgagaatgggagaagacctggattttgttgtgcaaagtcttagcctggcacacacattaagagttataaatataagtccgtatcattatgtacagagacaaaactcaatggttagaacatctgcatcggatgaatcacttgttagattatataaggatttaatgtcgatagaattagatataggtgatgtgatttggcaaagacaagtatgtacatatatgtcgtttatattacagttgaagaaaatgaatatgtttattaagaattcatctttctttgataaattaaaaaataaaaaaatagttgtttatggagcaggtaattatggatgttcatttattgaggccgcagtgaatgaattaggaaccagtattgaggctgtagcagatagtaattggaaaaatattaattggaaagatgaagaagttattgcacctcaggaaattatgaaaaggaattttgatattatatatattgcaatattaaatgaaaaggtctgtcaagctataaagagtaatctaattaatatggggattgaagaagataagattttatattatggaattggtgatgttagaattgatgaaataaaaaatattttggaatctatgcaaaataaactcagatcttaattacacaataagttgagtaagtaaagcctttagggtataataaccctaaaggctttgttagtatagaaaatgataatgaaattgttttcagtgaatgaaaagaggtaagtatgcgcataaatagactgaaattaacagattttaaggcaatacaatcagcagatattaattttgaggggaaaagcactattatatttggaataaatggtactggtaaatctacaatactgaggtctgttaatttattatatgccaatatcattaatcagattgttaatagaaaagaattaaaacagtactatgctattcagcttgaggatatcaggtatggagcaaaggaaacacagataagagcggagtttgatattaatggtgaagatattgagtatggcagaagaatggtaagaagtactgggaaaaagtatgaaaataaggatggaattaaaagaataagtgatatctttcatgaggagtatatttcagatgaaattcagggagatatacctatatttgctaattatggtactaacagacttgtattggatattcctttaagaataagaactcatcatacatttgatatatattcttctttagagaaggcaattgagaataagattgattttcgaactttctttgagtggtacagaaatcaggaagattatgagaatgagaagaagattgaattggaaaatcttaattataaggataaatcattggaagctgttagagttgctatagcctctatgctggatgaatgtactaatctcagagttgtaaggaaaccaagattagagatgaagattgataagggagatataagcgtaaatgtttctcagatgtcagatggggagaagtgtactatggcattatttggggatcttgcaagaagactcacattagctaatcctaataaagttaatccactgatgggaaatggtgttgttttaattgatgagattgaacttcatatgcatccgtcatggcagagaaaagtattgaaaaaattaaaggatacatttcctaatattcaatttataattacgacacattctccaatagtgttgagtgaagccgatgatgattataaactgttgtatactcatatgacggataaaggtgtagatgttgagccagtagggagaatggatggatatgatacaagtgctgttttggagcaatttatgggaactaaatctataaatgagaaaacggaacggtacattcatttgatgtataaagatatccagaatggaaattatgctgaagccaaagaaaaggttgatgaattggcttcaatgacaagtgagaatcatccagatgttattatggctcgtatggaattaaagaggagaaatggctaatgattcatattcaaaaggttgaagaaccagaatttatgattgaattcaaaaagaaaaatcctaaaaaaacatatgatagcgaagaatttgctccatacagagataggttgagagaaatattggtaaaagaacagaagaatatatgtgcatattgttgtgcgagaatagatagggataagtctaaatcacataatgaacatattgaacctagaaatcctggtaaatatcaaagtaataaatcattggattattataatattgtagcgtcatgtaataataaaaaaacttgtggaaatgctaaaggaaataaatatgaggcagataaatttatatccccactttcgtcagattgtgaagataaatttgactattatttagatggttcaatagaaggtgataaatatactatagatgtacttaatcttaatgaatatgaacttagaaatgcaagaaaaaatgtattgagatatttgcagcctatggataaggaaacaataaatgatgtattcatgaataatcaggacgaatatcttccatactataatgtgataaaatggtattataatttgttataatcttatttaaattaaaagaggtacacatgatttcaataaaacccttagattcaccaattaaccagcagcaatatggtgatatgacttacagacagtatgcatatacatataatattgacgacagaaaagtcccatatggaccagatatgttttatttgtctgttaatacaattgcagataagaattttacatttgcagtagatgaagatgaaaatttagttgcagcattagcttttgacggtggaacatatgcacatagatatacatattcaggaggagtggatacggcttttattgataattatgactgtatattcttatatgactgcaatgagttttctgttgaactatgcaggacagcatttagattctggaaggggaaaagactggttcttgtaggagctaactgggagaagatgattgagcatctggatgatataccggggattgagtgcttttatgagattgaacctgaaaataacagatttgcagaacttatgaatggcttcaaatgtcttcatgtgacatacggcataccacatcaagaaagcatggaacgttatgaacagggagttatgtattatgatgaggtgatgtcgtttacatttatgttctctgattgtagagaattgggcgagagtaatccagacaagtatttttttgtgatggatggttattatggaaatctggggctttttactattcgttcaaagattgaagtatgtcttagatatgcattatcaaagggaatggaacctgttgtcagaattgttaaatcaggagagagtttttattcagattatagtggtgatgatatatgggggaagttctttaatcagccaggggattattctttagatgatgtaatgcatagtaaacatgtatttttctcaccaggattttataatggaagtgttcagagcaatataatgagccagatgagtaaaggaatttcgttagattggaaacatggtgtgcttaataataacctgattggatatattgcggagagaaagaataaataccttccatatccacaacggacattgggtgtgttagccaggggaacggattttgttaatacacatctgcataatcatccaattcacgcatctaaggagatgattgcagacaggatagatgaagctttgcgtgattggaatcttgattatgtgtatatagccacagaagatgccgtttattgtgaattcttcaaggagcggtatggtgataaggtgttttttactgaccagcagagatatgtaacgaggcagaatgaattactgagtgagcttcacagaagtgaagaagtgaaaagagctggatttgaacttggggctgaatatgctgcttcaattaatcttttatcacagtgtaactctttgattgcatctggcggatgtggaggagttgatgaggcattgagggaaaatgcaggtggatatgagcatgtgtatgtgtttgatttgggaacgaataggtaagaacttataaaaaccagtaaaaattagtaaaagtaattaaaaccagtaaaaagtagtaaaaatacaatgagtagttggaagaaacacaggaaggaatatatatgtacacagaattaacagcatctatgatgtgtgccaattttggcaatttagagaaagaagttaaagaactagaagtagcgggaattgattcgtttcatattgatatcatggatggacgatatgtaccgaattttgcgatgtcccttaatgatatgagatatatccgttctgcaacggacaagccattagatgttcatcttatgattgaacatcctaatactcatattaatctgtttcttaatgcgcttaaggaaggggatactgtgtatattcatcctgaggcagaatatcatctgtctactactttacagaagataattgatgcaggacttgttccgggcatagctattaatcctggtacaagtattgagactgtgatggagatgctgcagattgtagataaggttcttgttatgtcagttaatccgggtaatgctggtcagatgtatcttccatatgttggcaagaaaattgagagacttcttaagcttcgtgaagaaatgcactttgaggtgtactgggatggtgcatgtggtgcggataagatagcaacatttgctcctatgggagtgaaggggtttgttctgggaacaacagtacttttcgggaaggggagaccatatgctgatatattaaaggagataagacagttatgataattgataatgttccagagcagatgtcagaagatgatgttatagagctggcaaatgaatttactgaatatctggagaatagcggaaatttgttttttcaaaattatcagtcatctggactgacttatgagcatcttatagctatgttttatgtgacgcgtgcaatgactggtggtatgaggttatataattattgttatgatgccgccattgaatgtgcaaaatgtaatataaaacacaggctgacagccaatgaaaagataaaggtcacatttctcccaatatcagcagcagaatggccggcagaatatatttacagaaaattagaggctgatgacagatttgagccgcaggtggttcctgttccgttaataggaagaactaaggaagaacgaggaaagacatattcacagacttatgatttcttcatggcaggtggttataatgtgaaaaaaatatatgatttccagactgaggagataattggctgggaggaaataggtggtattcctgatgtggtgataaatgttacaccgtggtatagtgatattgcaaagaactatcagattgccagattgcctttatatgtgcttaatgtgtatatttcgtatggacttactgtaggtaattcacaagatagggtatatgcagaaaaattcatgtataacaaagatttcatgaatgttatgtggaaggtatatactgaaacaaagaaggattatacaggttttcagaaatatcaggcactaaaagcaaagaatgtagttaacagcggatatattaagatggattattttctggaaaagcatgactattcagaagaaaggcttagaagtatatggtctgttccggaggggacagatatatacagctataagaagattctcattacaccacatttttcattgggagatgataatatattatctttttcaacatttaataagaatatgtatttttatatatatctggcaaagaaatataaagacagtgtctcatttatattcaagcctcatcctaatcttagaaattcccttgttctggatggatatatgaaatcaattgaagaatatgaggcatatctggacgaattcagaaagatgccgaatgcatctgtttgtgaagaaggggattatctggcactttttgatacttctgatggtattatcaatgactctatatcttttgttggagagtatatgtatgttgataaaccaatgctgtttcttgaacgaccggaacagaggtttaatgaacttggagaggctctgattaaggctcattacaaagtggatggacatgattatatgggaattgacagctttgttaatgatgttgtaattaatggaaatgattatatgaaaaaggaaagaaaagctgtatttttagaagaattggattattattctaagaatgggattaaggcgtctgaatatgtgtataaggatattacggatggtttgtttaagatgtaaaggagcgttatgaatatagcattagtgcttgccggtggaactggtacaagactaggaacagatattccaaagcagtatattagggtcaatggcaggatgattattgattattgtcttgagacaatggaacattcaaaggatattgatgaagtgtggattgttgcagataaaatgtggcagcagcacattaagaaaattaataaatttaagggatatgcatgtccgggtagtaacaggcagttatccatatataatgggcttagggcaattgaagcttcattatcggatgagcagaaagatgttaatgttcttattcatgatgcagcaagaccgtttctaacagataagcttatacatgagtgcgttgaggcagttgccggacatgatggggtacttccggttctgcctatgaaggatacggtatattatagtgaagacgggaaggcaatttcatctcttattaacaggaacaaagtatatgccggacaggctccggaattattcagattaaaaccatatattaaggcaaatgagactttacttccggataagattcttttagttaatggttccacggaacctgcaattatggcaggaatggatattgtgatgattccgggagatgagaataattacaagataacaacgaaggttgatatggatagatttacagcagagttttaagggataaggtgtaatgaggatggagaatatatatgaatatatagccagactgcagtcagaggggaaatggcaggaaagctttgatgtgataagagcaggactgaaagataattataatgattatgaattatattttgctttgggagagtattatcttaaggataatattgataaagcatatctgtgctatgaaaatgcgttgttttattgtgataataaagatgacagagcatatatttcaggggttatgtctgaaataagttcatgtggcattaaagtaaaacctttatctatcgtgattgtttcatataattctaaagatgtaatgaaagcctgcataaagagtatccgtatcaataatatttcttcaagttatgaaattgtcgttgtcgataatgcatcaacagacggagttacagagtggttagagagtcagaatgatatcacattaataaagaatcaggataataagggatttggtgctgcgtgtaatcaggggattaaagcatcaagtcctgattatgatatatttttactgaataatgatactgttgtatctcctaatgctatattctggatgcggatggggctgtatgagaatgacaggattggagcaacaagctgtatgtcaaataatggtggatttcagaatattacagaagtatttgattctgtatctgagtacatatattatgccacgaaaaataatattccggaatattatccatacgagaacaaagtgtggctggctggttttgcggttattataaagcgtgatgtacttgattagattggtctgctggatttaagatatggtaaaggatattatgaagatgatgacattggaatcagaatacagaaggctggatatcaatgtattgtatgtcataacagttttatatttcattgtgggtcttttagttttaacaatgatgtggaagagaaaaacagactgtccagaaataatagaaaagtttttaaagaaaaatggggatttgatattgattattattcaaaatcacggaatgagattattcaatttataaaagatgatgaagataagcctattcatgtccttgaaattggatgcggatgtggggctacacttgcaaaaattaaatatttatggccacatgcggaagttaaaggtatagagcttattggggctgtggcagatataggggctaataatttggatataatacagggaaatattgaagagatggatgcgcttccatatcgtgatgattattttgattatgttatatttgcagatgtgttggagcatttaagagaaccacagaaagtattagagaaaatcagaagatatatgaaaaatgatgcagcacttattgtcagtgttcctaattttatgaatataacggttatgctgcctttgttaagaggtaatctggaatatgcagatgagggtattctggataagactcatcttaagatgtttactatgaagtcgtgtgttgaaatgcttacacaggcgggatattctgctgaatatagaggagttgtgtctggtaaggctttaggaatagatgtatctgatgaagaaaaaaatcagtttattaatgcattacaatgtatatcaggctcagcagatatagagcagtttgatgcatatcagtatatatttaaagcaagagttatgaagtaaaaggaaggtttcgggagaacaataattatgaaagcacaggtattacatggtataggagacatacggtatgaagagactgataagccccggatagagaaaggctgggtattagtaaaggtaaaggcagcaggagtatgtggctcagatattccaagaatatataaaaccggtgcacatgttcatccaattgttaccgggcatgaattttcaggtgaagttatagaaacagcagatgacaatttttcatggaggggaaagagagtaggaatatttccgctgataccatgtggagagtgtataaactgtaagaaaaagatgtatgaaatgtgcagtaattataattatcttggttcaaggtgtaacggcggttttgctgaatatgcagctgtaccagaatggaatcttattgaacttccggataatgtatcttacaagcaggctgcaatgatggaaccaatggctgttgcagtgcatgcaatgagaagattttatatagaaaaggattcatctgtgtgtgttataggactgggaacaataggacttctgcttacgatgtttcttaaagctgaaggaatacaaaatgtttatgttgagggtaataaagacatgcagaagcattttgcacagaaacttggagttgatgacgaacattataatgtagataatgttgtggcagattatgtatttgaatgtgttggaaagaatgagacaataaacagggcaatagaacttgctgcaccagcaggaaatattgtgctagttggtaatccatattctgagatgaatataccaaaggatacatactggaagatattaagaaaacagttaaagcttagtggaacgtggaattcatcatatgcaggagaatcaggtgatgactggcattatgtgcttaatatgcttgcagatggacggattgatccggaacagtttataacgcatgaatatccgcttgacgcaattcagaaagggatggaaattatgcgtgataaatcggaagattatgtgaaggttatgtgtatatcatagaatgattatctggagaggttattatggtaatagatattctttctcctgtaggtggaagatgtggtggtattgagaatgtaataagagcatggactaagaatctgccgcgtgaattatatgatgtaagagttattcatatgtcttcaggaataaaatatcttgaaggatatgatagggcatatgcatttgacgcatgcgaagaagtggatattaatgcaagacttacacattttacaagaaattatgcagggtttattaatctgtatggaaaaacggatatatgcgtagctgttaactggccagcaatgtgtgttgtggcagatgcggttaagagacttttaaagctggatttcaggattgtttcatgggttcatagcagcatagatgaatatgaacaatctgggtttggcagtgtcagggagatgcttatggcagatgctcatatatgtataagcagaagtaatgagcgaagaattaaggaattatgtccggatgctgttacatattatgtcggaaatcctgttaatatgcaggagtttatagaaaagcctattgataataatactctgtgttatgttggaagacttcaggatgtcaagcgggttgatgttatacttgaagctttatacagagcaagacacaagtggaagttcaagattgtcggttcaggggagtcagaagatgaacttaaggagattgcagcatatcttaagcagcaggatcaggtgcagtttcttggctggaaggattcaccatgggagtattgtaaagatgcttctgcactggtatgtgcttcggaatatgaagggtttatgttgacaggtgccgaagccttgtcgatgggaatgacagttatatctactcctgttgacggggttattgactatgtacggcatggtgagaatggatatttctttaaaaatgaggatgcaataggtcttgcacatttgttggatgagatatatgaaggaaaagttaaactgtgtgatagaattgattgcagaaaatcagttgaaatgtacaatatagataattattttgacaatatcaaaagaatattggaggatatgagatgacattttataatgtatgtcctgcagagattgaaagcggcggaccggagcttgcacatcagatgtgccacaggcttaatgatgcaggcttggaagcatatatgtattacataaaatctaatgatattaatcctcaggatgtgaatgcaagcgacaaatatattaaatataatacatttcatgcaaagcagttatctgagatagaacaggacaccagtgttgttgtgtttaatgaaggagcaacgggacttattcccttgataaaacattgccataaagtactctggtggatgagtgttgataattatcttattaatacagatggcagggatattgatgttataagaaaagaagttgtactacatctggtacagtcaaagtatgcatatgagtatgtgagagatgttgtaggtgctgatgagaagaatataatgtatgtatcagattatatcggtgatatatatatgacagaagtacccgagattctaaggcagaatattgttctgtataatcccaagaaaggactggacagaattaagccagttatggagagaacttcgtcatggctcaaatggattccacttataggacttacagaggaagacatgactgcctatatgcatattgccagaatatatatcgattttggaggacatccagggaaggacaggattccaagagaagctgcagtatgcggttgttgtgtaataactaaccgcaggggaagtgccggatattacgaagatgtaccgattccggacagatataaatttgagaatgaaacagattatgaaggtatagagaattgcatgcattatatatgtgataacttttatgaagcaaggaaggatttcgaatattatatagatcagataaaacaggaaaaatcaaagtttaatgatgatgtggtaaaattttcaaatttttttatgaacaggggttaagtatttcatgatggctccgataaataatacataagtgataaacattatttagtaatcactatttaatctgtacagtaaagattagatattatataggagatttattatcaaggaggaattacattatggtagtacagcacaatctttcagctatgaacacaaacagacagatgggaacagtaacaagtgccctttctaagtctacagagaagttatcttcaggttatagaattaacagagcagcagatgatgcagcaggtctttcaatttcagagaagatgagaagccagataagaggtcttaataaggcttcatctaatgcagaagacggtatctctcttattcaggttgcagaaggtgcacttaatgaatctcattcaatcttacagagaatgaatgaacttgcaacgcaggcagctaatgatactaacacatcatcagatagaagtgctatacagcaggagcttacacagcttacttcagagcttgacagaatctactctactacacagtttaatacaatgaatcttcttgatggtgatttcacaggaaagagtcttcaggttggtgctctttcaggacaggttatcagcgtaagcattaagagtatgaaggcatcagctcttggcattgggtataatgcaattaaggttagctctaatgcagttgctgggcagtctatgtcacttattcagaaggctattaatagggtttcagaggagcgttctaagttaggtgctatccagaacagacttgagcatactattaataacctggatacaacatctgagaatacatcagcagctgagtctcgtatccgtgatacagatatggctacagagatggttgagtacagcaagaacaacattctcgcacaggctggacagtcaatgctttctcaggctaatcagcagacacagggtgttctttcactcttacagtaatatagaatatagtactttaggagctggagcttaacgataataatcgtagcttcggctccttttttgataaggagaatgtaatgatattattctatcagtggaatgcatttatgcagaaggggatggaaaatgcattaaagaagcttagaattgaatatgaagtgtattatgatatagctgataactgggataaggatgatgcatttgaaagaagatttattgacaggcttgagaaaggaaattattcgggtgttttatcggttaattatatgccgattatatctgacatatgtgagaagatgagaatcaggtatatttcgtgggtatatgattcgcctctgcatataaggcatctggatactatgaagaattcatgcaataagatatatttttttgacaggatgcaggcggaagaattcagaattcagggtgtagatggggcagagtatttacctttggcagctgacccggaagtgtttggtggagtacgctcatattatgatgagtatgtatgtgatgtatcactgcttggacaattatataagtcggaatattctgatttatgtggtggattaagtatgtataacaggggataccttgaaggaataatagcagcacagagtcagatatccggtgggtttataatagatgagatgctggatgagaaactggttaataatatcaatcttgattttagtaaggcaggagatggtgtattcaatgcatctagaagagaactttcatatactcttgctaaggaagttacaggaagacagagatttacagcattggcattgcttcaggacagatgcaatgttaatgtatattctaaagatgttgataaaagactggaaaaagttaatttctgtggatatgcagattattatacacagatgccggatatattcaggaagagccgtattaatcttaatgtatccctgtgtactattcagacaggaattccgttaagaattcttgatgttatggcatgtggaggctttgtattaactaatgcacaaccagaattatttgaatactttgatgtgggtaacgatcttgttgtttatgaagatatgaaagatatggttatgaaagttatgtattatctgaaacatgatgagaaacgtattagaatagcagagaatggtcacagaaaggttcgcgaaaagttttcttttgatgacaggttaaagacgttgttagaaatataggagaagtttatgagtggggaaaagatatcagtaattataccctgttataatgttaaggatatggtatcagagtgtcttgatagtattgtagctcagacaatagggcttgaacatctggagattattctgattgatgatgcatctgcagatgagactgtaagtgttttgaaaaaatatgaagaaaaatatccggacaatattatgcttgttttatgtgaaaagaatggcaggcagggaacagcaagaaatattggcttatcatatgcaacaggagattttataagttttgttgattctgatgactggattcatcctgacatgtataaagtacttgttgatattatgaataagaatgaatgtgatgtggtacagttcagatatatggaaacaaaagacaagcctgaagaaatgtctcgtgcaatagataatattgattacaagatagtagattattcatgcaatagaaaagaaaaattgttaaattcacagatacttaatgaatcatgtacaactaaattataccgtaaatcattaattgattgtgctaatgtaagatatgcagaaggagttgcatatgaagagcccatgtttacatatccaatgaaattctatgtgaacaaggtagcggttacagaaacaaagctttattattacagatataatgaaaaaggtacaatgttatcatatatgaataatccttctacaatggttcaacatcttcaggttcagcttaatgtttatttaacaatgctccaatcggatttttttaacgaatataaagatgagattgacttgtattttatacattctttttatgcggagacgttttactttatggcaggcagagggatgcctatgttagctgttatgttgcgctatatggcaaaaacggtaaaagaatatgtaccggattacagaaataatccgtatattggcttaccaggggtaaaagaggagatgaaaagccttgaattgattgataaactgaatctgactgataaagaattagagtattgtgcaagtgagtatatgaagggattgtcgttagcatagactaggtaattaatatatgaaaatattatattatacatggaatgagataataaaaacagatgtaatccagacatttataaaaatgggatatgaagtcagttcctttgaatatgagttaaaaagttatataaaagatgttgagtttcttgaaagattagaatctgaattaaatagggcaaatcagtctggaaaaggatatgattttattttttcgtgtaattttatacctctgatttctaagattgcgttgagaaataagacgccatatgtctgttggatatatgacagcccatgtatgactatgtattcggagatggtattcaatccttataattatatgtttcatttcgatttatcagaagttgaacgggtaaaaaagcttggggtttcacatatatatcatcttccattggcagtgaatattgagagagtgaacaatgttattaaacaagcaacaactgtaagctggaaatatgtaaacaatggtgttgcgtttatgggaaatctgtataatgatgaagtggattttattgaaagtatagcaggattaccagattatgaaaagggatatatgaaaagtctggaattagcacaacttacaatgccaggaacagatttgatagaagaactttttgatgattattataatcaaagactgaatagatatgtaagtttttcgaaagaaaaagaattttttattaaggacacggaactggcattaaatatgattaaaaagaatatttcatctatggaaagaatcaaaatgttagaaatactatcttcaaaatgcgatgtgacattatattctgattctaagaagcaatgtctgcctgcggtaagaaaaagaggatatattgattatatgaaagagatgccggtgatgtttgctaatagcaaagttaatcttaacataacattaagaaatattaagacaggcattccattaagagctttagatataatgggggcaggaggatttcttcttactaattattgttatgagttaagtgaatatatgaatgatggagatgactatgtaacattcattgactcagaggaatgttgtgacaaagcagagttctatattaagcatgatgagaagagaaagagaatagcaagaaacggacaggataagattataaaaatgtttacatatgataatcagatttctaaaatgatggaaatattaagaaaggaaatttcctgatgaatatacttatttttgaatataataattttggaacagaagatgttaaagaatgtcttgaaaaaaaggggtacaaatatactgttgtagagacagatgagtatagaaacagggtgagtccggaatttgacaggttgtttgaagagaagtttagcgagggaataaatggagagaaatatgattgcgtattcacatttaattatagccctgttatatctaataattgcaaggcaagaaatgttccatatatagcattagtttatgacagccctcaggttttgttgtattcgtatacgataattaatacatgtaattatgtgtttatatttgataaaactcaatatatggaattaaaaaaagagggtataaatactgtgtattatgttccattagcggttaatacagacagaatgaagagaatgtctgctgctcaggagcagaatagaagcagattcacagaggtatatggtggggatatagcatttgttggagcaatgtataatgaaaagcataatctgtatgataaattagatggtatatctgattttacacgaggatatctggattctgttatgaatgcacagagaaaagtgtatgggcatttctttcttgaagaggtgcttaatggagagattcttaaagatatgcttaatagtctgccactggagccaaataacgatggagttgaaacaatacaatatctgtatgctgattattttcttgcaagaaagatggctaatgatgacaggacagagattatgtcaaggcttggacgggattttggaaaagaatacatggttaatctgtttacatttaatgaaacaccaatgctgctgaatgtgaataacaggggacctgttgattattataatgatatgccatatatatttaataatacaagaattaatcttaatattacattgagaagtattaaatcaggaattccactcagaggaatggatgtaatgggagcaggtggctttcttatgtctaattatcaggctgattattatgactggtttgttccaggagaggatatggttatgtatgaatctgtagatgatcttagcgataaatgcagatattatctctcacatgacaatgagagaaaacagatagcagcgaatggatatggaaagatatcagagtttcatacttatgatgtaagatttaaagaaatgtttgatgttgtgttcaattagcattaaagcgttttctacccattaatgggcaggaaacgctttatctattatctgcaggacacggatatcatatgtgtgatattttttaattgtttcgtaaccatgccttgctatttcttttctttcgtcatcatgttcaaggtagtatgaacataattctttcaaatgtgtttcgctttcataagctacaaggtctttgccaatttcaaagaattccggaagttcagcctgataattggttataaggaaaccgccacagccaagaacatcaaatattctaagagataatcctgagcggattgattttgcagtgatattgatattgattttgctgttattaaatataagcggcatctctgtcagggattttgcaaaacccctattatgtatatcaggcatgcctgaagtatcgcttccggtgtatatatcgacgttgaaattatcagacagcatgcgcaacattctcaaacgttcctgttcggcaacttttacacttaaatagtattgtgcaacaagtgctttgaggttttttcgtgagctggcaggaaattcataatggtcaggtatgctttcaagaagtttttctgccatatcttctgttagcatgctttctataaaattaaaaccatacacaccaatctgtgcattaataattccgtcaacaaaacctctttcataatcggaaagtacagcgttattaaatggacatttttcctgataggttgagccgatgaatgatatgtcgctggcatattttttcttatcagaataagaagcgagactgattatttcgtcggttcttgaagtgttagctgcgagcggcatatgaaaaatgtgtcctttgttgtactgttcgaattcttcataaagcattttgtcaaaaagaaatatcctgtttacaggattggaaatagcatttgaatataattcaagaacaggactgtcaacgataaggcttatatatgttatgttaagaagctggcatatatctgaaagccatggaaaaaagttgattgtgaatgcaaatgcgaatcctcctttagtaagcacagaagaggcaagtgccgcactttcggatggtatgattgatttattatatatctcagcactttcttcaacaatctctaatccgatgcgtttaaaggcatctattatatcaggctcacagagactgccatatctgtatatgtatattttcataagtatccccttttacaaaatatttatgtaaactattatatattaactaggttggcaattgctatggcaaatgttataattttaattagtttataatgtgttcagataatatgggggaattggagtgaaaaaactaagtattgttgtaccatgttataatgttgaaaaatatattgacagatgcgtgaattctttggttaatcagacgctttcacattcagagtacgaaattatccttgttgatgacgcatctgctgatgatacttggaagcatattactgattgggaacagagattccctgaacttataatggctattcattgtgatgagaatggaaagatgggtaaggcaagaaatattggagtttcttatgcttcgggagagtatataggttatactgacagtgatgactgggttgaacctgatatgtataaaacattgcttgatgaggcgtatgcaggtaatcaggatattgttgtatgccgatcaatgcgtgatgcaggtaatggcataattgataatcctggaactggttcagtgaagaaaatatatatagatatggatagtaagagaagagagctgcttgtaaccaatgaaatgagttatgttgtatgggataagataattaagcgggatttgttattaaacaataatattgtttttcccgaggggattgcttatgaggatatatattatggaacgctgcttcatgtatatgccagacgaattgcctttgtagacagaattttttatcattattatgtcaatcctaagtcaactgtactatctaagaatgctgaatatcataaggatattatgatttctaatatgcttttgtataaacaacttaaggaaaggggagtgtgggattgttttcatgatgaacttgaactggatttgttgtttacatggtatctagggactatgaaggtgatttgtttaaggtatgaaaaacctccatatgatatgtatattcagttaaagaatgatgtacttgaggcaatgccaggatgtgttaataatccatatattaagacaagcatgaaagagttttatcagctattagttgaacttctggattgtgatgttacacctgatatattatatcaggtggcagacaattttagaaaagtgtaatatgtatatggcaatgttgttattttttaaagaacggagaaaatcatgacagataagaatacattttataatatgttaaagagtaatgccgagagccagccagatgctgtggctgtcgtttatgatacgatgaaggttacttatgcgaagctttttgatgatgtaactaagaaggcattacattttcagaaatttgaaggaaagaggattgcaatattcgggccggcttcatatagatggatcgttaatatgttcggaacgattgttgcgggaaaggaacttgcacttgttgatttcttccttcctcatgattcgagggttgatcttcttaagaagacggaagttaattatacactgacatctactaaccagtatattctctctgatgagaattctattatcatatcaagtgctgagaaggataatgttgacggacttatatatgatgagaatacgcaggagggcgatattatcatgtttacggctacagctaatgaatgtgataagccggttgttctgtctgttgataatattcttaatgcggttatggcgataaacagcagggttgaatgtacaagtgatgatattgtgcttgcacagattccgcttcataatgaatttggatttatatacagcctcatatggcctctgtataatggtgctatggtgtgtataggcagaggcttaagacatgttgatgcagatacttattattataatccaactattcttataggtactccttctatgattgactatcagcgagctataagtgggtttaataaagaactcaatactattatcataggtggtgcaagctgcccgttcagactttttgagaatctctgtgacagtgatttgaaggtttataatatatatggaatgacagagacttcgggttgcgtaggggttaatgagctttacgatggttcgtatactctttttgataataatgcagtatctattgctgatgatggagagattattgtaagtggaccatgtgtcatgaaaggctattataatgacgtggagtctactgaaaatgtattaaaagacggtgtgtatcatacaggtgattacggaaggattaacaatgccggcagacttgttctgttgcagcgtaatccggatattattctgctgcctacaggtgagaagataagccgtgtaagaactaatgaacagattacagctattaatggagttgcagaaggatttataacattttacaataacaggcttacggcggttattgtgcctattgataagagtgcaactgaggatatattcaagagacgtattgacaagtataacgagaaaaaaggttaccgctgggagattcagaagattgtgttaagaaaagaacctttgccaagaaagtctgatggcacggttgatgaggaagctgtatgcgagtttattggtgattaatattaattttccaccaatccagccgatatatattctataagttcataaagaaaggtgattagaatcatggatgattacagacagcagcagatagatgtacttaaggaagctgttccttacagcgagaagcttattggagcaatagagaaagtctcagatgaacttgcaggagttccttttccagagactcatgatgcggtgaatgttattattgaagggcttaactggctttttgaagtatataatggaactaaggatattattgaggctggggcagttgacgaggcagaagctaattctggcgttaaggagctttcagaggctgtaaaggctgatgatgatgtggctgtttctaaagcacttgtaaggcttagtacatttgttaagcagttacatgatgcaggaagcagtctgattaatgaataataagaaacataaaggcatccgccggtttatgtattacatgaaccagacggatgccttattttatattatggtagttagatatagtcattaaacatcatgcctgagtaggcagaaagattataagggtcattcacaggcttatgtggattcttataagcgacaatcttattgtttacatagttcatagggttgatggagatatcatcagcctttctttggattgatttcttgaatgaatccaaagcgttaaatacatcggaaagtgtgccgtcagaagcagctttctgaataaccaccttattaacttcaagcgaaccctcatcacttactgtaagtccattgcgttcaagctgtggctggtaagccttcattattcttgaaaattctttctttaacttggcattgccctcaaacttatcgttctctttatctgcggcgatggaaacaagtctgttgtagccggaaacaagttctgtaatgctttctgtgattgaatcagcatcatctttaagactgatggttgccggcttgtcagttgtattatgaaatgatattgcaaatgttttgttaattgttatgtcattcgaagcagatgagcgttcttctccattgacagaaaagattgcattgccaggatactgtgttacacggtcaagaccatatgtttcaatgaagttagtgttcttctccatagtaggctcatcaaaaccttccacgaaatcaggattgtctgtctgaatatcgttattaggcctgatgttaaatattgtaggcttgattacacttacacctgtcatgtctgattcaatgttcagcgcagtattgccgaggctgtcttcacttacagaagcattaagtccgatattggaacggttaataagtctggcaagcttgttctgtatgtcagaattgctctcttcttcatctacattaaactggaattcataggtcagattattgatgttcaaatcaaatgaataatctactggcttaactgtgcggctgttaggctgcaggtaatgtccggtattaatctggcttgttgcaagctggcggacttctatatcaaggcttgtatcatcggcagatgagctgtcgcctataaatgtggctgttaccgcatcaggattgtctgacactgctgatttcttaaataccatgccgtgaccgtcgcttcctgaaagctcattggcaatgttacttaattctctggcattctctttaaggtcgattgcatatttctgcgcagcctctgacatatctgccttatatgtaggagtctgactgttagatttcagaactctgccatatgtattctttaattgtgctttagtgtgtgtatcgtactttgagttagtcttatgtccatactgggcaagataatagctgtacacgctgctgatcataacagtcacctccttgtctgtaataatcggtagaaaatgtaaggaaatccatttccttatatatatcgtatgtttttgtacaaatattataatatgaagttcattttttgtcactatattttctttaaaaaagttgttgacgagttggaatgtactgtgctatattagaacggctatggaagcggtcttttttgcgtgcctgaatttcaacaacccaacattgattaggcgggcaaagaaaccaattggtgttttaacacctacaaaaataataattggaggtggaagttgtgcgagtaaagataacattggcatgtactgagtgtaaacagcgcaattacaacatgactaaggaaaagaaagctcatccagacagaatggaaacaaagaagtattgtaagttctgtaaatcacacacattacacaaggaaacaaagtaattagtacagtgaggagtatttcatgggtgatactgtaaaagctaagaagcagaaaaagaactggttcaaaggtttgaaagctgaattttcaaaaattatttggccagaccgtcagtcgcttactaaggaaaccgtagctgtattggctgtgtccgtattattaggtgtaatcattgcagttgtggatttaattgtccgctttggaattgagttcattgtaaaataaggaataggtgattgtatggatgacgcaaaatggtatgtagttcacacttactcaggttatgagaacaaggtgaaggctaacattgagaagacagttgaaaacagaaatcttcacgatcagattcttgaagttatcgttccacttgaaacagtagtggagattaaggatggctctaagaaagctgctcagaagaaaatgtttcctggatacgttcttgtgaagatggtaatgaacgacgatagttggtatgttgtcagaaacacaagaggtgttacagggtttgttggtcctggatcaaagccagtaccacttacaccaacagaaattaagaatctcggcataagccttgaggaagaacaggaagttaagcctgttatccagttcgctggcaaggtcggcgataaggttatgatcctctctggtgcatgggaagatacagttggtgagattaccaatattaatgagggcaagcagtgccttacaattaatgttgagatgttcggtcgtgaaacaccggtcgagattgatttcacagatgtgaagttattgtaagaagcagtcccgatcctgggacgtgggagaccagaatgaatttactgtgtaaattcattcacaagaattgcacgatggtcaattcttgaaggatggatagcagggtaatattatgatggtcgccaattaccacatttatttttaggaggtgccaaaatggcaaagaaagtaacaggatatattaaattacagattcctgccggcaaggctacaccagctccaccagttggtccagcacttggtcagcacggtgttaacatcgtagaattcacaaagcagttcaatgctaagacagcagatcagggagatcttatcatacctgtagttattacagtttatgctgatagaagcttcagctttattacaaagactccacctgcagcagtacttcttaagaaggcttgcaacattaagtcaggatcaggcgtacctaacaagactaaggttgctactattaagagagcagaagttcagaagatcgctgagcttaagatgccagatcttaatgctgcatctatcgaagcagctacttctatgatcgaaggaacagctaagagtatgggtatcgttgtagaagactaatctacatttgattcatgattattgtgggaggaaagatagaatccttccgatattaccactaggaggtttataatgaaaagaggaaagaaatacgttgaggcagccaagaatattgaccgccagacattatatgaagcagcagacgctatctcattagtaaagaagaacgctactgctaaattcgacgagacaatcgaagcacatatcagaacaggttgtgatggacgtcacgctgagcagcagatcagaggagctgttgttcttccacacggaacaggtaagactgtacgtgtattagtatttgctaagggtgctaaggctgatgaggctcttgcagctggagcagatttcgttggtggcgaggagcttattcctaagatccagaacgataactggttcgagttcgacgttgttgttgcaactccagatatgatgggtgttgttggtcgtcttggtcgtgtacttggtcctaagggattaatgccaaatcctaaggctggtacagttactatggatgtaacaaaagctgttaatgatatcaaggctggtaagatcgagtacagacttgacaagactaatatcattcacgtgccaattggtaaggcttcattcacagaggagcagttatcagacaacttccaggctattatggatgcaatcgttaaggctaagccatcttcacttaagggagcttatcttagaagtgtagttctcacttctactatgggacctggtgttaagttaagcacagccaagtatgtgggttaatcagatttttgattaaaaacggttgacattaatatattttgatagtatactatcagcttgtgagcagcattttgctgttaacataatattttgccgtagacagcaggtccggattcagcattactgatgatggttaaaggtaacacgcctaccgaggatttaaggatttgattaattattccctctctgtcgctggcagagagggttttgtttgtagggaaactatagacgaataatcttcacttaggcaaaatcgcttctatatgaagcaagaatctaacaggaggtaattattcatggctattttaaagaatgtaggccttaagacatctactatcgatgagattaaagataactttgacggcgctcagggcgttgttgtagttaactacagcggtcttacagtagaacaggatacacagcttcgtaagcagttaagagaagctggtgtggtttataaggtttataagaacactttagtaaagagagttgttgctggaacagagttcgagccaattactgatactcttgaaggaactaatgctattgcattctgcaagacagatgctacagcacctgcaagaatcttagctaactttgctaagacagctaatgctcttgagttaaagtgtggcgttgttgaaggaacattctacgatgcagcaggtatcgctacaatcgctactatcccttcaagagaggaacttctttcaaagttacttggaagtatccagtcacctattacaaactttgctcgtgttattaagcagattgctgagaagaacgaggaagttgcttaatcagtttaacactgaattaactatgaaagcagcatagatgctctttcaattttagaataatattaaaaaggagattataataatgacaacacaggaaatcattgaagttattaaaggtttatcagtattagagcttaacgatttagttaaggcttgtgaagaagaatttggtgtatctgcagcagcaggcgttgtagttgcagcagcaggtgctggcgcagcagcagctgaggagaagacagaatttgatgtagagcttacagaagctggagatcagaaggttaaggttatcaaggttgttcgtgaaatcacaggtcttggattaaaggaagctaaggacgttgttgatggcgcacctaaggttgttaaggagcaggcttctaaggaagaggctgaggaaatcaagaagaagctcgaagaagttggagctaaggttactcttaagtaattcacttgattgttctaatgaatataataagaaagacagcgggccttcacggctcctgtcttttcttttttctataaatcacatctttattttattatgccagctatggcagaaatactattatctttatacaattctatatattcgtggaaattttttaaaaatcccttgacatatatatatctttgatgtattatggacaatgcactattgtggtaaattgtgcttattctttgcacatttactgataatgtaatatattaatgtgaagaaaactaaggggtgaaacgtcaatggagaaaaacagattacgcccaataacgtcgggcaaggcaatgcgtatgagtttctcaagacagaaagaagttcttgagatgcctaaccttattgaggtgcagaaggattcttaccagtggtttttgaatgaaggcttgaaagaggtctttgatgacatatctccaattgcagactataatggaagattaagtctggaattcgtagattttgcgttatgtgaagacgaagttaagtattcaattgaagagtgtaaagaaagagatgctacatatgcagcgcctcttaaggttacagtaagacttcataacaaagagacagaaagcatcagcgaacatgagattttcatgggagacctgccattaatgactaagacaggtacatttgtaattaatggtgctgaacgagttattgtcagccagttggtacgttcacctggtatttattatgatatacagaaagataagtatggtaagattttcttgtacagctgtcaggtaattcctaacagaggtgcatggttagagtatgaaacagatgctaatgatatattctatgttaaggttgaccgtaataagaaggttcctattactgttcttatcagagcattaggatttggtactaatgcggagattcttgatatttttggcgaggaacctaagcttcttgctactatggagaaggatacttctactaactatcaggaaggtattcttgaactttataagaagttaagaccgggagaaccattatctgtagagagtgctgaagcacttatttcaggtatgttctttgacccaagaagatatgatcttgcacacgtaggaagatataagtttaataagaagctttctttcaagagcagaattacaggacaggttcttgctgaggatgttgttgatgagaacggaactgttattgcaacagcaggtgagaagcttacaagagaatcagcacaggctattcaggatgcagctgttccttcagtattcattactgtagaagttaaggctgctgatggtacagtatctgacagagttgttaagattctttctaaccgtgcggttgatattactaaatgggttgatatcagcgaagaagaagctaaggagcttggtgtaacagagtatgtatactatcctgttcttgcacagattcttgctgagaatgaatctttagaggatattaaggaagctattactaagaacattgctgaccttattcctaagcatattacagtagaagatattcttgcttctattaattataatatgcaccttgaatatggtgttggtactaaggacgatatcgatcaccttggaaacagacgtatcagagctgtaggagagcttcttcagaaccagttcagaattggtatctcaagaatggaaagagtggtccgtgagagaatgtctacacaggatcttagtggaatatctccacagtcacttattaatattaagcctgtaacagctgctattaaggaattcttcggaagttcgcagttgtcacagttcatggatcagaataaccctcttagtgagattactcataagagacgtctttcagcccttggtcctggtggtctttcaagagatcgtgcaggtttcgaggttcgagatgtacactatactcattatggtagaatgtgtcctatcgagactcctgaaggacctaacattggtcttattaactctcttgcatcttatgcaagaattaatgaatatggattcgttgaagctccttatcgtattgtagataagtctgatcctaagaatccaagagttactgatgaagtacgttacttcacagctgatgaggaagatgatttccatgtagcacaggctaatgctgagattgatgagaatggttatttcgtaagaaatactgtatctggacgttacagagaagaaacttctcagttcgataagagccagattgatcttatggatgtatctcctaagatggtattctcagttgctacatcaatgattccattccttcagaatgatgactgtacacgtgccctcatgggttctaacatgcagcgtcaggccgtacctcttcttatgacagaagctcctgttatcggaactggtattgagaataagactgctgttgactcaggcgtatgtgtagttgcagaggctgatggtgttgttctttcttctgaatctaacaagattgttatcagagaaaaggatggcaaggcgcgcgaatacaagcttactaagttctcaagaagtaaccagagtaactgctataaccagagacctattgttttcaagggtgatgaggttaaggcaggagatgttattgctgatggtccatctacatctaatggtgagattgccctcggtaagaaccctcttatcggtttcatgacttgggaaggttataactacgaggatgctgtacttcttagtgagcgtctcgtaagagatgatgtgtatacatctattcatattgaagaatatgagacagaagcaagagatactaagttaggacctgaagagattacaagagatcttccttcaacaggttcagacgctgtaaaggatcttgatgagaatggtattatccgcgttggtgctgaggtaagagccggagatattcttgttggaaag

SEQ ID NO: 1012 - DNA, 41684 bp, unidentified
  source 1..41684: mol_type = unassigned DNA
gcgggggtgtttgtcaagcccaccgggccgtgttttcctgcctctgttacccttttgccattttattttacattttgcacccttgacaatcctacgccaaagcaccataataaatactgaatctgtataaaagaaattttgagaggaaagaggtgcggcaccatgcgcgtgattgccggaacagctcgcggcaaaaatctgcaggccctgccgggcgaggacattacccgcccgaccatcaaccgtgtgaaggaggccatgttctccagcgtgcagttcctggtgccgggggcacgggtgctggatctgttcgcaggcagcggccagctgggcatcgaggctttgtcccgcggtgccaaaagctgcctctttgtggaccgctccgccgaggcgctagccgttgtgaaggccaactgcaaaacggcaggggtggaccgccagagtgatatacgccagggcgaggccaagagctttctcgccaacatccgcgggccgtttgacttggctctgctggacccgccgttccaccatgataccgtggctgccgtgctgccgctgctggccgctaagatggcccccggcggggtcgtgctctgcgagaccgagcgcgaggccgacctgcccgagcaggcgggcgctctgacgctggtgaagcagtacaactacggcaagatcaaggtcagccgctatgagagaggggaagaggtatgaacgttgaagaactgttggagatgatggaggaaacgctggaggccgggacgatagttccgttctcctcttccaagcgcatggtcgatgtggaccgtatgcgcgatattatcgatgaggtacgcaacaacctgcccgacgagatccgcgagagcaaaaaaatcgtgaatgaccgcgagcaaatcatgcagaacgcccgcattgagtccgaaagcatcattcagcaggcagaggagcgcgcccgcgtcctgaccagcgagcaggagatcgtcaagcgcagtcagcagcacgcggcggagatcctgtccgctgcccagaagagcgccaaggaactgacccgcaaggcgaccctgtactgcgagacgatcctgaagaactccgaggaggtgctgggccgaagcatggcggacatcaagaacacccgcatgaatctgcgcagcgccgcccgccccaagaataacatgcccaagtaaaaaatgcagaggtgttgttattcacggcacatttctgcccatggcaacacaatatgcaaaaaaaacaacgccgcaccgtacaatatggtgcggcgcttttctatgcccgggggcaggaattttgccgcgtgcgcatttgctgcaaactgctgacctgcatcccgatccctttgtacaaactgtgaaaaatcaattcatggcgcagtttttccccgcctgcccttgctttttgctgaataaaatggtactattattttaccacaggtgggtaattgtggtgtgaataacaacaaaagtggggaagaatgggtagttttccacgttctccacagagttattaacaaactgaacgcagcgacgtaaaaaatcttgccaaagatttgtgcagtatgacgaagggaggaaaagccggatgctcgtcggtcagtatgattacgcaattgacgcaaaagggcgtctgaactttcccgcccgcttccgggacgcgatgggggagaccttcatcgtgacccggtggctggatcactgcctggccgccttcccggcagaggagttcgaaaaggtcgccgccaaaattgaggaaaagggcctcgtcaagggccgcagggtcagccgtatgctctacgcctccgctgtcgaggtcaccccggacaagcagggccgcattcagctgcccgccaagctgcgggagtacgcgggcctcgaccacgatgtgaccatcatcggcagccgcagctttgccgagatctggaacaccgaggcgtggaacgccaaccaggaaacgagcgatgaggatttcaccgctgcgatggaagaccttgacttttaacaaaacaggacgataacacatggaattttcacatatccccgtactgctgcagccttgtctggacgggctgaacatcgaccctgccggtatctatctggatggcaccgccggcggtgccggtcacagcagagaaatcgccaaacgcctgaccacaggacgtctgatctcgctcgatcaggacccggatgcggtggcagtcgccaccgaaaggctcaagggtctgccggcgcaggtggtgcaggtcaatttccgtgaggccgcccgcgtccttgcggagcttggcatcccggcggtcaacggggccctgctcgatctcggcgtgtccagccaccagctggacgacgcggcccgcggcttctcttaccatgccgacgcgccgctcgatatgcgcatgagccagcagggccccaccgccgcggatctggtcaacacgctggatcgtgaggagctgacccgcatcctgcgtgactacggtgaggagccgtatgcctggcagatcgcgggcaaaattgtcgccgcgcgggcggagcagcccatcctgaccacgctgcaactggccgagatcgtcgccgctgccgtgcccccggctgagcgccgcaaggcgaagaacccggcgcgccgtaccttccaggccatccgcattgcggtcaactccgagctggacgccctgaacgaggggctcgacgccatctttgactgtctggccccgggcgggcggctctgcgtcatcaccttccacagcctggaggatcggctcgtcaagaacaagttccgccgctgggcacagcgctgcacctgcccgccggagcagcccatctgcacctgcggaggtgtggccaaggccaagctgattacccgcaagcccattgaggctgacgccgcggagctggagaccaaccgtcgcagccgcagcgccaaattgagagtgttggagaaagcataagaggcattattcatgacaactgttttgctgcacgagggctcggcagcaccgaaactggagcccctgccgcgcccgcaggtgcgtgcggtgcgcggcggcaaccacggcctgaaccgcgtccgccatgtgatgcggactgccgtgatcgtgctgatccttgccgtgtttggcgggctggcaatcagcagcctgatgagcggtgcaacgctgatggaactgaacgcacaggtcgatgaggtcagcgtccagctggccgaggcccagagcgaatacgactacctgaacacccggatgaacgacatcacgagccgcgccagtctgcagcaggtggccgagggtgagctgggactggtcaaggccgatcccagccagatcacctacgtccagctggaggaccagagcatcattgagcggaacaccggcgccgcgggccgcctgttggatgaggtgcgcacggcagcgctgagcctgctggacagtctgaacccgtaaaacaaccaaaaatatgcagctacgagcctttttgctgcacggccttgctgccgtcggcaaaaaggcttttgaaataacaaggtgtatccatgacagagcaacgacccaaccattccccccggcatcgtccccgggcaagcaagggcataaaatactggacgctgttttgcatgatagcatttatcctcgcctgctacggcgtgttggtctaccagctgtatgtgtggcaggtgcgtgatgccgagagctaccgcgccgaggctgtggcccagcagctgaaggacacgacgctgcccgctgtgcgcggctcgatctacagcgccaacggcaagctgctggccaagagcagcacggtatggaacatcgtggccgacccgtcctccattttagagagcggggcgacggaggcccagatccgcacagcggcagagcacattgccgagctgctggacgacggcacaacggcggatactgtgtacaaggcgctgacggcgtccaacaaggataccggtgagccgtaccagtaccgtgtggtgaaaaagggtgtcgaaaagcccgtggcggatgctatcctggcctatgcagacagctaccgcctcaaggacggcgctgcggtggacacgagcctgcagaccgaggaaaaggaggacaagaaggacgacgaggccaaaaccagcaaggcaacccgtatcctctacctgaccagcgaacaggcagcctcccgcacttacccctatggggagttcctggcctcggtgctgggcttctgcaacgaggacggctcgggtgcctacggactggaaaaatattacgacgagacgctggccggtacgccgggccgcagcgtggccgaaacggacgcctacggtgacccgctggccagcggtcaggccgacgtgcatgaagccatcgacggcagcaacctgaacctgaccatcgacgagaacgtacagtccatcgtcgaggagtacctgaccgaggcgatgagcacctttacggtccatggccgcggcagcgccattgtcatgaacgtcaagacaggtgcaatcctggcaatggcgtccctcgagcagtttgaccccaacgaccccaagacgatcaccgaccccaagatgaacgagatcctggccaaaacagagatcgacgcggaggacattgactggctggaaagccgtctgggcgagaaggccgtcaaggacatcattgcagacggaatcatcagccatgaaaagacgacgaacgagaagggcgaggaggtctccagcgaggctactcagctgcagggtatgatgcgcgaggctcagtggaagaataagaacattaccgagctgtatatgcccggctcggtgttcaagctcatcacggcctcggcagggctggactccggtgttatgagtgcggagcagaccttctactgcggcggcagcctgaccgtcaacgagggcagcgagctgtgggagcacacctaccgctgtgccaacggcgaggtccactatgaacaggacatggcaggcgcgctgaaccacagctgcaacctctggttcattcaggcggcagagacgctcaagccgcagatcttctacgactatatccaggcgttcggcttcacccagcccaccggcatcgacctgcccaacgagacccgctggaccagcgtctacaacgccgagcagatggcagaggtcgatacaaacctgtacacggcggccttcggccagaacgagtccatcaccccgatgcagatggccaccgctgtagcggccatcgccaacggcggctaccttgttacgccctatgtcgtggattccatctctgacaaggacggcaacattatctcccagaccgagacgaacatccgccgccaggtcatctccgaagaagtcagccggcagctgctgtccatgatggaaaacaacgtccacggggcaggggactaccactcctgcgccaacgcctacgtggcgggctaccgcatcggcggcaagtccggtacggcagagcgcacagaccgccatctgcgcggcgacggcgactactataaaatgatgagctttgccgctgtgctgcccatcgatgatcccgagatcgaggttttcgtcctgctggatgatccgcgctgggtcaaggactatgccagccaggtcgtggctcccgtcgtcggcaacatcatcagcgagatcgcgccctatctgggcatcgagcaggacgctgactacaaccccaccggcactgtgaccgtgcagacctgcctgaactacacctggacgaacgcgcaggtcacgctgaaccgcctgggcctcaagcataagctgatcggccccagcagcggcaatatcgtctaccagtaccccgtcggcggcagcgtggttcccgcaggctccaccatttacctgtacacggccaccgaccagaactcgatgaccacaacgcccgacgtcgtcggcaagaccggcacctttgccgagcagatgctcaaggccgccaacctgaacgtgcagttcgccggcgacagcagcggcaaggtcgtggcgcaggacgtcgaggccggaacctccgctgcctacggcacgatcataacgctgacgatggacagcggagaggataccaccaatgacgccccgacggtgaccgaggagatcgacccggcaaacgaggaggggtaagcatccccgcagggacacccgggcttttgcgaaacgctgcatttctgtataggaggtctttttcatgcaaaccattcctgccaatcaactgctggccggactgacgctggccgagccggtcgccatccgcgccgttgtgaccgacagccgcaaggtcgagccgggctgcgtttttgtctgcttccccggcgagcgtgttgacggccatgactacgccgccggtgcctaccggagcggcgcagaatatatcgttgccaaccatcccgtcgagggcgtgcctgcggaccgcacggtcattgtgccggacagcggcaaggccatgatccgcatggcgtccaactaccggatgctgttcaaccccagaatgatcggcgtcacgggcagcgtcggcaagacgacgacgaaggagttctgctacgcggtgctctccgccttcggcaagaccctcaagaccgagggcaaccagaacaatgacatcggcgtgcccaacacgctgttccgcctgaccgacgacaccgagtacgccgttgtcgagatgggcatggaccacgcgggcgagatcgagcgtctgacccgctgtgcccggcccagcgcgggcatcattacgatgatcggtgtttcgcatctggaaaatctcggcacgcgcgagaatatactgaaggcaaagctggagatctgcaccggcctgcccgacggcgcaccgctggccctgaacgcggacaacgacctgctgcccacggcaagcatccccagccgcctgcggccggtctggttcggcattgacgccgcgaatgccgatgtccgcgcggtggatgtcgtcaccggcgcaaacggcacgaccttcaaaatcgtcgatacacagtacggtacgttcgacgccgccatcccgacagcgggcatccacacggtctacgacgcgctggccgcctacgccgccgcgacccgcctgggtctggatgctgcccgctgcgctgccgcgctggcgacctaccggacgacgggcatgcgccagcatatcgtggaaaagggcggcatcaccttcattgaagactgctacaacgccagccccgacagcatgaaggctgcgctctctgtcctcaaggcactgcccaatgcccggaagatcgcgctgctcggcgatatgcttgagctgggcggtgcgagcgaggaggggcaccgccataccggcgagtgggctgctgacgcgggcgttgatgcactcatcgcctacggcccgcgcagcgccgccatggccgaggccgcaaaagcgcgcggggttgcggcggtgcattgccaaacggcggaagaagtgctacaatatgtacggcaattcgtgcgccccggtgacgctgtgctggtcaaggccagccacagcatgggcctggagcagctgctgcaggaatactataaggaattgccgcaggggtaagcaccccaacacacgtttggaggaatcaacggcatggagcaaatctcatccctgttggcggcggcagccgtcggcggctttgccatcacggcggtggcgggcaaattcatgatcccggcgctgcaccggctgcactttggccagaccatccgcgaggaaggccccacatggcacagcaagaaaaacggcacccccaccatgggcggcctctgctttattctgggcattctggccacgctgggcatcgtctgggtcatgtacagccccaagctgccggaggtgcttggtatgccgcagctgcaggccggtatgctggtgctgtttctcgcgttcggctcgggcctcatcggctttctggatgacttcattaaggtcatcaggcatcgcaacctcggcctgaccgaggcgcagaagatgattttgcagatcgcgctgaccttcgggttcatgttcggcctgcacagcctcgggctgctgaccacgcaggtccagttcccgatttttgggctggtggacatgggcttgctctactatcccatcgctttcttcggcatcatcttccttgtcaacgctgtcaacctgacagacggtctggacggcctgtgcaccggcgtgaccttcgtgtcgatgatcggctatctgctggccggcagtctgctgggctttgtacatgtttcgctgatcgccgctgccacggcgggtgcctgcgcgggctttctggtctggaacttctacccggccaaggtctttatgggcgacaccggcagcatgttcttcggcggcatcgttacggcgctggcctttgtgatgcagcgccccgagctggtgctctttttcggcattgtctacatctgggacgcgatgaccgtcgtcatccagcgcacgtattttaaggcgacccacggcaagcgcatcttccgcatgacgccgatccaccacgcctttgagatgcgcggctggcgcgaggtcaagatcgacggcttttttgcgctgattgccgtcatcggtgtggcaatgggaattttttacatctgtgtggcataagcagcggggccgggcctacccggcctctgcctgtttctgcccctaagggaggtgaccgcccatgagcactgccgtgagcattgtgcgtacactgctgggccttttgtttgaccataccatcggaaatattgtgcgcatggtacccatcatacgcctgcccaagctggagcgggggccggtctcccggggctttctcgccctgctgctgggcattttgttcttcgggctgacaatgcttttttcggccagttattccagcgcttacgccaccagcggtaaactgtacagtatcattaaaccgcaggtcatgattgcaattgtagggctgttctttatgtgggtcctgtccaacatcaactaccgcgcgctgcgtctgatgagtgagagtctgtacatcatcaccgttgtgctgctgatcctgacgctgctcagcccggaggacaccaacggcacctaccgctgggtgtatctgccgggcggtgcctccttccagccgtctgagctggcaaaattctcgctcatgctctggacggcagatatgctggaccgcgactatgacaagaagaataggctgtggtacggcgcgataaagcctgcgctgccgctgctgctcatcctgtatttgctgcacaaggagtcgcataactccggcatgatcctgctctgcctgatttttgccacgatgctcatctgcaccctctcgcccggccgctggctgctgctgctcattccggcgggtgcagtagccggcagctacttcctgaaggggctggccagcggggaaggctacgccgcgggccgtatggacgctgcctggggccttgcgccgctggatactgccggtatggggtggcagacccttcagagcatctatgccatctccacaggcggcatgttcggcgtgggcatcggcgcgagcgtgcagaagcaccagtggctgccctacgccgaaaatgactttatcttcggcgtcatcggtgaggagctgggctttttcggctgtgttatcctcatcggtgcgtttgcggtgctgctgatcatgggcattatgatcgccctgcgcgcgcccgacctgtacggcacggtgctgggcatcggcatcatctcgcagatcgcctggcaggtgtttctgcatatcgccgtcggcacggcactgatccccaacaccggcatcagcctgccgttcttctcctccggcggcaccagtctgctgctgctgctgagcgagatgggcgtgctgttgagtatctcgcgcgccggaaatgcccgggaacagcgcctggcagagcagcaccgcgccgagacagaacggatgctgcagcgcacccgctaccgcagcagagccgcgcggtaagggggacgcccggcacccgcggcacggcgggcacagcctatattttattctcatggaggtccatcatgcgcgttttaattgctgccggcggtacagccggtcacatcaacccggcgctggcgattgccggtgccctgaaggccgcggacccgacggcggagatccactttgcgggccgccgcgaggggatggagtacggccttgtcaccaaggcaggctaccccttccatcacattgagatcaacggcttccagcgccatttgagcctggaaaacattggccgcaacatcgtagccatctggcatctggcgctgtccggcccgcgcacccggaagattctgaacgaggtcaagcccgaccttgtcatcggctgcggcggctacgtcagcggacccatcgtccgcgcggcagcccggcgcggcatcaagacagccatccatgagcagaacgccttcccgggcgtgaccaacaagctgctggcgaaggaggtcaacattgtgctggccgccagcgcggacgcagttgaaaagctcggcgcaccggaaaaaaccaccgttgtgggcaaccctgtccgccccgaggtgctgaccgcggaccgcgccgcagcgcgcgccaagctgaacgccggaaaccgcaccgtgattttgagcttcggcggcagtctcggtgcggaccgtatcaatcaggtcgtggccgacctctgcgcctgggaaaagcagacgcatcggaacgtgttgcacctgcacgccaccggcagccgcggcgtcaagctgtttgaagggctggaaaaggaaaagggctttgcccccggcgagaaccttgtcgtgacggagtatatcaacaacatgccccagctgctggccgcggcagatctcgtcattgcccgctccggcgcactgacgctggccgagcttgaggccgtgggccgcgcatcggtgctgatccccagcccgaacgtggccgaaaaccaccagtattacaatgcccttgagctgcaaaaggccggtgcggcagtcgttatcgaggaaaagaacctgaccggtgacggtcttgtcaaaactgtcgagaccctgctgacctcccccggcaagctggccgagatgggcgccaacgccaagaccctcggcaacccgcacagccttgatttgattaccgaaaagctgctgaagctggtcaacggctaagcaaggctgcatacaccctgtaggggcgaacatcgttcgcccgcccgctgcgacgagcgtcgccgggccacaccccgtaggggcgcattctatatgcgcccgcccaacgtaccatccacacacgggcagccgccccaaaattcaccggaaaggagccgcttatggaccgcaaccagcgcagccgcaggcaaaaatccgcaaacggctcctacgcccaacagtcccgccgcagtatgggcagccgcttgggccttgaaaaaaggaacgccccgcgccccaaggcaccgcctgaaaaggccgcacctgctccccacgcgcccccgcggcagcgccctgcgcaggagatcaatccccagaaggcaggctaccgccccggcacgccaaggcgcacgcgccgcgtcacacaggcggagatcatacgggcaaagcgccgccgccgtctgctgggggcgctcggcgtgctggccgtgctggccgtgggtgcgtttgtgtcgatcaaccttctgttcaaggtcacgatcttccgggtagagagctatgaccgctcccagcccgtcgataccggcatctacacgtccgacgagctgatcgaggcgctgggcatcgagaaaaactccaacctgttcgccttctccaccgcggaaaagacccagcagctggcgcttcagttcccgtatttggagcgtgtcgctgtggagatccaactgcccgccgcggtcatcatcaaggtcgagcccgccacggagcggttcgcctgtatgtactccggcgggtggatggtcttgagcgactccctcaaaattctgcgcaccgacgtcagccagccggacggcctgattctgctgaccatgtcgctgcccacagatttctcccccgtggtggggcagaacatcgagcccaagagctataactcactccttagcgagacccagcaggccacagcggagacagcgggcctgcaggccagcgcactgcaaacgctgaccgaaatgcgggacggcctgcaggagaacaacctgtttgacggcacgacggcgctgaacatccaggatctgagtgatattgagttcacctaccaaaaccgagttcaggtgctgctgggcagtgagacgaacctcgcctacaagctgcgactggccgctgccgcgctgaccgacccggaaaagggtctggccgccggtgataagggcgtgctcgacatctcgacccagcgcagcgacggcgacatccgcgcctacttcgcccccgatacccccgaaccgacacccaccccggagccgaccacgtcccccgaggaggagaccgaccccgaaagccccacagaataaccccaacgccccgacaaaccgtcggggcgttttttgtacaagccgacagaaaaaattgtataaaaaacaccccgcagcgccttacacatgagctaccttggggattgttgttgttcaccgattcagaaaaatccgcaacgcacatgtgtctaacacatccaaattctttctccgtttgtgatgaattcaaacaggcgatatttctgcgcattatcggtcggcaccagccgaggccctgcccgttgcaaagttgccgtctgtggtcaaggtggcattgtagcagttgatggcagcagtgtcgtgttcgtacatcgtggcgagagtaagcgaaaaccaaaaagggcagagcgaaattagcgcggatgctatcagactattgtggagaatgcaggaaactatattaagataataagcaaaaaatcaaggagttaacataaagtagtcataaaattgcttgaaagtatgcgacgaatttgatttaatcagtattagaagaagataatagaaaggggatgtgtagtgcatgttgtcgggaaaacaaattgccgaggcaagaaagcgaaaaggactaacgcaagaggccttggcggcagaacttggagtatcgagacaaacgattgcaaaatgggaacaagaaatttcaacacccagtgttacaaatgcacatagactgatagatattctaggcctacaggaaatggagaataaatcgtctaccgaagatgaaggcaatgcaagaactatttgtaaaaagagattaacaaagagattgttgattgaactttgggcagtatatgttgggatagcatttctctgctttttttctattggaattgtggcattgttttttatccctgcaatatcggttgtcctaatattagttgctattgtagtgcaggaagtaaggggaaagaagacagattcaccgatgaagattcttctcggcggaatatgctttattgggcttgccatactggcagtagttgctatacttgcaagtgggtttgttctaagagaaaattatcaacataaagctttttattctgttcctgctatacaactaaaaaaatattcggcaattaatgagtggattgatgaatgcaaaacgataggacctgatatttatgggcaatgtattgaattgccgtcagataagacaatctgtctctatattgtatatagacatcaggtgacggacgcatcggatgcaagcctcgtttcagatccgctacatatgcgattcattgcaaaataccgtggtggtactgaatatgatggggtggatttgtattttctccaagggagaagtagttatcagatgcttttctctattgacggaagtgaaccttattataacagtatggcaactgttaatccaatgcttatagatgatgtgaaggcactatttaacaatctgcaaggagatgaaaaaaatgcttaaaaaggttaaaaagatagttgcactgatgatgtgaactgcaccccatttgttagacagtatggtatactatctaacaagtggggtgttttgctatgccaaaaggagtaccaaacaaacgatatacgccagaattcaaaaaatgaacagcaccccatttgttagacaatatgatatactatctaacaagtggggtgctgttcaacaaaagacgctgcggggcttttactatgttgtaggggtcgatgcttgtcatcgacctgcgggcggatgcaaacattcgcccctacaatttacgatgcaatcaatcagacgttcagctccacatgctggccgacgtcctcggcgttggcgtccagcacgggctggatgacatcgcgcaggaactcggtgacctgctcggcgctgcggcccgtaaaggcttcgggggagagctcggcctcgatttcctcgcgggtcaggccgaacgcagggtcagcctcgacgcgggcaatcatgtcgttgggcttgccctcctgcttgacaacggcagcggcggccacggcgtgctcacgcagacgctcgtgcagctcctgacggtcaccgcccttcttgacggccttcatcatgatgttctcgcttgccatgaacggcagctcggccatgacgcgggcacggacgaccttcgggtagacgaccagcccgtcggagacgttcagcaggatgttcaggatggcgtcagcagccaggaagccctcggccatcgcaatgcgcttattggcggagtcgtccagcgtgcgctcaaaccactgggtaccggcagtgatggcggggttcagcacgtccaccatcaggtagcggctcagcgcgcagatgcgctcgcagcgcatggggttgcgcttgtagggcatagcggaggaaccgatctggttcttctcaaacggctcctccatctccttgaagttcgccagcaggcggatgtccgtcgccatcttcatggcggactggccgatgcccgccacggcggacagcacattgtagtcaaccttgcggctgtaggtctggccgcagaccggcacgaccttggtaaagcccatctgggcgcagacgtcggcctcgacggccttgatcttggcggagtcgccgttgaacagctccacaaagctggcctgggtgccggtggtgcccttaacgccgcgcagcgccagctgggagacctggtggtcaagctcctccaaatccatgtacagctcgttcatccagagcgtggcgcgcttgccgacggtggtcagctgcgcgggctggcagtgggtgtaggccaggcagggcatggccttgtactcgtcggcgaacttggccaaatttgccagcacgccgatgaccttcttgcgcacgagctgcaggccctcgcgcatgatgatgacgtcggtgttgtcaccgacatagcagctggtcgcgcccagatggatgatgccctttgccttggggcactgcaggccgtaggcgtagacgtggctcatcacgtcatggcggacgagcttctcgcgcgcaatggcgtcctcatagttgatgtcgtccttgtgcgcctccaactcggcaatctgctcatcggtgatggccaagccctgcttctgctcggccttagccagcgcgatccacagccggcgccaggtgcggaacttgttgtcgtcagagaagatgtactgcatctcatccgacgcatagcgggtagagaacggcgaaatatatttgtcgtgttgtgccattgggtcaaatcctcacaatcttttaagctgatagttccagtatagcagaaactttccgaaatatcaaagcttgaaataattcacgccgccctcaaagatcggctggtatttgtcaccggtaacgttcttatagagctgctcgccgctgcgctcgctgtggcccatcttgccaaagacacggccatccgggctcgtgatgccctcgattgccagcacggagccgttcggattgtagcgcatgtccatcgtcgggcggcaaagcaggtcaacgtactgggtcgcaatctggccgttgtcgatgagctggttcagcagctgctcgttgcagacaaagcggccctcgccgtggctgatggcaatcaggtgctcgtcgttgatgtcgcatttgctcagccaggggctcttgttgctggccacgcgggtgcgcaccagcatggactggtggcggtggatcgtattaaacgtcagcgtcgggtcgctttcggtgatgggacggatctcgccgtaggggaccaggcccagcttgatgagtgcctggaagccgttgcagatgcccagagccagaccgtcgcgctggttcagcagacggttgactgcgtcggccaccgacggattgcggaagaacgccgcaatgaacttggcgctgccgtccggctcgtcgccgccggagaagccgcccggcagcatcaggatctgcgcctcgtccagctccttcaccagcgcctcgcagctctcggccacgttggcgggggtcaggtttttcagcaccagaacatgcgggtcaccgcctgcgcggcggaacgcgcgggccgtgtcgtactcgcagttcgtgccggggaatacggggatgacgacccgcggcgtcgccaggcgcacagagggagccacgcgcttgttggcggggcagtcatgctccagtgcgggaacgaactcaccggccttgcggtaggggaataccggctcgagcttttgctcccacagctcctgcagacgggccaggtcaatggccttgccctcggcctccagcgtgtagtccacggtggtgaagccgaggaactcaccggcggaggcatcaagcagctccagaatgaccgcgccgtaggcgggcttgaacagatcgttcaggtcgatgtcattggacagctgcagacccacatggttgccgacgcacatcttgaacagtgcctcggccacaccgccgtagcccggcgtggcggcagccagcaccttgccctcgtcgatcatctgttcgacggtcttgtaaatggaaatcaggctgccgatctcgggcagaccgttcttgtagttggggcgcaggatgacaacggagctgttggccttcttgaactcggggctctgcacgtcgcgggtgttgccgatggccgtcgcaaaactgacgagcgtcgggggcacgtccagtccctcaaagctgccggacatcgagtccttgccgccgatggacgcaatgcccagacccatctgggcatccagcgcaccgagcagggcggccagcggcttgccccagcgctcgggcttatcgttcatatgctcaaaatattcctggaacgtcaggtacatatcctcatggtggaagcccgcgcagaccagcttggtcacgctctcgaccacggccatatacgcgccgcggtaggggtcagcctcggtcaggtaggggttgaagccccacgccatgccggagcaggtcgtcgtctcgccgtccacgggcagcttggcggccatggccatcgtcggggtcagctggtacttgccgccgtagggcatcagcacggtggctgcgccgatggtggagtcgaaccgctcgcccaggcccttttggctgcagacgttcaggtcgctgaccatagattccagcttctgctcaaacgttgcaccggcaaactggggctgccagacatggcccggcaggatgtgcgcatcagcgtggcgctcggcaccgttggagttcaggaactcgcgggagaggtcaacgatggtcttgccgttccagacttcgcgcatccgcttttcctcggtgacggtggcaacgatagttgcctcgaggttttcctcggcggcgtacttcataaaggtctcggcgtcctcggcagcaacggccacggccatgcgctcctgactctccgaaatggccagctcggtgccgtccagaccctcgtacttgcgggtgaccttgttcaggtcgatgtgcaggccgtcggccagctcaccgatggcgacagacacaccgcctgcgccgaagtcgttgcagcgcttgataaggcggcaggcgtcctcgcggcggaacaggcgctgcagcttgcgctcgatgggtgcgttgcccttctgcacctcggcaccgcaggtctcaaggctcgtcagcttatgcgccttggaggaaccggtggcaccgccgacaccgtcgcggcccgtgcgtccgcccagcaggatgacgacatcacccggggcgggctcctcgcggcggacatggctggcaggcgtcgcgccgacaactgcgccgatctccatgcgcttggcggcgtagccggggtggtacagctctgcgacctgaccggtggcaaggccgatctggttgccgtagctggaatagcccgcggcagccgtcgtgaccagcttgcgctggggcagcttgccgggcattgtctcggaaacaggcttcagcgggtcagccgcaccggtcacgcgcatggcctgatagacgtagctgcgtccggacagcgggtcacggatggcaccgccaatgcaggtcgccgcgccgccgaagggctcgatctcggtggggtggttgtgggtctcgttcttgaacaggaacagccagtcctgctgctcaccgtccacgtcacacttgatcttgacggtgcaggcgttgatctcctcgctctcgtcaaggttcttcagaatgccgcgctgcttcagcgccttggcaccgatggtcgcgcagtccatcagggtgcggtttttcctgtcgcggcccgtctcggcgcgcagtgccatgtagcggtcaaacgcggcctgcaccagctcgtcgtcgattttcacgtcgtcgaggatcgtgccgaatgtcgtgtggcggcagtgatcggaccagtaggtgtcgatcagacggatctcggtgatggtcgggtcgcggtgctcggatttgaagtagttctggcagaacacgatgtccgcatggtccatcgccaggcccttctcattgcggaacgcttccagcgcgtcgtcgtccagcgcggtgaagccggtcaatgtctcgacctccgtcgggatggcaaactccattttcagggtgctgcgctcgtcaaggcttgcctcgcgggcctcgacggggttgatgacgtacttcttgatggcggccaggtcggcgtcggtcaggtcgccgtccagcagatagacgcgggcggagcgcaccgcggggcgctcgccctggctcagcagctggatgcactcgctggcagagtcggcgcgctggtcaaactggccgggcaggtactcgacggcaaaaacggtcttggcgtcgggcagcttgtcgtaggtcacgtcaacaggcggctcactgaacacggtgggcacagcctgctggaacagcactgcgtcgatgccctcgacgtcatagcggttcaaaaggcgcagaccggtcagattctggatgccgaccagatcgaccagctcatgcagaagcccttgtgcctcgccgtcaaagccgggctttttctcaacataaatgcgatataccattgtatttcctcctgagagttgaatttgcaggaagtgacggacggaaagccttccccctgggggaaaaaaggtggccgaggccccgtccgaggtcggatgaggggaaagtgtaccgctgtatcccgttgacggaaagctgcgggaagtttgccctcatcagtcaccttcggtgacagcttccccagatggggaagcctttttactgcatcgccgccagcgctcttgccccaatgtcactgcgcttgtgcagcttgtcaaaatggatgctctccgtggcagcatacgcctttttcagcgcctcgggcagggtgttggccgtggcggtcacgcccagcacgcgcccgccgttcgtgacgaggctgccgtccttgatggccgtgccggcgtggtagaccgtcacatcggcggcgtccagctggcccgcggtcaggcctgtgatctccttgcccttctcgtaggcgaggggatagccgccgctggctaagatgacacaagccgccgcgccgtcgctgagtttgacatcggtcttgtccagcgtgccgttcgttgtggcctccatcacggtcagcaggtcgctttccagcaggggcagcacgacctgcgtctcggggtcgccgaagcggcagttgtactcgatgaccttcgggccgtcgggggtcagcatcaggccgaaatacaggcagcccttgaaggggcagccctcggcctgcatggccgcaaccgtgggcagaaaaatctcctgcatgcagcgctcggcgactgcgggcgtgtagtaggggttcggggccacggtgcccatgccgccggtgttcaggccctcgtcgtggtcgagagcacgcttgtggtccatgctcgagaccatcggcttgacggtcttgccgtcgcagaaggacagcacgctgacctcggggccggtcaggaactcctcgacgaccacatggttgccggacgcgccgaactttttgtccagcatgatctccttgacgccgtcggcggcctcctgctcattctggcagatcagcacgcccttgcccagtgccagaccgtccgccttgataacgacggggtatttgccctcggctttgatgtagtccatgaccttctcggggtcgtcgaacgtctcatatttggccgtagggatgccgtatttcttcatcaggtccttgctgaacaccttgctggcctcaatgcgggccgcagccttgtcgggaccgaatgccgggatgcccacagcggccagcgcatcgaccatgcccagcgccagcgggtcgtcctgggcgacgacgacatagtcaaaggcttcttccttggcaaatttgaccatggcgtccacgtcggtggccgggatggccttgcagtgagcgtcatagctgatgccgccgttgccgggcgcacaccagatctcggagcagcgggggctttttttcagcgcgcggatgatggcgtgctcacgcccgccgccgccgacaaccagaattttcataagcgtcctccttgacagcacaacagcccgcgacgaaaaatcgccgcaggcgagttgttttttgcgtttaatgatggaacagccggatgccgcagaacgccatcgcaatgccgtacttgttgcaggtgtcgatcacctgtgcgtcgcggatggagccgcccggctgtacaatggcggtcacgccgctgcggcgcgcgcgctcgatgttatcgccgaacgggaagaaggcatcactgcccaggctcacaccggtcacggcatccagccaggcgcgcttttcctcggcggtcagcggagccggctgctcggtgaaggtctcggcccagacatcgtcgccgatgacatcctccggcgtgtcgccgatgtaaacatcgattgcgttgtcgcggttcggcttggcaatgtcagcgcggaacggcaggtccagcaccttcggcatgtggcgcagctgccagttgtcggccttctggcctgcaagacgggtgcagtgcacgcggctctgctggcccgcaccgacgccgatggtctggccgtcctgcacgtagcagacgctgttggactgggtgtatttcagtacgatcaggctgatgatgaggtcgcggcgctgctcgtcgctgatgaccttgttctcggtcacaacgttctgcagcatcgtctcattggaaatgtccaggtcctgacggccctgctcgaaggtcacgccaaagaccgtgcgggtctccagcggcttcggctcgtagtcggcgtcgatctggacgatggcgtagccgcccttcttcttggatttcagcacctccagcgcgtcggcgtcgtagccgggcgcaatgatgccgtcggagacctcgtgctgaatcagcttcgcggtgctcaggtcgcagacatcggacagcgcgatccagtcgccgaagctggacatacggtccgcaccgcgggcacgggcgtaggcgcaggccagcggggaaagctcggtctccggcgcaatgtggtacatggcgcgcagggtctcatccagcggcagaccgatggccgcaccggcgggggagacgtgcttgaagctggcggcagcgggctggccgagtgccttcttcaaatcgcgcacgagctgccaggagttgaacgcatccagaaagttgatgtagcccgggcgtccgttcaaaatctgcacaggcaggtcactgccgtccgccatgtagatgcgggcgggcttctggttggggttcgtgccgtatttcagctgaaattcgttcatattaaccctccacagcggtgtatttattcaggataatgtcctcgtactcgccggtttccagctcgatgctgcggacaaacaggctgaccttgttgtcctcgttcaggctcgcccacagcttgtcggcaaacttgtccgcgtcgttcgtgtcgatggcgacgcgcagcggctcacccgcaaagctggggatcggcgcaccgttcttgacgtaagtgctgatgaagtgtccctcaccagccacgggctgcgggtagtcgaaggtctggcgctgcacgctctcggcgttgccctcgtcggacttgacgatggacagcttgtagccgccgcggcgcatatcgacgacgccggagatgcgcggggtaaagttcggcgcgtcgtcctcataggtgcgggtcgccagcgcagcctcaaagctgtagccggggaaaaggttgccgttcatgaaccgggcaatcgtgtcggtctggtcgccgttcgtgaccacggtggtctcccgcagggtcagcacggcgttgtagatgatgaggtgcgggtcctcgagcttggccgggtcagcggccaccgtgcggatgccgccgtcgataggctcaaacacacggttgcggctgttggcgctgcggcccatgatccagtaggcgacgaacgccttctgcccgtcggggcttttgcccagcacaatgccgcgcccggggtagtcattcccggcaagatatttgtagatgttttttttcataatgacctcgttttggtgtatacaaaaacataaaacgggatgtggtggcaaggctctctccctcagtccgctgcgcggacagctccctcgcagagggagcctggaagccttggccccctctgcgagggggctccgcccgcaggcggtgggggagagaactttgccattgttgcgattttacacctcgtcactgcacaccatcgccagcgccttgggcagcagctgccattcggcctcgaccatgacgcgcttctgcagcgtctcgggggtgtcgccgggctccacggccacggccttttgcagcagaatgggcccgccgtcgcattcctcgtttacaaggtggacggtagcgccggtcagcttcacgccgcgggccagcgcggcctcgtgcacgcgcagtccgtagaagccggggccgcagaagctggggatcaggctgggatgaacattgatgattttattgcggtaggccacaatgaccttttcgcccagcacgctcaaaaagcctgccagcacgaccacgtcaatactgtgcttctgcagggtgtccagcaaagcggcgtcaaacgctgcgctgtcagcgtagtccctgcggctgacaacagcggattccacaccgaaattggcggcgcgctccagcgcgtagacgccaggcttgctggcaacgaccagcttgattttgccgttcgggttctcgccgcggcgctcgctttccagcagggcctgtaaattcgtgccgccgcccgataccagtaccgctacacgcttcataccagctcgaccccgtcgccctcgacgatggtgcccagacggtaggcgtcctcgccgtgggccttcagaatggcaatggccttgtccgcatcctcgggcgcgacggtcagcaccatgccgacgcccatgttgaaggtgttgaacatatcgtgctcggagatgccgccctcacgctgcatgacgtcgaacagggcagggatgcgcacatcggccttggcgatgcgggccgcacagcccttcttcaggctgcggggaatgttctcatagaagccgccgccggtgatgtgggacacgcccttgaccgtgatctcgtccatgacagccagcacgggcttgacgtagatcttcgtgggggccagcagggcctcgcccaggggcttgtccatgccgtcgaatgtctttttcagcacatcggggttgttgtcaatgtcaaaaattttgcgcaccagcgagaaaccgttggagtgtacgcccgtggagggcagtgcgatgatgacatcgcccggctgcatcgtggagttgtccaaaatctttgccttgtccacgacgccgacggtgaagccggccaggtcgtactcatcctcgggcatcatgccggggtgctcggcggtctcgccgcccacgagggagcagcccgcctggacgcagccctcggccacacccttgacgatctcggcgatcttctccgggatgttcttgccgcaggcgatgtagtcgaggaaaaccagcggcttggcaccggcgcagatgacgtcgttgacgcacatggccacgcagtcgatgccgatggtgtcgtgcttgtccagcagcatggcgatgcgcagcttggtgccgacgccgtcagtgccggaaatcagaacgggatgctccataccggtgcagtccagctcaaacaggccgccgaagccgcccagaccgccgatgcagctctcggtcatcgtgcgggccacatactgcttcatcagctcaacagagcggtacccggcggtaatatccacgcctgcagcggcgtagctggcagaatagcttttttccatgttgaactcctaaatgtgttacattactcggaaaatcgggtggcagcagcaagctctctccctccggcgctgcgcgccacctccctcgcagagggggccaagcccgcaggcggtgggggagagaagtttgcgctactgctgtgcttccgtcgttatgattacagcttcttattcgtcttagactggctcagcggcttgtcgtagacaatgtccatcgtctcggtgggcggggcaacggggtatttgccggtaaagcagcccgtgcagaagccgcacttgctgtggatggccagctgctgcacatgctcaatgctcaaatagcccagcgtgtcagacccgaccagctcgttgatctcctcgacggtgtggccggtggcaatcaggtctttctcgtcgggaatgtcggtgccgaagtagcacgggtgggcgaacggcggcgcactgatccggtagtgtacctcagcggcaccggcctcgcgcagcaggcggatggtgcgggcgctcgtcgtgccgcggacgatggagtcatcgaccagcacaacgcgcttgcccttgaccgtggacgagatagcgttcagcttgatgcgcacgctgctctcgcgctgggcctggctgccctgaatgaaggtgcggcccacatatttgttcttgataaagcctatgccgtaggggatgccgctctcctgcgcatagccgagcgctgcatccagaccagagtccggcgcgccgatgacgacatcggcctccacgggatgctcctgcgccaggaaccggcccgcctgcagacgggcctcatgcacacaggtgccctcgatgacggaatccggacgggcaaagtagatgtactcaaagacgcacatcgtgtgcggcgcggtgccgcagtgatcctccatcgtgcgcagaccgttgcggtcggcaataacgatctcgccggggcgcacgtcacggacgaacttcgcacccacggcgtccagcgcacagctctcgctggcaaaggcatagccgttgccgtcgggcagctcgccgatgcacagcgggcggaagccgttggggtcgcgcgccgcgatcagcttggtgtgggtcataatgacgagggagtatgcgccctcgatgtcgtccatcgtgcggctgacggccatctcaatgttcggcgtcagcagacggttctgggtcagcagataggcgatgacctcggtgtccgacgtgccgtgaaagatcgaaccgctcatctcgagcttgcggcgcagcttcggcgcgttgacaaggttgccgttgtggcagaccgccatagcgcccttgcagtgatgcagaaccatcggctgcgcgttggaacggctgcgctggcccgccgtggcatagcggacatggccggtagccatctttgcgccgcggggcagctcctccagcacgcgcttggtaaagacctcgctgacaaggcccagatcgcggtagccggacagcacgccgtcgacgttcagcgcaatgccgcagctctcctggccgcggtgctgcagggcgtacagcgcactgtagacggcgttgaccatatcggtctcgccggtcttgtcatacataccgaacacgccgcactcctcgtgcagggactcggtgtattgggaaatttcgctcatttatttgctccaattgtcggaatggtaaagccgtaggggcgaatcctatatccgcccgtgggtcggctgcctcttgcgggcgcatatagaatgcgcccctacgggaaagcgcacggtaaattatgcgggtgcaatcagcccagcaggcgcttcatgacttcctggtaagcgtcggcttcgccgcccatgttgcggcggaacagatccttgtccagatgtgcgccggtggtggcgtcccagaaacggcaggtgtcggggctgatctcgtcagccaggatgatcgtgccgtcggacaggcggccaaactcgagcttaaagtccaccagacggatgttggcgtccagcatgatcttcttcagtacctcgttgaccttgaaggcatacttcgcgatggtgtccagctcctcctgggtagccaggtcgagggccagggcgtagtagtggttgatgaacgggtcgtgcagatcgtcgttcttgtagctgtactcgaggatgggggtcttaaagaccttgccctcgggcacgcccatgcgcaggctgaagtgaccggctgcaacgttgcggacgatgacctccagaggcacgatctcgaccttcttcacaaaggtgtcgcggtcgttgacctcctgcacgtaatgggtagggatgccctccttctcgagcttctgcatcagagcgttggacagcttgttgttgacaatgcccttgtcgcgaatggtgcccttcttctcaccgtcaccggcagtggcgtcatccttatagtggaccatgacgatctcgggatcgttggtagcgaaaacctgcttggccttaccttcgtacagctgctctttgacttcgtaattcatgagaaacgctcctttttatagtataatatagtatgtatgtgtacctgtctttggcttcccctttgggggaagctcccgcccgcaggcgggtgatgagggaaaggctgccgggacagtccgtttacgggatacagtggcaaggccactcctcatccggcccttcgggccaccttccccccccttttggggagggctcttttacagtgctgcggcttcagcggcaatggcggcgtccttcttggcaatcgcggcggcggtgtcggcgcggaagctgtcaagcttcgcggccagctcgtcgtcggccacggccagaatcgccacagccagatacgcggcgttcttcgcgccgttcagcgctacggtagccacgggaaagccgctgggcatctgcacagtggccagcagggcgtccagaccgtccatggcgccgcccttcatcgggatgcccacaacgggcagggtggtgttggcggcaaaggcaccggccaggtgcgcggccatgccggcagcgcagagaatgacgccgtagccctcggcacgggcgctcctggcgaacgcggcggcggcctccggtgtgcggtgggccgaaagaatgtgcgcctcatacggcacgccgaaatccttcagcaccgtgcaggcacccttgaccaccggccagtcactgtccgagcccatgatgatcgcaacttttttcatacgttttgaaacctcccttacaaagcaaacagcgcagtgctccgcatcaggatacactgcgctgtggtgtcgacgtaaaaagggtatgatggtacagaacacccgcgaagaagccaatacgctgcattgcgtttgccacggaagatccccctttaataaaagtaagatgtgccctgtacttgtagtgtaaacgctgggcaaaaaaaatgcaagcgcccggcggacatttcagccaaaaaacggtgcaaaagggttttgaccgtcgctttttgtcgtttttgatgggtcttggagggcagttgtcatactttaaaacggcctgtaaaattttgctggtacagggcacaaaaatatgataaaatagaaaaaatacataaacaaggagctttgtatgattgcacccaaacgacgcctgacaaatcacgccctgcacggcagggaggaatggttcaagcgcatcttccgcgaccagatcgccgaggctgcgggcatcctcgaagtcgtgctctccggcattgtgctggcggccctgctcatgagcattgtcccgctggtggagctgatgcccggtctgctgaccgatgccgacagcctggagatccgcacctttctggaacgtgcgctggacatcgtcatcggcatcgagtttatcaagatgctggccaagcacagccccggcagcgtgctggaggtactgctctacgccattgcccgccacatgatcgtcggccatgaggacgccgtgcagaacctggtcagcgtgggggccatcgcgctgatcttcatcatccgcaagtatttctttgtgccgtccttcggctacaagatgcccggcggcaaaattgccccggacatggagcagaaggccgcagagaccccggaagcaaaagcgggagacatggcggaataacgccggcctgcccccggggacagcgccgcatggtatgccggggccattggtgcgaacggcgaaaatatgtaagcctgtgtgataactattcataaaaaatcccccttccgggaactttgtaggggcggatgctcatcatccgcccctacagcctcccggaaggggaattctttattttacgattttacaaaaattttgccaatcagaacagacccgtgatcttcccgtgtacatccacatcaatgtccatggcggcggggtgcttgggcaggccgggcatcgtcatgatgctgccgcagacaacgaccacaaagcccgcaccggcgctcaaacgcacctcgcgcacattcagcgtgtgaccctcgggcgcacccgtcagcttggcgttgtcgctgaaggaatactgcgttttggcaatgcagaccggcagcttgccataacccagcgcggtcagctcgtccagcgtcttttttgcggcggcggtgtagcttacgcggcctgcgcggtagatcttcgtggcgacggcctcgatcttatccgtcagcggcgcgtccagctcgtaggtgtactgcacctcggcgctgtcgttcaggatggacaacacggtctcggccagcgccttgccgccctcgccgcccttggcaaagacctcgctcagggcgcagggcacaccggccttgctgcagacgtcataaataacatccatctcctccgcagtgtcggtggggaaggcgttgatggcaacgcagaccggcagaccaaagccctgcaggttctcaatgtggcgggccaggttcacgctgcccgcacgcacggcctcggcgttgggcttgcccaaatcgggcttggccacgccgccgtgggacttgagcgcgcgcaccgtggccaccagcacaacggcggcggggtgcagcccggcatagcggcacttgatgtcaagaaacttctccgcgcccagatcagcaccgaagccggcctcggtcacaacgtagtcggctagcttgaggctcagcctggtggcaatggcactgttgcagccgtgggcaatgttggcgaacggaccgccgtggatgatggcggggttgtgctccagcgtctggacaaggttcgggtcgagcgcatccttcaaaagcgcggtcatcgcgcccgccgcgccgatctgcccagcggtgacgggctggccgtcgtaggtgtaggcgcagacgatgcgggacaggcgagcctttaagtcctctagatcggtggccaggcagaacaccgccatgacctcgctggcaacggtgatgtcaaagccgtcctcacgcggggtgccgttgaccttgccgccgaggccgtccacgatgaaccgcagctggcggtcattcatgtccatgcagcgcttccaggtgatgcggcgggggtcaatgttcagcgggttgccctgctggatcgagttgtcgatcatggcagccagcaggttgttggccgcgccaatggcgtggatgtcgccggtaaagtgcaggttgatgtcctccatcggcacgacctgggcatagccgccgccggcagcaccgcccttgatgccgaacacggggccgagcgacggctcacgcaggcagagcatcgtttttttgcccagcgcgttcatagcgtccgccagaccgacgctcgtcgtggtcttgccttcgcccgcgggcgtggggctgatggcggtgactaagatcagcttgccctcgggcttgtcagccttggccagcttgtggttcagcttggccttgtagtggccgtaggggatgacgtcctcgccctgcaggcccagattggcggcgatttcggtgatgggctgcattttggcggcctgggcaatttcgatgtcgctcaacattgtacgattcctccgtttttgtaaaaaacaataaagggctgcacacactatactccagtgtatgcagcccagacggtcggcttaaaaggcaagtggtaacgccgcgtcccctgtggtaagccccacaatatcccgtcggtcagcggccttgcgatattcttactgtagcataggaacgcgggtttgtcaagaaaaacaaccggagctgttcttacgctgcttttgcgctgctcttgcgttgtaggggccgatggtgagcatctgtccctacaagttccgaaatgtcggcagggtcataccgtccctttcccacagccccactttttgaaataccgtcccatgctgacaagctgcatcttgaacttgcctgcgtcgcgtatgggggcgcggtgccacgcatgagtggcggaaaactgcggagccagccagacggtgcccttctgcagtaccttctgggtcaggtcggcgtcctccacatacatgaaatacccggggtcaaacccgccgatttccttgaacacatcggtgcgcacggccataaagctgccggtgcagaactcgatgcggcggggcacggtcagatcctcatcctgcatcgtgtagtggtcgtcggccttcttaaagcagcctccgagcttcggggccagctgccgcgccagcagcagccagggcgtcggcttgcggcggggcaggtgctgcagcttgccgtcggggtagcgcagctggggcgttgccatggcggccccgggccgggccagcagccacgcggccatgtcctccagcacgtcgccggtcagcaggatgtccgggttcagaataaagtgtacgtcgctggtcagacgatccagcacatagttgtggcccttgccgaagccgatatttttttccagcggcagcacagtcacgcggctgtcgccgaaatccgtctctgccagctgcctgccgcagccgtcgggactgccgttgtccacgacatacagggcaagatccggggcaggggtatagtgcaggatgctgcgcaccgcggcgcagacctcgtcataatcacagtacgccacaatgcaggcgctgattttgggcatagtaagctccttgagacaaaattctactatcggggaatctgtaggggcgggtgcaggcatccgcccctacaaatgggctattacttctccaacgcttccagacggctcagatcatacggcgtgtcctgatacacgtagtagttcagccagttcgtgtacagcagatacccgtgggcgcgccagcggaacagcgggtcgcggctcggatcgtcgtcggggtagtagttgcacgggatgttgatgggcttgccggccttcacatcgcgcttatactccctgtccagcgtatatttgtcgtattcggggtggccgatgacaaagatctgccgcccggactcggtggaaagcagcatcggcccggcaatgtcgctctcggccagaatgcgcaggtcgccgcaggcgtcgatggcggcgcggtccagcccggcccagcggctgtgcggggcgtagaatacctcgtcgaagccgcgcaccagcgggttggaggggcgtgtcacacgatgctcaaacacgccgaacatcttcttatccagatgcaccttggggatgccgaagtggtagtacagccccgccagcgcaccccagcacaggtggatggtggagtagacgttctccttggtgtagtccatgatgcggcagagctcgtcccagtagtcaacgtcctcgtagtccaggtcctcaatcggcgcgccggtgatgatcatgccgtcaaagcgctcgtttttgatctcgtcaaacgtcttgtagaacgccttcatgtgctcgggcgcggtgtgggtcgtgctgtgggttgccgtctgcaaaaaggtgacctgcacctgcaaagggctgtttgccagcaggcgggccagctgggtctcggtcacgatcttggtcggcatcagatttaaaatcaggatgcgcagcgggcggatatgctggctcatcgcgcgctcctggtgcatgacaaatacattttcctgctgcaattcctcgtaagcaggcaggtttttcgggatgataagaggcatagggaaggactccttattcagaatacctttattataaaggtttcccccgcaaaaagcaacaaaaaagcactcccggtgcaaaaccgggagtgcggcggcgcttaccgcttattcgtacttgacgttgtcgatcaggctctgcatgacgtcgctctgcagaacattcatcttgatgtagttctcaccgtaggcggagacatactggctcgggtcggtggtgccgtagtagcggccaaagtcagcgttcatggtggcggtgtcgcacttgaagcccgttttctcggccacggcctgcatcagcagggcctgctgggtgatggacttgatgctgtcgttggcatctgccagataggcatccacgctgtcatagctgctgcccatcatgccggaggacagcagggtgttcatgtcggtgccgtatttctgggcgttggtgtaaatgcggtacagcagcacatcgcggtagtagtccagcgcggtctgcggcagctcgtccgcgtagctggccttgtcatgcagggcggtgtaaacgtcactggcctggttgtcatagagcatcgtggacttgacgaaggctttcagctcatcgacgttgttcaggctcatgctctcgccgagattttccttgacccagtcgtcggtcagctcgggggtgacggactccttgatgtagttcagggtcgtctcaaagacggcttccttgccgttcaggtcctcattgccgtaatcctcggggaaggtgactgtgacgtcaaaggtctcgccgggggtatggccgacgatctgatcttcaaagtcgtcaatgtaggtgccgctgcccaaagtcaggtcagcgccgctgcccttggtgtcgccgccgtcgaaagcaacgccgtcgatgcggcccacatagtcaatgttgaccgtatcgccgtccgcggctgcgcggtccttgacctcattcgtggtcgcaaagttggacagcacgttggaatcaatgtaatcattgatgtcgtcgtcgctgacctggcccaggtcggcgctgatcgtgatgtccgcgtagtcgtcgggcaaggtgacataatcggcggcggtcacgcccttgagataaccgttctcgtcaaacgcatcggaaaagctgaaatcagccagataggcgtactcggcatccgcggtctcagcgctggccttctcggcggtgtcagccgtctcggcggtagattcggcggcctcggaagaggcggtgtcagcggtattgccgcaggccgcaagcacagcagtcatgccgacagccatgccaagggctgccacacggcggaaattcttcagtttcatggaattctcctgtctttttcaaaattgcatactttcttattatacacgctttttcggaaaagtaaaatgaaattgctgtgaaaatgtggtataatggcaaaaagacaaggcaataccgcataattctaagtgccgatacggcgagcaaggtgcggcagctgctaagccaaaagcgcagataatactttgtgctgcaaaggtgagcgccgccagtggcggatgcagcgaaccgaagcaggggcagcggtcgcagagtgcgaggggcttttgccccgaagcacgatgcgggtaccgcaacccgacattatcgagtattttggcaacgcaggtgccgtgccgcagccgccggagcggtgcttaagccgtaaggcgggaattatgcggtattgccacaaacaacaaggagacatacaccatggaaaaatccaaaattgaccgcatcaacgcgctggcaaaaaaggccaaggccatcggtctgaccgagcgtgagaccgccgagcgcgacgctttgcgcaaggagtatctggccgatatgcgcgcggccttcaaacagcagctcgacagcacctatgtccagactgcggacggcgcaaagatcccctatgccgagtacgcgaagctctctaagcattgatctgcccctgcaactgcgccaacggaaacatttgaatcttgtacaaaacagctatagtattctcttgacaaatatggtataatacagaacggcagcggatcccggagattccggaaaaggctgaaatgcctatttacttacaaaagaggtagaaacgtatgcttacttccattaccggcattaactggggcgacgagggcaagggccgcatggtcgacctgctcagccaggactatgacattgttgcgcgctatcagggcggcgacaatgcaggccacaccgtcaagaccgagcgcggcaaattcgtcctgaacctgattccctccggtattctgcgccccgacgttgtctgcgttatgggcggcggcatggtcatcgaccccgagcacctcgagaaggaaatcgcctccctgaccgagaagggtgttgagatcagccccaaaaacctgaaaatctctgaccgtgcgaccatcaccatgccgttccatgtcgcacaggacggccttgaggaggagcgcctgtccaagaccggcgctcagttcggctccaccaagcgcggcatcgcctacagctacggcgacaagtacatgaaaaagaccctgcgcatgggcgacctcgtccacatggacgccagtgtcaggaagcgtctggagaccatcgtcgagtccaagaacctgaccatggagaagatctacggccagaagcccgtcagtgttgacgagatgtgggcatggtgcgagaaatattccaagctgtttgctccctacatctgcgatgtgggcggctatctggacaaggctgaccgcgagggcaagaagatcatgttcgaggcccagctgggcgctctgcgtgacatcgacttcggcatctatccttacacgtcttcctccaacaccgtgtccgcctatgcacccatcggtgcgggcatcccgggccacaagctgaacctctccatcggcattatgaaggcttattcctcctgcgtcggtgagggccccttcaccacggagctggctatgaccgaggcagaaaaggacgtgctgcgtgagcacggccatgagtacggcgccgccacgggccgtccccgccgcgtcggcccgttcgacgctgtggcaagccgctacggcgtgcagtgccagggctgcgatgaactggccctgaccctgctggacgtcctcgactacatggaggaagtgcccatcgtcaccgcctacaagctgaccgacggcagcacgaccacccgcttccccatgggcaagacgctggacgacgcccagcccgttgtcgagactgtgcccggctggcactgcgacatcaccggcgtgcgcaggtttgaggacctgccccaggctgctcagaactatgtcacacgtctggaggagctggtcggctgcaagatcaagtatatctccgtcggccccgagcgcgatgcctgcatcgtgcggaagtaatttttctccttggccccctcccagaggaggcaagaacttataaccaaccaaaaggcagacccttacaaggtctgtctttttctaaaaaagggggcatttccactgattcagcttttaatacggactttcgtcaaaaattataaaagcactgcggatcgcgccgttcgcacggcctacggaaatctggcctgcatcgtcagcgtggtgtgcaacctactgctggcgggcggcaagatcgccgtcggtgtactgaccggcagcgttgccatcaccgccgacggcatgaacaacctgtccgatgccagctccaatgtcgtcagcctcgtcggcttcaaactcggcgcgcgcccggcggactcggagcatccctacggccatgcccggtatgagtatctggccgggctggcggtctctgtcatgatcctggtcatcggcgtggagcttttgaaggagagctttgccaaggttctgcacccgacggaggtcgctttcagctggctcatggttgcagtactgattgcgtccatcctcgtcaagctctggatgagcaggctgaaccggcagatcggcacggccatcgactcggaaacgctgctggccaccgccgccgatgcccgcaacgatgtcatcacgacggcagcggttctggctgccacgattctgacaaagctcaccggctttgtccgtattgacggactgatgggtatcggtgtggcggcgttcattttgtacagcggtgcaatgctcgtcaaagacaccatcaatccgctgctgggtgcagcgcctgactcggatctggtcgagcatatcgagaaaaaggccctgagctatcccggcgtgctgggcgtgcacgatctgatgatccacgactacggccccggcagccgcctggtcagcttccatctggaaatggacgctaaggacgacgtcatgcacagccacgatgtcattgaccgcattgagcgggacctgcttgtggaggacgggctgatcgcgacgatccactttgaccccgtcgtgaccggtgaccctcacgcggacgagctgaaggcgtttttgcagtgtgaggtcgaggaactcgcgccgctggccaacatccacgacctgcgcattgtgcccggcccgacacatacgaacgtgatttttgactgtgccgtccctgccgagtacatgaccgacaaacagcaccggggcgtcaagctcgtcaatgccctgcgcaatgccgtacaggccaagtggcccgaccatttctgtgtcataaagctggagccggactatgcaccggtacaccacgaataaaagaagcaactcggtaggggcagggcatgccctgccctcaacgtaaaatccatagcgatgtggcagcaaggctgcgggccggacatgtccggcccctaccgggcatcattacggaaagtaaaactatataaaggagaggtatccccatggactacaacaaagctgctctggagctccacagcaggttccccggcaagatcgccgtgcagagcctttgcgaatgcaaggaccgcgacgcgctgtccaccgcctatacccccggtgtggccgagccgtgccgcaagatcaaggcaaaccccgatgacgtctacacctacacgatgaagggccgcaccgtcgccgtcgtcacgaacggcactgccgtgctgggtctgggcaacatcggccccgaggccggtctgccggtcatggagggcaagtgtgtcctgttcaaggagttcggcggcgtcgatgcgtttcccgtctgcctgaacgccaagacgaaggaggaggtcatcgctgcggtcaaggccattgccccgaccttcggcggtatcaacctggaggacatccgcagccctgagtgctttgaaatcgaagccgaactcgagcgtgacctcgacatccccgtgttccacgacgaccagcacggcacagccatcatcgtgctggcgggtgtgctcaacgccctgaaggtcgtcggcaagcgcattgaggacgtcaagatcgtccagaacggccccggcgcggcgggcacggcgatcatccacatgctgcaggtcgcgggcgctaagaacatcgtcgccgttgatgagcacggcatcctttacccgaaccgccccgcgggccttgaaggccacaagggcaggctggccgaggagacgaaccccgacaagctgaccggcggtctggccgaggccatacgggatgcggacatcttcattggtacgtcgattgcgggcgcattaacccccgaactggccgccacgatggcgaaggaagcgattgtgttcgccatggcgaatcccacgcccgagatcatgcccgacctcgctaagcaggcgggcgtccgcgtcatcggcacgggccgcagcgacttcccgaaccaggtcaacaatgtgctggcgttccccggcatcttcaagggtgcgctgtccgtccgtgcgcgggacatcaaccccgccatgaagatggccgccgctaaggccatcgcgggtctcatccccgacgacgagctgaacgaggaaaacatcctgcccaaggcatttgacccccgtgtggccgatgccgtcgccgatgccgtcgcacaggccgcgagagaaagcggcgtggcgcgcgtatgagcatccgtgaaattcccgccgctgccatctctgacgcagtggaggctctctgcatcgaggccaacacccggctgcccgccgacgtaaaggctgcactggatgccaccgaggctgccgagccgtggccgctggcaaaggagacactgggcttattgcagcagaatctctgcgttgcaaaagagaaagacctgcccatctgccaggacaccggcatggcctgcgtctttatcgagctgggccaggacgcccacattgacggcgacctgaccgacgccgtcaacgagggcgtgcgccgcggctacgaaaaagcattcttacgcaaatccatcaccgctgacccgctgcagcgcgtcaacacgggggacaacaccccggcgttcctgaccgtgcatcttgtgccgggcagcggctgcaaaatcaccgtcgcccccaagggcgcgggcagtgagaacatgagccgccttgccatgctcaagccggccgacggcgtcgagggcgtgaaaaaattcgtgcttgacacggtggagcaggccggagccaacccctgcccgcccattgtgctgggtatcggcatcggcggcagcttcgaccactgcgcagcgctggccaaaaaggcgttgctgcgcccgctggacgaacccaacgccgacccgtattatgcagtgctggaaaaggaactgctggatgccatcaatgccacaggctttggcccgcagggctttggcggtgctacgacctgtctgggggttgccattgagcaaaagcccacccatgtggcctgcctgcccgtggccgtcaacatcagctgccacgttacccgccgcgccagccgcacgctgtaaggaggcgcaacgatgcaatatgtactgaaaacgcccctctccaagcaggaccttgcgccgttgaaagcaggggataccgtgctgttgtcaggcgtggtctacaccgcccgtgacgccgcccacgcccgcatgatggagctgctggacaagggcgagccgctgccgttccccattgagggcgcggccatctactacgtcggccccacgccggagcgcccgggctgtgccatcggcgcggcaggccccacgacctcgggccgtatggacgcctacacgccgcggctgctggatctgggactggcctgcatgattggcaagggcaagcgcaccgatgccgtcaagcagtccgtcgtcaaaaacagcgcggtctatctggccgccatcggcggggccggcgccctgatggccggcagtgtgcagagctgtgaaatcattgcgtggccggacctcggctgtgaggcggtgcgtaagttggtggttaaagacttcccgctgacggtcctgctggacacccacggcggtgacctgtaccggagcggccccgctgcttacctcgccagccgggagcacaacgcatgagccgcaaacggatggcaaagtgcctggcactctgcgcattggcgctggccgtctgcgtcggcatagcggcggcgctggtcatctccaaaaaccggcagagagctgccgaagctgccgctgcggccagtgccgctgcttccagcgaggccgccaaagccgccgaggaggaggctgcccgcgccgccagtgaagccgccgaggcagcccgtcaggaggaagaacgccgggccgccgaagcagccgccgcgaagcgtgccgagcaggtcaccgctgcgcaggccgagcacgacagcgtgcagtacggcgaaaagctgggccgcatctgggtcgaaggcacaaacgtggactgcgccctctattggggcgacagcgagggtcagtttggccgcggtgcgggctgccgcgccgagagtgactgcgtcctgcccggcgagaacggcacagtctttatcggcgggcatacgggcacgtacttctcggaccttggttcgacgcagctcggcgccatcattcatctggagaccgactggggcaactttacctataaagtcaccgacatgcaggtcattcaggagaccgacgtcgacaaggtgcgctggggtgccgaggagcccagctgcatcctgtacacctgctacccctttggcatcctgacccacaccccccagcgctacgccgtctatgcagaccccgtcagcgccgacgagtacggtgtggtaccggcagagacaaccgaaaaataaaaatgaccgaggtacaccccccccgcaggggatacacctcggtcatttcctttggtgcggctaacaggacttgaacctgcacgtcgtggacactggaccctaaaaccagcgcgtctgccaattccgccatagccgcataacaaaattagtatacgtttttttgtgcggtttgtcaatggcaaaaccgtattgacacgggcatccgttttaataaaggaaggcatgcacaatttacgttttatctatggacgtgtgtccctgctgtacggtatactataggtaaaccgcctgccagcctgtgaccacggaggtagactttgaaaaagaacatcttagccaagctctcacccttccattttttgatgctgctgatcgcgggtatcatcaatgctatcggtgtaacgctgtttattgcgccggtacagctgtacgacagcggcatctccggcacatccatcctgctctcccagctgacgccggactatctttcgctgtccttcttcctgatcctgctcaacatcccgttgctgctgttcggcttcaagcggcagggggcggtgttctcgatttacgccatctttacggtctgcgtctactcggtggcggcctggctcatcaccgatgtgctgcccatcgacgtcagcattgcctcgccgctggcgggcacggatttgtttttgtgtgcgctgttcggcggcatcatctcgggcgttggcagcggcctggccatccgctacggcggcgcgatggacggcattgaggtcgtcgccgtcatctttgcaaagccgctcgggctgtccgtcggt

SEQ ID NO: 1013 - DNA, 75702 bp, unidentified
  source 1..75702: mol_type = unassigned DNA
  misc_difference 41934: note = a, c, g, or t
  misc_difference 41935: note = a, c, g, or t
  misc_difference 41936: note = a, c, g, or t
  misc_difference 41937: note = a, c, g, or t
  misc_difference 41938: note = a, c, g, or t
  misc_difference 41939: note = a, c, g, or t
  misc_difference 41940: note = a, c, g, or t
  misc_difference 41941: note = a, c, g, or t
  misc_difference 41942: note = a, c, g, or t
  misc_difference 41943: note = a, c, g, or t
  misc_difference 41944: note = a, c, g, or t
  misc_difference 41945: note = a, c, g, or t
  misc_difference 41946: note = a, c, g, or t
  misc_difference 41947: note = a, c, g, or t
  misc_difference 41948: note = a, c, g, or t
  misc_difference 41949: note = a, c, g, or t
  misc_difference 41950: note = a, c, g, or t
  misc_difference 41951: note = a, c, g, or t
  misc_difference 41952: note = a, c, g, or t
  misc_difference 41953: note = a, c, g, or t
  misc_difference 41954: note = a, c, g, or t
  misc_difference 41955: note = a, c, g, or t
  misc_difference 41956: note = a, c, g, or t
  misc_difference 41957: note = a, c, g, or t
  misc_difference 41958: note = a, c, g, or t
  misc_difference 41959: note = a, c, g, or t
  misc_difference 41960: note = a, c, g, or t
  misc_difference 41961: note = a, c, g, or t
  misc_difference 41962: note = a, c, g, or t
  misc_difference 41963: note = a, c, g, or t
  misc_difference 41964: note = a, c, g, or t
  misc_difference 41965: note = a, c, g, or t
  misc_difference 41966: note = a, c, g, or t
  misc_difference 41967: note = a, c, g, or t
  misc_difference 41968: note = a, c, g, or t
  misc_difference 41969: note = a, c, g, or t
  misc_difference 41970: note = a, c, g, or t
  misc_difference 41971: note = a, c, g, or t
  misc_difference 41972: note = a, c, g, or t
  misc_difference 41973: note = a, c, g, or t
  misc_difference 41974: note = a, c, g, or t
  misc_difference 41975: note = a, c, g, or t
  misc_difference 41976: note = a, c, g, or t
  misc_difference 41977: note = a, c, g, or t
  misc_difference 41978: note = a, c, g, or t
  misc_difference 41979: note = a, c, g, or t
  misc_difference 41980: note = a, c, g, or t
  misc_difference 41981: note = a, c, g, or t
  misc_difference 41982: note = a, c, g, or t
  misc_difference 41983: note = a, c, g, or t
  misc_difference 41984: note = a, c, g, or t
  misc_difference 41985: note = a, c, g, or t
  misc_difference 41986: note = a, c, g, or t
  misc_difference 41987: note = a, c, g, or t
  misc_difference 41988: note = a, c, g, or t
  misc_difference 41989: note = a, c, g, or t
  misc_difference 41990: note = a, c, g, or t
  misc_difference 41991: note = a, c, g, or t
  misc_difference 41992: note = a, c, g, or t
  misc_difference 41993: note = a, c, g, or t
  misc_difference 41994: note = a, c, g, or t
  misc_difference 41995: note = a, c, g, or t
  misc_difference 41996: note = a, c, g, or t
  misc_difference 41997: note = a, c, g, or t
  misc_difference 41998: note = a, c, g, or t
  misc_difference 41999: note = a, c, g, or t
  misc_difference 42000: note = a, c, g, or t
  misc_difference 42001: note = a, c, g, or t
  misc_difference 42002: note = a, c, g, or t
  misc_difference 42003: note = a, c, g, or t
  misc_difference 42004: note = a, c, g, or t
  misc_difference 42005: note = a, c, g, or t
  misc_difference 42006: note = a, c, g, or t
  misc_difference 42007: note = a, c, g, or t
  misc_difference 42008: note = a, c, g, or t
  misc_difference 42009: note = a, c, g, or t
  misc_difference 42010: note = a, c, g, or t
  misc_difference 42011: note = a, c, g, or t
  misc_difference 42012: note = a, c, g, or t
  misc_difference 42013: note = a, c, g, or t
  misc_difference 42014: note = a, c, g, or t
  misc_difference 42015: note = a, c, g, or t
  misc_difference 42016: note = a, c, g, or t
  misc_difference 42017: note = a, c, g, or t
  misc_difference 42018: note = a, c, g, or t
  misc_difference 42019: note = a, c, g, or t
  misc_difference 42020: note = a, c, g, or t
  misc_difference 42021: note = a, c, g, or t
  misc_difference 42022: note = a, c, g, or t
  misc_difference 42023: note = a, c, g, or t
  misc_difference 42024: note = a, c, g, or t
  misc_difference 42025: note = a, c, g, or t
  misc_difference 42026: note = a, c, g, or t
  misc_difference 42027: note = a, c, g, or t
  misc_difference 42028: note = a, c, g, or t
  misc_difference 42029: note = a, c, g, or t
  misc_difference 42030: note = a, c, g, or t
  misc_difference 42031: note = a, c, g, or t
  misc_difference 42032: note = a, c, g, or t
  misc_difference 42033: note = a, c, g, or t
gccgctaggcgcacaacgcagaaacacccctgcatggacgcaggggtgaggagaaaacgcgccggaattactgctggacatccttcgcagagcttaaggttacttcaaccttgctctcttcgtactgtctgccactctgacgggcaacagtaagagtaaccttatctccggccttgtagctctttaacgctgactgcagctctgtcatagaagaaatctttgtgctgtcaacagcagtgatgatatctccctcctgtaagccggcatttgcggcacctgaaccagctgaaacagatgaaacatacacaccctgtgggaagccgtaggctaccatctcagatgaaacatcaccacccttgataccaaggtatgcctgattctcattagtatattttccattctggataaggctctcaataataggctttgcaactgacataggaattgcatatccaataccctcaacctcagttgaagaatattttacagagtttataccgataacctcgccattttcatttaagagtgctccaccactgtttccagggtttatggctgcatctgtctggataagcttgttgttggtaacagtctcacctgtctgtgaatcctgtgtagtaacagttctgttaagtgcacttactatacctgttgtgacagactgtccgtatccaagtgcattaccgatagcaattgcaggacttccaacagctacactatcagaatctccgattgtagcaatcttgatatttgagtaagtatcttttccaaggtctgctttctttactcgtacaactgcaagatcgtcatccggatctgttcctctgatttctgcctttaccacagaatcatcatcaaactgtactgtgagctcctctgaatctgccacaacatgattgtttgtagcaatataaagataatcatcatcctcactcacaataattcctgagccacagctctgagactgctgtgactgccttccgaaaaagctgttgtaggtgactgttcctgtatttgtgatagcaacgatgctaggcataacctcatcgacaacagatgatacatctgtcatatcctttgcatcccctgaggatgtctgcttagtcccaccggatgttgtagtggtaagctttgcacttgcagtagaagaatttgaaatagctctcgtgccaatatagcttactcctgtgaaaactccgcctccgacgagtccgaagataagagctgcagctactgtctttgctgcaaatggtccaaatgcaccaggctttctaggtgctctctgtttcttaggctttacagtctgctggtgtgcctgaccattcatattcatccggcggctatatgaattgtctgtcgaacctgctgatgtgccgccatatgcattattatttgtgcctgaattatacgactgattagaataaggctggtttgcatatgattgatttacatttggctgtcctgctgcagaagcctgcgaatatggattgtagctctgtgaatagctttcagctgatgtattattagtctgtgcagccttctgtgactcatccggattgtaaggattacccgacattgtgaaatttacattgtttgtattgttatttgtactgttagtattatttgtatcattcatatttctataattgttatccataataatttctcctttcgtttacatttagaagtatactgtcaatctgtgtttattttgtgacggtattatttattttttcataaatcatttaactatttatagcctatattccccattgcaggccactatgcgattataaaaataaaaataactgctcatcggcagatgcacctctaagtctgcgataaatagaaattgcagaatatcaatacatccctgccaatgaacagttaccataaatcatatattaaatttcaattccgttcttctcaagaagagctctcgctgtttcaaccgaatctgtacctgtcgcattctttacaggtgcaaactccttctccctgtctacctcaaatggcaggctattgtccatcatgtataccatatcgaggatgagtgtctcgaacttgtatgcattcggagtctcaggcttgtgctctgtaccattctcatcaatgtaaggtaccttcttctctaccacatgaagtggaaggctcttctctgcgatagccatgagcttgtccacgcggaataaatagtttaagataacaccaaagccatactgcaatgaaccattctcgttctttgcctctgccatctcaggagtaagctcgtaatactcaacaatcgaaggcttgccattctcaagacacatagcaccaactctctcatatggatcacattttctgaccaccttagagccgctgacacagccggactcgattgtagcacctacaaatacaggatctgcaatctgctgaagcacattgtccacagcaaatacattgagccactcaacacccttgtccttcaaatccttgtcaagaccggcattgatgagtgacttgaaccatccaccgtttccgtttggtgacatggcaagtgaatcctcagatttcatgagcagatttccatcaaaatcaactgccggaaccatctcctgcacgaaaaacttcacataatccttgttgtatccaaaatagtcgtgctcttcaaagaactctcttgtcatgctatcatttatctcgcttgtcataacatacagaggcacccatgtaccagtctgatttgtaaccttcatgaggtttgcgacaagctgctcaaagatgtagagttcctttgtctttccgatattgaacatgcccttagccttgtcaaagccaagacgtgtaccctgtccaccggcaagaagaattgcaccgaccttgccattcttgacagcatcaagacctgttgcaaggtatttgtccttatttgcctctatctctgaaagctccatagcagcaagcggtgaaaatgtacctctctgctgctccttgttgtgaatcatatcaaggtatgaccagtccatgtgctcaagctggctctcaagcttagccggagcttcctctgttaagaatttctttaagtatttctggtttgttgccgtgattttttctttgatttccggtttcataataaataatctccctaatagctaactttaattatttaatcatccgaaccatctgatgatgatttttcttctgaaccgttttcagattctgactggctctttttcagggcatcctgcttgtccttattttttttctttgccccttctgttccatcagagccaacagtatcattgtactgcgtgagatcaaatgctgaagtcttagatgtaacacctgtctttttagcaatcttatcacttactgtctgaactgtctctgttggctggtaatcagtctcattaaacaggaactgatgaagcttagaaacattctgtgccaggtctataggaattacggtatcgccagtagttgacagattcattgtagtcagctcaaatgggaagcctgttgtctccttcatctgatattttgtaacagctgttgcatactggataatctctttagctgtaaaattagtacttatctgactcataatatccttacacatctctgttagagagcctaaatctgactgtttagccttgtcaagcatagcctgaagcacaattctctgacgggatgcccttaagaaatcatcacctgaggtgcttctgatacgtgcatagcatgtagcctgagttccatcaagatgctgcataccatccccctcaagataaggagtattatatcctgtagtataatcaacctcaggaatcagataattgatttccttcatctccgcattagtaatctcaagatcaaggccaccgatatcatctatagcatctacaagagccttccagtcaacacagacatacttggttatattcaaatccaaatttgaattaagcatagctactgctctctttgccccaccatttgcataagcggcatttgcctttgcaaactttccattgcctataggcagatacgtatctctgtagacagaaacaagctgaacctccttagtatcataattcagactagcgatcatgatacaatcggaatgcccctcatcgtatgaaccattacttctgttgtccagaccaaacaacgctacattgagatatccatgcatattggcaagaacatcctcatcaatctcctcattgattccggcctcactatttgtcagcgcatcctcatatttaacctgtccgagtgtcttattataagcccaaaccactaacagaacaattaacagcagcaggatttcaaatacaaagagtataatcttcttacgtccacttcttttcttttttcttcttctcttctttgccatgttatttttccttttttctatgaatgtaaagccacgcgtctgcgtagtcctgacgttccttctctgacatattggtatactttccaaactccagattcgtcagacgcatctgcggcctgccacacttgaagcattcaacctctttccttcttgaaaccatccgtatccagccacaatccgggcaaatgtatattttcatcatagtctttattcaaactgtccgagaacctcagctgacaaagcatcaagcttagcctgtgaatcttcaagagacactcctttaactccgaaatagaatttgatcttaggctctgtaccagaagggcgtacacagcaccaagcgttatcgttaagttcgtagtaaagtacattggaagaaggaagacctgtcggctcaacctttcctgttgtcatatcttttcttgtgtcattcttgtaatcacggatagcaagcacctgataatcaccaaacttctttggttcagcggcacgtgcctttgtcataatctcatttatctgtgcggcaccatcaatgccttttaaggtcattgtggaaatgccctctctgtagtagccatacttctcatacatgtcaatcatgccatcccagagagtcttgccctgtgacttgtagaaggcagctacctcacacagcatacaaactgctgcaggagcatccttgtcccttgcatatgtgccaggtaagcatccgtagctctcctccataccgaatacatagttgttgcagccggtcttttcaaatttgagcatctgctctccgatatacttgaaacctgttagaacctcgatatgctttacgccatatgctgccgcaattgccttacccatatctgtagaaacaattgactcaacaaatgcaggattctcaggcagagtaccattggcactcttctggcttaaaatatactcaccgataagcatagctgacatatttcctgtaaatgtcacatactcacccgtctttgtatccttgcagtatacaccgagtctgtcggcatcagggtcagttgctaaaacgatatcagcatccttttcctttgccagctcaagtgcaagcttccatgcatcaggattctcaggatttggataaggacatgtagggaaattgccgtcaggtactgcctggcttggctcaatgtatacattctcaaagcccatatccttaagtactctctgtacaggacgaagacctgtgccgtggagtggtgtgtaaacaatcttgatatcctttgccatagccttgataatctccggatggatagaaagcttgcggagctctccgaaatatccctcctcaacctcatcagagatgacattgtaaagaccagcctcaatagcagcagctttgtccatagtctttacctgatcaaatgatgtaacctttgccacctcagccatgatgcttgtatcatgaggtggagtaacctgtgcaccatcctcccagtataccttgtatccattgtactcacgaggattgtggcttgctgtgataacaacaccggctattgtaccgagtgtccttactgcgtatgacagctccggaacaggtgcaagctgtgggaatacatatgtcttgattccgttagctgcaagacagagtgctgtggcatctgtgaactcatcatgcatattacgtgagtcatgtgcaattgcaacacctctctttactgcgtcctctccctgtgaaagtatgtaattcgccagtccctgtgtagcctgacggactgtgtatatattcatcctgttggtgccggctcctattacaccacgaagacctgctgtaccaaactcaagtgtacgatagaatctgtcctctatctccttatcatcacctgcgatagccttaagctctgcctttgtagcctcatcaaaatatgggtctgtacaccatttctcatattccgctctaaattccatttatattaacctcctatgtcagctagtaataagcctattaatgttaactataccgattttaccacattaacatgcatttgaaaagttttagttccttaatatttttttaaacaccaggctcctcatccaaagtggcatcatacatacaacaaactgtgccgcaaccgtaacaaaatagtcggccgcacttatggttcctgtctttaaaatacgctttcttcctgccttgtatttaaggaaataatcaaagccgccacgcctcttcagcatatcatcacctgttctggcatacacaagagtctcacctatatttgccatacgacagtgatttctgatcatattcgcccaaagaagagaatcctccataagcaggcagtcctgataattgcctgcagcaagcaccgcagatcttttgtacatcacagtcatgtgattgaacgcatcgcgctttctctgatactgctttatcacataatttccgagaggcactgttctctctgatataatattatgcatatcatcggaaaactcgctgatgtagccgcctatgatatcaagccccggattttccgaaaaagcattcagctgtctctcaaacctgtcaggcacacatatatcatccgtatccattctggccacaagctcattagagcaatgctttattccttcagcaagtgcaagaccgagcccgctgtttttttcaagctttaccgtaacaaaatttatttccgaaggcctgcattcataatctctgattgcttcataaagctcatctgtcagcctgccgtcctccaccagcactatctcatccggtaaaacagtctgtgaatatatgctttccatacactccctgaaatactcaggcttttccttgtaataaattgacagtaatactgaaaatttgactttattcataagtatcatcctcccagacaagcagactaatgtattaccgcaagcacagtctctatgcacagtctgatatcatttatcagtgaaaatctcttaagatacttaagattgtacctcatcttacccggcagcaccttgtgtatatatgtgtaatccacatcatctgcagtctcaagaagcctgtcctcatccttgtacctgatgcttgcctcactggtgattccggcaggcatcagaagcgtcgccatcatcgccggtgtatatgccatgacatacttctccacctcaggtcttgtgccaacaaagctcatatcaccacatagcacatttatgagctgcggaatctcatcaagcctgtactttctgatgacagcgccaactcttgtgattcttgaatcgccaccgacagtcacgagtgagccctttttgtcagcgtcattaaccatggttctgaacttgaatatgcgaaacttcctgccatactgtgtgatgcgctcctgtctgaaaaaaacaggtcctctgctatccacctttatccagacagcaaggaccagtataacaggcgaaagcagcacaagaagaacagcggacataatcacatcaaaaatgcgtttgaataccatgcttgtcctctttctgctcagatgcctgtaatatttaagtgtaaaatcatttttcatgaatgtaggaatctctccccatgttctccatctactcatgtaaaatctccaataaattactaattatatactccacatcctcatcgctaagctttgtgttgagaggaagtgtaatctcattctcatactgatgataagcgtttggaaaatcggctatgtcaaagcccatattcttatatgctgtcatcatcggaagcggcttgaaatgcacatttgtggcgatacctcgctccgccatctgcactataagcgcattgcgcctatccacgccgatgcccggtatgcgaagcagatacagatgtccgctcgatgtatgcctgtctgtaaaatgaggcacagtcaagagaccaagcggcttaaatgcctcgtcatagcgctctataatatcacggcgcctcttgagaagcccctcatatctgtcaagctgtaccagaccaatagcagcctgtatatctgtcatattgcacttatacgaaggagctacaatatcatactcccagttgcccagaccattcttgtgcaaagcatcctttgtctgtccgtggagtgaaagcagcataaactgcttgtagatatactcatcatcaaagccctctataggtctccaggtgagtgctcctccctctgctgtggtcagattcttgaccgcatggaacgaaatgcttgtaaaatcagctacattgccacacataatccgctcacctgctctcatgtaagaagcaccaaaagcatgagctgagtcagccgccacaatcacacgtccgattgccctctgcacatcatttgacggatgaaaaagagccttctttctctccacaatatcaaaaatcctgtcatagtcacaaggcacacctgcaatatcaaccggcacgataacctttgtcttttctgtaatagcagcttccagagcatcgtaatccatctcaaatgaatcaggtgctacgtctataaacttaagtgctgcacctacatgcaccgcagggcttgcagatgcagtatatgtgtatgcacttgtgatgacctcatcacctgcacctatccctaagaatctgagtatcgactcaagacacgcagtagcagagccaagggctacagccttattcgtgccacatagcttagcaatcctcttctcaaactccttggttcttggacctgttgtgatccatccgcttcgcagagcatcagcaacagctgacacctctgcctctgttatatcaggtggtgaaaatgaaatctgtctcttttccatagttatgttcctcgcttccggcataaaatatgccaaacatccagcttttacagtctatattatgagcttcaaaagatatttagtcctccaggtcaggatgatatgtctttaccacagaggctactatctgcttgatatcctttgcttctgaggtgcacgccttttcgagcatctcaagctgcttctcaaagagctcatcatccatctcaataggctcacccacatgaatcagcttgttcggcgtctccttgaggccttcctcgctcatcagcatctcctcgtatagcttctcgcccggacgcaggcctgtgtatacaatctgaatatccacatccggctccagtcctgaaagcctgataaggttcctagccatatcatcaatcttgaccggctcgcccatgtcgagcacgaaaatctcgcctccgtgggcatagagccctgcctgcagcacaagcgccacggcctccggaattgtcataaaatacctgataatacgcttgtccgtcacagtaacaggaccgccatcctctatctgcttcttaaacagcgggataacactaccattgctgccaagcacgtttccaaaacgcacagcgacaaaatcagtctccgtctgcctgttcatcatctgtataaccatctcacacagacgctttgatgcacccatgatattggtcggattaaccgccttatcagtagagataagcacgaacttcttcacatggtactcagctgcaatccttgagagctttaatgtgccaagcacattgttttttattgcctcattcgggctttcctccatcagcggtacatgcttatgtgcagctgcatgataaataatctcagggtgatatgtctggaatacatagtgcagcctgttagtattgcgcaccgagccgatcagcgtctccacccttacataaggatatttgcgcttcagctcctgctgtatatcgtatgcattattctcgtaaatatcaaaaatgataagaagcttcggatcctccctggctatctgacggcaaagctcactaccgattgagccaccgccacctgtaaccatgaccaccttgccctgtaaaaatgaatgaataccgtcattatccacaacaaccggatctcttccaagcaaatcctcaatgcttaccgggcgcagattggaaaccgatactcttccgtccaccatctgatagattcccggaaccacagacacatcacagcctgtgtccttacaaatattgagtatatccttcctgtccttaccggatgtagaaggtacagcatacacaattttcgtgatatcatacttctcaaccatctccggaatatcatttcggttgccgacaataggcactccgtctataaagcgccccagcttcgccggattgtcatctatgatgcagcaggcctttgtgtgcagatgtgagctcatgataagctccctgataagcatccttcccgcatttccggctcctataatcatgaccttctcatcaccgtttgcagagcctctctgctccagcatcttctgaccggttctgataaatctgtacgcaaaacggcatgctgtacaaagtgcaaagctgagcatcagtccgataatccagaaggcatacggcatcttgatctcataaacctcatgaatagtaacactcacaactgtaagcaccagaaaggcaccaataatatgcataaactcgttgatgctcgcaaagcgccatatactgtggtaaagcctgaaaatataaaacaccacaagtgaaatcaccataaacaatggcacaatgtgcagatacccctccaaaaatgagagcggaatatgtgaatatgaaaactcaaacctgatcatcaaagcgaaaaagaatgagattgcaatgatgcacatatcaataaaagcaagaaccaatgccctgaaaacccattgcttgtcattgcccatgtatgcgtccggcttctccggaccatcgtattttgttttgtcttttcgattatttgtatcttttttcatgtcaagtctattactcatataggattttctccttctgtcacacactgcaaaaaacagcttctatatccctatgtaaatcaacttctcataaactgcgtttaaatttacgctttattataccatatacacactattatagttcttattattttattaaatataccatatttagcgatttttgaaaacaaacagcttgcttatcacatagttgagcacaaccacaaccacctgtgctaccagcttcacccacatgcttggatagtccagaagcgtgataaaaataaagataatagtctcttcaataacaagtgtgatgaatctgccactgaaaaaagcaaacatctgtactaaaaatgccgtctttgtcggcgttgcaaccttaaacacccacttcttgttggtaacatatgaaaatagaacagcaaacacccatgccagagcgttcgcaatcagctcattgataccaaagaatacattaaaaatggcatatgcacctatgctgatcacaaaggtcatattgccaaaaaccgtgtataaaacaagctccttaaactcctctttcctgcttcgtattataatattatccatttctccacctatgtgacaggctttagcccctgtcgtaatttatacgtgtaagttgatagtaatgttaatttgcgatttttatataataactgcatagccaaaataagtcaatatgtgatatgatatctgcatgaaaaagaaaacacaaaaaaacaagagtataaaactaaactacatatataatgttagctaccagatactcacactgatcacaccgcttatcacagcgccgtacctctcgagggtgcttaaggcagacggaataggtgcatacagctatacctactcactggtatcatactttatcatgtttgccgcactgggcactgtaaactacggaaacagggaaatatcatacctgcaggaggacagagcaaaacgcacaaaaaccttctgggagattgagcttctatccgtcatcagcgtgattgtgtgtctgtgcgcatatatggtattcacacttgcctttccgcactcaccgctcaaaaagcacctgctattgattgaagccgtgtacctgatatcagttgcttctgatatctcctggctgtttcagggacttgaggaatttggcaaaatagtcggtcgaaacgtgatttttaaaatcataaacattgcttttatcttcatcgccgtacgctcagagagtgatttgctcatatatgtggcaggaatatgtctattagagctttttgccaatatatctatatggttttacctgcctcaatatgttgacagaccaaagcttaaagagcttaagccattctctcatctaagggctactctcacactatttgtaccaactatagcgacaaccatatacacagcgcttgacaaaaccatgctcaacaacataaccggcagcatgacagaaaacggctactatgagcaggccaacaagatatccaaaatggttctcatgctcgtaacctcactcggtactgtgatgcttccaagaataggaagagccttcagtgaaaataaaaaagacgaagtaaaagccctcctttataagagctttcaattcgtctggtttataggtcttgccctgtgctttggcctgataggcatcgcacgcaatttctcgccatggttttttggtccgggatatgaaaaggtgccatatctcatcatgataatggctacactgttaccgattataggcttaagcaatgtaatcggtatacagtatctggtaacaaccaagcgtgaaagcctgctgacacgctcagtatgtatcggagccacagccaattttgtcatgaatatgattctcatacatcagctctattcatacggtgcagccatagcctctgtcatctcggaggtaataataactgccgtacagctttacttcatacgaaatgagcttagcatcccaaaaatattttctctatcgtggaaatatctcatatcagcagtctgtatgcttatagtactgctgctcatggatgcaaggctgtcagtcagcttcatgcacacaatgattatgattgtgaccggatttatagtctatatggtgctgcttgtactgatgcgtgacgagatggtatgggaaggcataaggctcatcaaagccagaatcaaatgccactaaataataccattctgcaacgcttaatttcccggcagcttcacttatttggctgcctcatactctccaaccacctgtgcctctcctctgtcagtatattctcttgccattttcagagcttttttagtcctcttcacagactttttccatcttgaaagctctgattttgccgtatcagactttataccatattgattcacagccatatcgccaatatatgccgtaagctttttggcaccataagcattcaggtgctcaaaatcagcaaagtcatgggaatcatctatccctgcaatgctctcataatcagtactcaggtcaagaaaatcgtatccatactccttcgttatactttcaatctgctcaagacccgacttgtcagctgcctgtgtctcatgaggtggctgcagcaacagcacatgctctatgccaagcttattgcagtacgaaagcagctccttaagatatgctctgcattcatcagtcaacacataggcttctttagtaggctgtccgatatttgctagattgtcacggcctccggtgatgcctgtttttgaataaaagcccttcagatagcctccaccactgagcctcatataggcacgagtgacaaatgaggtatacaccgcctcagggtccttccagttgccatgatacttctccaatggaaaataaagggtatccgatatgttatccttcaccttttcatcatccttattgatatttttgggaatagtctttaccgtgtcaagcttgttctgtgacataggcatattgtcaatccactttctcagataaacctcatcagtcagattccaattgccctgactaaatgctgcagcactgatcacaagaagcttcggtttctgtctcttcgtaatctccgtgacaattgacttgtacatattgcatggcacagctcctattgaaagattgcacgacttaaggccatactcctcccacgccagagccggcgcatagcccgtgtatacctcacttggtccaatcatgaccatatcaaggctgttctttggctctgcgtaaaagccatatatgttttcaatatcgctgctgtcaatggcaataaatgccttggatgctatttgcatgagcaataggaggactattgcaaatgcagagattttaataaatttcatggtgtttccttttctattgaaacgctttattttgatattttttcagtaaacactatatagtatagcggattagtattaaaaaacaacaccctgattcatatttatcattttctgatataaatctgtttgcacgggtagaatataaaatcaataaacctgtttttctttatgatacactcatacaatatccagcatatagcagtgcttcctgcaaatccacatatacactgcagcgccatattggttataccagccctgttcaatataatcctgattccacctacaaatatcacattcatcgcataaaacggcatgctgtcacggccgatagtctgtaaccatttagggaaatcacaataccctgataaaaaatagcttactgcaaatataaatactgtcactatacaggcggtaaaccgctcaaacagactgctgaaaaggggattgctgctcatgtcatcctgtaatactatgccggacgcctctacaagcacactcataacggcaaggctcagcacagcatatctattatccagtttatcaagccacttcttaatcaggcatcccagataaaagtacatctgaaagccggctatgtagttaaagcccacatagtgaaagctgccatagcatgtgaaagcaattattaaaaacagcacaaataaaagctccattttataattaaaatgtggcagaagcctcgcaaacacataatcagccatatacgccacacaatataagagaaacagtgcgtataaataccataaaaactctatcggcttccacggtatgcttatcaggctgctaacggtaaccggctcccttatcaaatttgaaagggcaaatttaataatccagtaaataactgaaatcatcacgtaaggcagcatgatattaaatgctttatgacctatccggctaaaaatgccttgtgaagcattccctacatattcactgtataagaagcctgaaactgcgataaaacaaggcatgtgaaagctgtatattacatttgcaataccattcattgtatcatcaaatgaatacatgtctgtcaggcccaatgtagtgtgacctaaaatcacaaataaaataaggatgccctttatgaaatcaattgttttatctcgtgtggtgttggtttgcatgttatgacctttccttaaacacaaccagcttactaatcacataattcagcacaataacaataacctgcgcaatcaccttaatcagcatactattaaacccaagccatgtgataaacacaagcaatatagcttcctcaacaaccagtgtaatcactcgccctgaataaaacacaaacatctgctttataaatgcctgctcactatcagtcggtgactgaaatacccagacacgattcgtcagaaatgcaaacataacagttataatccatgaaagaatattggcaatgagctcatttattcccataccaacattaaaacatgcatatgtagctatgctcacaataaagctcaatccaccaaaaaataaatacaatagcatctctttgtacttcttgtagaatggattaaaaatcctaagtataggtaattccattaatttatcaaatactttcattccacataaaacctaataaatcacaacctttgttccatttggaatattatcatacagccactttgcattattaatgtccaatcttacacagccatgagaaacttgtttgccaagcgttccatcttgtatatgtgtcatactaccacgattataaagcactgaatggaacaaatagtttccataaaactgcgtataataccaacatgtataagacctgctaccaaaagatttacctcttccataaattgtaaactccccttttactgtaggcgtagaaggctttcccggcccacatgaccacaatgcaactcgactccaattaccatagcttccactataaacgcctacctgacatgcagatgtgtctgtcataataagccatcttgtagaacttgctcttacctgtgcgttctgagacattacatctaatgctaccggttttggtgtatatacgggcttatttttataataatttgcaacacttccaggtgcaggtgccccctttcttaccaaattaacccttagagcctctactctataactaataccagttgagcctgatgtctgcccatttgaagcccaacctaaccatccataattctctatatgtgaactgtagtatatattataaaatgttgctaactgacctgtaagctttatctcaatggcttctacctgcttagccctacatgaagttccagaatattgccccaaagttttccatccagtccgtcctatatcctgcacatgcgttctatacatgatagtaccggttaatgaatgtacaatatcctgagataaattgatattaattccttcaattctcagttttcgtcctgtcgtacctgtaatgtttccccctgaaacccacggcatattacctatatcctgtttatagttctattttatcacatatgtattttatttaaaacaaaaaaagaaactaatacaaattatctgtatcagtttcttttttattaatttatctggcaatatatgccattgtatttttagaaattattccaccataattgttgccaggtgctgactgtcctttcttcactaatactatctgcaatgcctctaaatgaaggttttgtccggatgttcctgcattctgtccattctttgcccatccaagccatccgtaattttgtgcatgtactctgtaatagatatcgtattgatttgccatttctcccgtcagagacatatttattgcctctacattcagagctctgcctgtcgttcctgcaagtgcaccatccatcaccgtattctgccagccgatattctgtacatgtgtctggtattttattcctcctgaacacggctgcccgtcaagatctatccttattgcttcaagtccaagatttctgcctgttgttccactgagacttccgttttccactgcactctgccagccgacatttctcacatggctctgatattttactgacgcatttgtattgattgccggaacagcactgctttttgatatatatgcgtttgtgttattagatatataaccgccatatgccgttgtcggtgctgcatctccttttgctgttacaactatctggattgcctcaagtctatatgcatatcctgaggttcctgctgcctctccattttttgcccaggctaaccagccatagttctgtgcatgtactctgtagtatatatcatacttatcagcatctttaccggtaagttttagcatcaacgcttccacatgcttattctggccggttgttccactctgttctccattgaacgagtttccatgccatccgtcatttttcacatgtgttgtatagatcacaccaatgtctgcatctgattttacatttatttttattgcctcaagctgcagtcctctgcctacggttcctgccatagctccgtttgacacaccattctgccatccgatatttgctacatgtgtctgatatgatactgatacactgtttaatacccaatgtgcatacagtacatgatcagaagctgtttttactacactctcagcatttatctgttctccactatctacagccgtccaccagcctgcaaatgtatatccgcttcttgtcggtgtaggtaattcaccatatgcatttccaaaagtaacagtttttgtattagcagtaactgttccaccatcagcattaaatgtaactgcgtagctgtttgctgtccagtgtgcatagatagtctgatcagatgtaacctctacttttgtatctttagtaatctgtgttccaccgttagctgctgtataccagccggtaaatgtataaccatctcttttaggtgattccaaatcgccatatgtgccgccatatgtaatattcttgcttgtatttgtaatattacctcctgctgcatcgaaatttaattttactgtaaccggagcccaaactgcattaactgttgtatctgaagctatcttattatatgccttatcccacgataatacatacccggtctttgttatttccggagctttcgcccctctcatacacaaaacattctgtgactcaacaatctgaccattatcaacaaaatccactttatatctaagtggtgacgcatcacgttcttcatttataccatatgatatgtaatggtctacataaccctcataatcatcaccaaacgcactttgtaagtccctatatcttgttttgtaacttataacatcaaaattctcacttgcctgacgtccctctcgtattccattttctagataatgctgataatataaataccaattatctccaaaagcattttgcaaatctatattattatccttataaaaatgcacatcaaaaatttcattaccacgacgaccttcagccatgccatatttaataaaatgttgcagtgcagcttctgcagtatttccccaattattcttcacatcaggattattattcaaataatatgatgcgtcaaatataaggtgatagtcttcttgttttaatccaaaataattaacaattccctgtgcatctgcgatgccaagtttttttaaagctgtctccgatccaaggtaattagtcgcgtcactttgattacttatatacgcatgttcaataataattcccgggaaaccggcctttttactatttcttattacactatagtaatcacaaatagatccatctgtataggtatctccactctcagaatttctgatacgcgttccatcatttgccagtcctaatgcgactaactgtttaagaacctcgtttgctaatgctcccccctgtgcaccaatatttgcatttaagctggaattaggataataaactgttgcgccatgaacactcgagctggttgtcgaattattatgaattgaaacaaatacacttgctcctactgacttagcatagtttactctatcttcaagagctacataatgatcatcatttcttgtcatatatacgtttacacgtttgtatttactaagttcttccttgcaatactgtgcaatcttcaaattaagtgttttttctaaataggtctttccaccataacttgcctgtgctccaccatcgttgccgccatgccccggatcaagaacaacattcactgccgaactagctctaaagagattattctgctgtacatcagccgctgctgcaatagcctcgctaattgtattccccgcagcttgtgttgatgtttcatccggatttattactactgcatcatacacttcactgcccgtattttcattatctgaattgctattatctgaatcctccgcatatgcatcagcattcaaatccattacaacagtatcaattccaaactgtgaattaattccaatagcttcaaagtctactgaatacccgtcagtttcgagagacttaactgtataacagcctgaaaccagatcacttgattcaaatatcaggtttccatcctccgtcatctctccacttatttcaaatgactgatttaaatcggtattttcaactgttaatctagcatttgattgatcaatgccatccgctaatccaacaattatccttacagcatctccctttttaacagatggatctgcaacagataaatatgtaactatctgattttcactattatctcgttgttgatagctctccgtactattacctgtctctgcagaatcagcaaaaacaaaagtgtttgccgaaatcagcatagaaagcgtcaacaacagtgctactacttttttcatcttaaaacgcctttccttttgtaataaatctaaaatatagtttatcacataagaaaagacgtttaaagagttacctttttatattttcttaagattttttataattcgacggattgcaacaagttaattatcaactcataatatgtatcaggaaatgctagtatttcatattttatcacaacaagaaagacaacgtttaaagactttttacctattttatttagtttttaccataaagcaatttcttcctatataattgagaatctttcaataattcaacatttatatagtccagaccatatttttcaatcaaagtatcctctccagaataaaggttagttcctaatccaagtctatttccctctatttgaacccctaaagctgccaatgttgttggatacaagtccaaagttgtatattctctttcaacacatggtttttcattaaccgctgcgccattaacaattgtaaaatatgttcttctattaaaatctgttgcattttgtctttctatataatcagaatccattgtaagatgatctccggaaataacaactgttgtattatcataaaaatcctgttgtttaatccaatccaggaattcagaaacttgcctgcttgaacatgcaataacattactatattgttcatcatattgattctgacataattcacatacatagccatctgtaaaatgcgtatctactgttaacattgtaagattaaacggttcatctttagaagctaaattatttaattcattttttgcatattcaaataatttttcatcttcatatccccaccaaaccatataatcatcatctatgtagcctctatcaattgcagtataataatcaaaaatatcatagtttccgtgtccgtgaaaatacgatgaacgtccagcaaatttcttatctgaaccaatcaaaaattcctgattgtatccttctcctttcaggacatctcctatagcccaaacacctggaacataattattatctgattcccactttgaatttaaggtatcattacttattaagttctcattaattggtacaccggatgtctgtgcaaccaatccacccattgtaaaagtcgcgcccgaagtcgtatacgcaccattcaattttccatatattccaaaattttcattctccaatgaaatttgtgtaagctccggaatataattttcactcatagcaccaccaacgctctgatctgaatatgtcatttccatagattctaaaaaaatatatatcagatttcttttttcctttgggaatgtaattgctacatctcttccatcaacataattatcttcatatatcgttgaatcctgctttgtatattttaaatacgatatgatatcaaaatggaaacaacacaatataattgaatatccaattgctatacaccctaaaagcgacatccaaaatttatatatccacttatttttcttttttctgaatatcaataatccaaatgtaaccattaaaacgcatattataataatcaaaataatggaaataaatatcacactgaatgatgaagtatttgttccttccaaaggtgtatttaaatgatatattatctgtcctattggcacatctttaaaatttttctgcatataccaaaaaccatatagcaatgctccacctaatgcagttaatatatatgttatgaaagcagacaggaaattaaaaatcctactatgtttcttatcatcattattctgacacaataatacaaattgcaaaataccaaatagcaaataacaaaacgtgcctatataaaacaatactaattgtctattcaaaaacagtttaactaccttataatttagtttttgtgacaaaataaacatattatcctgagtaagtgcagtaatatacaagccatcatcatgtacctcatactcaacatccttacgagatgatatgtatttttctagtttcgaaccagatacttctatggaatttccccaaaaatcagaaagtgtaatactcttaatcgaatatacctctaatgtatttataggatcaactctaaataaattattgttgatttctgccagacccatttttattttgaaattcgcttttttattttcaaaatatgcattaatactatcctcttctgtcattttcttaacactgggcgcataatacatttgggcatagtttttatttgaatgctcttctccatattcaatcgaaaaattatatgtatgttttccgaatattcctatacataatccaattaataataacgcaataaaagccacgtctattatagctaaaactacacttaacaagcgtctattattacataattcgttttttatctttcgcataataaaataccccttatttatatataaagaaacaaggagtattatattataatcttgtatttttttcaactttttcttaattttttcttaattttttcttaatctctttttgtgttcttttttaaaattgtatagattatacaaaaataaaatattaaaaacaacaccattacagaagtgagaaaaccgtatgcgccaccttttattccatatctagccactaagtattcatttgccaatttcgcaactatagcagaaactatatatcctataattatcattcctgattttcgcatcacagttaaaacataataaccaaaataagataacgcattaattccacccgcaaacataagtaaaatcaataccatcctatattgtattaattctgaacctgttaaaatctgtaatacaggaattcctaaaatccaagccccaattatacaaattatagtaaagcctactattattactgatatttttgatattgaaacaataaatggtttcttgtaatctgaagcatattcgtctgctaatttagttaacgcgggcttcataacaaaagttgcaaatagatttacaatagaaacaggcataaataatgtctgaaaatatgctgaatagtttgatgccatttttgcatctattgctattcgactagcacttaaaatatatgaccataaaaaagaacctataaataaaggaaaacaattcttgagaatacccaaaatatatttttcattccagataacagctatatttctaaatgttttcatcggcattacatcaaaaataatcaaaccaagtattgcaataagaattgacaacgatatagctaaaatcatatttttcgtaataataagaactactaacattacagtaactgacataaccgttctaaatgcttgagattttcctgttaaatctaaacgaccatctttttgaaatgctccctcgtataaatctgcatatgcatcaacaaatctataaatacacatcaataaaataacgatgcacttatatatatttgatttagctgtcaatatcgaataaacgatactaacaacaaccgacacaacaaataaaatatattttactgccttgtaatgtccaaattcaaaagtgcttttagtatctgtaacctgaaatgtccttgtttcataatactctataaaagcaagcatctgcgctactgttattgctatggcaaaaattcctccatcatcttcaccaactattctaattatcaataaagataatatcattgatgctgccgcaaatatcatgcttccaatcatattccaaacaaaattatttttttcagaggtctcactactaacatatttatgacacgctattgttaatagtttatttactttcattttcctcttctttcttataataatttctcactgcaatttcttcggtaagactgtttatcatattatctaaattggaaattcttaaagtcaaataaaaattatgaacaaaaagtaccattattgaaaatagaaatataaaatttaccgggctttttattccgcatatatctgcaaaaaaatatgcaatttgaggaaaaatacttaaaattaataataaaatacttgatacaatccaaaataaagcatattcaatttttagttttgctttctttattttcttcattataaagaaaaaaacacataatgacgcaacaaataaaataactctcaatgatgttgacatactctatatcctccctatctttttctaaaattctgtacaaacaatatagacattaacattctaaacatataagaaatggatcttgcaaaattcaaataacttgttcctgcaacacgctccttcatttcaacctgcacctcagcaacctttgctccattttttatcaaatatgatatcgtatccggttctggtccataattaatttcctgtgcaaattctttaatacattttctgctatataatctcataccagatgttggatcatttatttttactccagttgtcagttttatcgctgtggatataagtctgcttcccaacattctagcagaaataggctttttttcatccacaaatcttgaaccaataacaatatcatagccttcatcaagcttctttagcattttttcgatatattcaggtaaatgctgtccatctgcgtcaaactgaataaagcaatcgtaaccttttaaataagcatattttgctcccgcctgaaatcctcctgccaatccaagatttattggcaaatcaattatattatatttatttttttcacaaactgagtatgtgctatcctttgagccatcatttacaataacataatcaaattgtgaataattttctttaatattattcacaacttcttctatactttcttcctcattatacgctgggattactattaatagccgattcatatctacaccttactttctatacattgttttctttttcactaagagaatatatttttgttaagacctttgcaaccggtctattccaaaattttaaaaacatctcataatcctctttacttcttaaattatctcctattactgctgatgtttccgactcttcatgaattctgtgtgccattaatatttcattacaatataaaaactccccctctgctctagatattctttcccatgtttcccaatcaacattacttctaaaacctgttttaaataacggttcataatcacataaagcttcctttgaatatgtaacagaaggacagcaaattgcatttccaagtcttatagcacttctcttatttttaattctgtatgccttgtcatgattccttaaattctttaacattatccttttcagtttcaaattaaacccattgtcagaaaaatttccattaatgagctccgagtaatctgaaaacgcgattaaagcatgtggatatttatcaaatgtatttataatttcagttgaataattttctctataaatatcatcctgatgtgctattgttatatattgcgcatcagagcatgaatatgcaaaattccaatctcccgcaattcccttttcacctttattaacgaacatttcaatctgatatttattacataaattttcaatatagttgttcggtgttgatgttgctaacttaatatttgatttttttttctgttttttcaatgaaattatgcaatcttctaaatatttactttctttatatgcacaaatcacaaactcatgttttatcatttttcctccctataacattttgattaaaatatactgatatatgcaccacattgaaacgctttgcataattatcattacaatataattatatactctataatcaaatttcaacctgattccactaccacccaaaacggcaaataatggataaatcaatggtgttatatatcttgattgacatccagctattgtatttgaaccaacttctgtatatgcaatgtacagtgatgtagctatcaaaactactgttccaaaaaacatcaaaatatcatatatataaactattttcgaatatgccttaacgtcgtattcacgtttatctgttaatgttgtaaaaaccaaaaatgcaaatactattatagcaactgttgttgtaccaattcccagatatgcaaagtgatcaataaacccattcatatttctaattgacaaatagtctttcaaaaaatttaataacgtacgtgtatattctactgggttatgaataatatacaatatctgttcagttggattaacacctgcaccacctcttacatcaccgccttttgaagtttcaaaaatggttttcaatagcaaatcaaataacataattacaaaggccatagagcaaatgctataatattttttcttattctcaattttgttccgtttcatcaaaaatggaattatcaaaaatgctaaataaatttgctttggaattattgctattgcaaatgctataaccataatgaccgtatcttttgtcgaaacaacaccttcttcctgacagttgcccacaaaatacgccattccaatcatgacaaatccaataacccatgtatcataagaataattgcttgctataaataaagatgttggaaacatagccacaacagctaatatcatttttccactatgtaatcgtttcatggcaaaataacaacataatgaatatactaatactattggaatttgtccaaatttatatatcacaaaaaagtttgctccaaacaatcttagcaaggcaatcacaactccactaggcaatgccgtcaaagaaatattatgatctatatattttattattgcatcactattcttgtttaaagtattaatcttttcaatattttgagcataagtgtctgtattctgaataaaattccccccattagtcaagacttctaactctggttctgataaacctatatgtgcaacagacgaagaacttattgcaaatttaaaatgtgaatcaatatcccaactaatatgaccaattggagaaacaaataacatagtaatagaagaaacaaaaaccagcctgacaagtaatttctccggcttatcttttatcgttctatagctaatcaatataaataaaataatagcgactatagcagaacaaaatagccacgtactatacataaactttagtccactaacaaaatacgcaattatagctcctataaccaaagaaactataaatataagtaaatctcttaatgctattttatattttctaccgataaagcaaataattgtatcactaaaattcaattttttgtctataaataataaaatcgatataataaaaacagtaaaacaaatagagtaaattattctttcataatgcatattttctttgtcaatactaattattgacttacctgaatatatttctatatcatcaaagttaaaatcagaatcaacatctattctaatttgtttaaggcttttgttagtaagttcaaaccctacgttgtcatcccctgaaaaaatagtttttatacaactatcattttcattaaattcattgccatcatcaaaatataactgtacatctaaatcgccagatactttatcttttaatttaataacaattgttgttacattctttatattttcttttttaaaaacaatatgcggatctactccattaatacaaatttgaccactttgatttatataacaaccgctatattctattatatccgatgtatcatatcgttctaataaattatcagcatttccgcgaatctttaattctttacgaggggaccaaaccatggctactgtcacaagacttaatatactaaatattaaaatccataatgatattttgctaatatttttttttgacatttcttactcctacaacaaatgatttcatttgtttattataatatgtcgttttgtcttcgttgcttttccattacagcacacatatatttgatacttacctgcatcaattttgtcgaactcacatataaatcctgataattctgcacctggttttcgcttaaaatgaatagccaaatcgcttctaaaaatcttacgagtagttattagataggacttattatctgatttcagtaataattgtatattcccattatacggtttttcattataaaatccccatccctcaattatacatttatttcctacataaatattatcaatcgcattcacaacttttctacaaatatcaaattcctttgtacattcttcaacaacacactttccaatattctctttcatcatattatatgagaaatcaggagcatgctgtgtcagatttgagctataaaatggatctttatttttaaagtacggatgcaatttatataaatgtttttgttctgccattaatcgtttaaactttttctcacttttcaaatcgttaccacgacttaccgattcatgatgataaagtataacatcattcctaacaacattataatatccagcctctacaagcctaaaacaaagttcaacgtcattatatgcaaccggcatatcctcattaaacccatttactttattaaactttgcagcatttacgagcatacaagcagccgtaacaacaagccagttataatctattttatttcgtccgaaataatatatattatcatcattataacctataaatgcatgaactggaccattagcaatattgataacaccaatatgctgaattttcttactattcgggtataacagctttgccccaactgctccaacatgctctaattctgcatgtccaaccattctttcaagccattcctcattaattatttcaatatcatcatttagaaataagtagtaatcacccttagcttctttagctcctatattacacattcttgaaaagttaaagttcattttttcatagatatatctaaaattatacttgtctgctaatccctgatacagtttcttattttcgtcattgcttccattgtccacaagaataacttcaaaattcctatatctggtaatttcatacaaggtctctatacatctttttaagactttatagttgtcttttgatggtattatcacgcttataagcggattagtctgcgagatataatttaccctatactgatacattatatctaccatttccaaattagcctttagaccacgtctctcaagagcatcctccttactcttctttgcagcctcaaatatatatggctttgcagatggatccaaagctgttgattcttttctttctctccaatgatataagattttatcaatatgagctattttatttgtcttttcagtaaatctaagagtaaaatcatagtcttgtgcaccttcataaccagctcttaatccacctatctcatttgcaatacttctgcgatacactccaaaatgacaagtatacatatgtgacattaatgtatccggagaccaatccggcttaaaatgtggcatatgtctattgaaaccatcatcatcaattttatcctcatcactatagataaaatccaaattgggattttcattcaatttttttacaacttcataaagtgcatttggacgcaatacatcatcacaatccataaatgcgacaaattcccctgtcgcaatttcaagcgctgaatttgtgcaacgtgaaatatgaccattctctgttctgtagacaatcttgattttttcgtttccttcatactttgcaagagtctctctcacactatcccatgaagaacagtcatcagccagacaaagctcccaatttgtatatacctgattaagtacagactcaatacaaggaataagatgtctgtccagtacattataaacaggtaccaaaattgaaatcttaggattatattcaaacttctcatcatagttctcatttgcttcaagcatagtaatccatgtttcatattccaaactgcgatttaatcttgctgccctgcgtgttcttatcttctccggaactactttatgataaattggtcttgctactttttttatattttgcttgatagtattcataaataataacctgcacccttcaattgcttatcttttatcgcgcttcaatctcaatatatggattgtatactgcatatttatttaatttcttcaaagtcttacccagaattaattctaaatcattctcacatccagccatatccggcattatcatagataataatacactcttatctaacatcacacagtctgatgagactgaataacaatctcttgtacttacaagtctgttaaaatttcctgcttcggatcttccatatcccttaaacggatatataacgcttccttcctgatctacatctatgccagcctgcaaaatatatttctttttacatatttttgcacctactgctcctacctccggtcttgttatatatccaagcatttcttctatacatttaaagctcatgactttatatctgttattgataatccaaatataatcagtttgtatatcttttacaacttcttttatctgttcttttgtttctataaacaagtaattcttattaacgtacttggaactgcactcaattgaatccacacatgccttatcatatattctatcaccaaccacaataatagttattggcgttgtcttactatacccgtatatgatgtgataagtcccatgatatggtccttcttcaaccttagcatcaattttctttcttttaatatggtcttcaagtgctttttttccggctttaaatgcataaagcttactatcaggattttcagatgtagaattttcatggcatcgccaatgatataatatcttaggtatatgatatatagaatcagttttttctgcacacctaagaatataatcataatcctgtgcaccatccaagtcaggatttaaaattccaacctgcttagcaatcgacattcttactacaaacaaatgacaaatataattattagctcttaaaagatctatattaaaattcggtttgaaatatggttggaagcgttttgtaccaccagcaactattttatcttcatctgaatatataatatctgcatcaggctcattctctaaaagttttgcgcactcaaaaagtgcatccggagctaacatatcatcatgatctgcaaaaacaataaaatctcctgttgccatttctatagcagcatttgtatttgctgaaatcccatgattttcctctaaaactttaaatttaatccttttatcatcagccagatacttttcaattatattgatagtctctttatcttcaccagatttatattcgctagcatcgacaatacagagctcccaatcagaatatgtctgtgcttttatagaatcaatcatagctcttagatattctgcattggttctatataccggcacgactatactaaatttatagtcctctttaaaaatgtatcttctttgcagctctagcaaattatcatcaagtcggtttttctcctgccagattttatatgcattttcttcatcaagctttctcttgatttttttggcagttgcaaacagaccattttttttaatatttaatactattccactattcatatttacattgcatcttcgttgacttctcttacaacaccagttatttctacacttgaaacgccatgactaaatgacatatctatccaaggatcatcctttccaaaatagaatacatcatcaacttgtctgccattcgtagctataatattgacatttgcatcttctgctacaatcttcaagtcactaagcgatatcgttgtaccctctaccggatcatatctcacatgctggcattttgtcgggaattcatatacctgtttaaagatattaccatccatcggcataacctgagtaaatgtagctctctcattaaagcctgttccatcatcaaagtaaagcttcgacaattcatcgttttcactcttcttaaactgatatgcatcacatacctcttttgccccaccaatcatctttactttaccatgatcaagccaaacaactgtatcacacatctcccgtatctgagatatcatatgtgatacaaatagcactgtagttccgccactcatcaaatcaagcattttattcttacttttttcctgaaagtcagcatctcctacagctaatatttcatccacaatcagtatttccggattcacaatagtcgccaccgaaaaagccagtctcataagcattccggaggaatagtttctaattggctgctctataaactctccaagctcagagaattcaaggatttcatcaaacttttcatccaggaactcttttgaatatcccagtattgaaccattaagatatatattttctctgccactaagatccatatcaaagccacttccgagctctagcattggaacaatattaccatgtgttacgacagttccctctgtaggcttcataatccctgagattaccttcaatattgtactttttccggctccgttgtgacctactattcccacaacctcaccttttttcacattgaagctcacatctttaagtgcccagaattcctcatatttaagttttcccttcactttctggatcatgaactctttcaggctattcaatttgtcatttgccattcgaaagcatatagacacatcttttacttctatcatgttcataggtcatactccttaatgtttacagattgaaaataaacttgtcctcattctttttaaagaaccagaaaccaagtataaatggtacaactgatagcagaatacaatataaataatgctgtggtgacggtgataccccatctatgagaatgcttctcacaaagtatataaactgatacatcggattacaatgaaaagcttttaataatataggtgaagtaataatattttctgtatagaaaataggtgtcgcatagagccacactgtgctcagtacattccatataaactgcgtatccttaaaaaacaccattgacgtactaaggaaatagctcattcccagactaaatatcatcatgcatatgataggaaatggcaataatataaatgccggtctaggccataatcctgtaacaaatgtcactatgagcaaagggataagtgaaaatccaaggtttactaatgatgacattgcccttgacaaaggatatatatatttaggtacatatacctttgttataagtgaagagtttgatgttatagctgaaattcccatagcacaacattcattaaagaagttgaacataacaattccactaagcagatatacagggtaattcgccactcctgaactaaatatagtagaaaataccacatactgaacaagcatcattaagagtggattcaaaaagctccaacacacaccaagcacagaacgcttatatttagtcttaaaatctctctttaccaactggcttatcaggaacttgtaatgtgaaacagaatctaagaatgcaataactactgtttgtttacctgatttccgtttatttaatgatacaacaaaataaacaataagaagaattcctattgctcccattattatccaataatagttaccaaaccatattgtgttcattccatctatagagaggcataactccccctcaagaccctcgttatttacatacacgcgagtgctatcatcatatgatttggatatctctccttttgccatcttgatagaatttccatagtaaaaagagatttgactgtcgccatccaatgatttgcaaatcaattctaatgtgtagctttcattattatccaccttgattttttcaggcaattttatatcatatggctgattatcacttagctctgacatatccacatcaatatcagcaatattttttccgtttgtatctgtaatcttcgcttcaagcatcccctctgcggttttgccataggttgccggtgtaactgtcaccccttcaagatactggctatcaaccgtaaatgtctgcttaattgtatctccctcagcaaactctcctacaacctgagactgtgagacagtatcactctgagtttcctggtagtgaaactgcttacttgacactaaatatactaaacatatagaagcaaaataaaccaacaatgttattccaaatactttttttataaatttttcttccataacaattaaattctttcctaatctaaaatattatttgtcactaaatgcctaagaattatactctctactgatacttttgtcaaatcatccccacacagcctgtcccagccgtctcatggtcccggtcttatacatatcattttccttataaaaccgttgtctcacgcgtctggatttgccttccagtgccgcataccttactgccagactgtcagttggcagattatatgtctttgcaaattctctcgcctgaagccgtcccagcctcatgctctcctgtatctgttttttctgccagacacggcgcacaatatatgagagcttatttatcccaagcgctcccaggctgttgtctccatgctgtctgtacaatatcgttggctcatctatgaatgctgtttttccaaactgtgcggctacaagtgctgcccaccagtcatgcattatagtgttgtctatatcagtgatgtgaagcatcttatctcttaaagccatgtttaccatcattgtacagcctgtcacagaattctgcaatataaactggttgatcgtacgcttgtggcagtcaagactctggtattcgctcatcgtgtccgctattgtatttagctcgctatctaccacgcgaagctccgtgtataccaggcacggaacatctgctttgttctcaatagtaagcatcttatcacatgtcagctctatctttttatccagccacacatcatcctgatcacaggtcatatagtatggcgcttccacctgaccaaacagatagaaaaagttatattttgctccaccggttgatttaccatctatcagatgtatcttatccgggtatttttccacatagttttctacagcagctatcgtgttgtctgtagagccatcatcgtgtatatatagctcccagtccttgcaggtctgcgacaggatagagtctatctgctgacatatatatttttccccattgtatgtagccattagaatggctatcttgtctgtgctatgcattcttcctcttccactttcttccggccctgttgcccagaaactttgccgcactgtcaaatatgcagtgcactgctgcccctatcttgaactgctttaagagctgtttttctatgaaaagcaccatcctgatgccctcacctgtggtaccgtcacactttatctcatccttataggtctccataaagaccgctacatcaaagttgcgcttgtactgctgcttaaatgtatagttgtgtgagtgatacacctgcgctgtggcacaatagcctatcttgtatcctgccctaagtgccctggctgccatcagcatatcctcatttgtgagcagtgggctttcaaagccacctatgtcttcaaagaaatcacgtctgtaggctgagcatacatctgagaagaaatatgcctttattccaagtcgtggtatatcctctttgcttctgacaaagcctcctgccggataattaaactccctgactaatgcctcgtcaggcttagcatcccttctcgggagctgtctggctgatatcataacgacttcttcgttttcaaagcctgccagcatattttcaacatagtgttcatctgaaggcagcgcatcctgcgacaaaaacatcactatatcaccctttgacatggctacagcatagtttctcgtgccaccatgatcaaattcgcttctcttgacctttagtgtcctaaagcctgccttctctgccatgcgcactgtggcatcctcggattctgagtctatcactattatctcatcgggcttacgtgtctgcctgcccagtatatctatcagaccgggcatatactctgcagcgttgagagtaggtattatgagacttattgttatactatttaaatccaatttcttcattatatttctcacatatgttctgattattgtgctccatcctccctgatcacagagaaaacggttctgaaaagtatctttatatccatccaaagcgagcagtgctccacatagtacatctccatcctctggcgctctccgctctcataggtggcattgtttctggcatatgcctgccagtagcctgtcagtcccggctttacgctcagaagctttgcgatgtccttaccgtatatctcggtttccttctccacgattggacgcggtcccactatggagagctcgcccttaagtatgttgattagctgtggcagctcatcaaggctggtctttcgcaggaagcctcctatttttgtgattcgaggatcattgtctatcttgaattcctttacatactgctcaagctgttcaggtgtcagtatcttttccagatcacctgcgttcgtcttcatgctcctgaacttatatacagatattttctttcccttatatccgactcttgtgtgcccatagaacacgctgccgccatcactcattctgattatcacagcgagtatgataaataccggtgacagtactataagtccaagcagtgaggcaacaatatccaccagacgctttataaatctgtataccggctttccgctgccttgaatggtctgatatgcctgtatgtcatagcttaaaggctctctatccttcactagctcgctcaagcatctcatctcatcaaccagctgtgccggcatgacaagctctctctttgacacagacctgcacagaggacatactgccctgaaaataatcctcagatcaagacctacagtccagttcagtatatattcctgatcgtactcgctttgctcctcctcggtaagcagcctgtgttccctgctgtatacctgccagaagcctatgattccaggctttacagatagactttttctgtgaaatgcagagtattctataaactccggcagtgatggagccggatttcccaccatgctcatgtctccccacagcacattccaggctgacggcagattttcaagtcttaatgccctaagcattcttccaaccggtgtaaatctcggatctttccccttctttccatccagtagccatttatcatatctatccctcgcatccatatacatggtgcggaatttataataataaaatcttcgtccgtttttgccgactctgacaagcgatatgagcaccggtccatggtcgcctgtgactattttgcccataaatgctacaaaccacacaggcactataagtatgcttcctgccacgccaaacagcagatctatcagctttttaataagcagatgccttacacggtatgtcttattcttccatgtgaccactgcgtattttccaaggaaatccatatagtgctcaccgaccttggcctcatactcgttgacattcaggtgcactgtcttacccatctcattgagtactgtaacaaactctctctgcttaaacggatagttgtccggcagatgcacaaacactgagtctatctctgctgttgatatcacctgaagcagattatcggcggttgccacgacctctatcttgtccactatctcaccgaccatatcacagtccagtatcgctatgtttgatatacgaaaatcccagtttcttgtagtctttatcttttttatcactcgctccacctggtctgatgtggtgacaagcatgattttctcattggcccccgagcggtgatattcctttgtcaccagtcttttcagcagctgtctgactatcacagtgaatatagtactcagtataaaggtcatacccatctgccctctggagaaatattcacttgtttttgtaaagtatacgcagccgacggtgattgcgcccacatatacatacatcttcaggacattgtatatttcaggaaagagctttcggtttatcagattatcatctgcaaatgccacaaaatgtaccaccacatatgccaccagctccaccagaaatagtgtaagatagtgctctgtatggtttataagtcccgttctaaagaaaccgaacttgtaccagtttgcaatcagataagatgtaaacatcacaattatatcaagaagtacctcgaggtactggattatccatttttttgagttcatatctttctcccggatttttcctcatcagcagtatctataccggcaagcagtacaagcaggaacggatcatatgccacctcgagcagatgatgctccatgaaggagtgcactccaatcatgactattgctgcaaaaagcacatattgctttgcccctattgccctatgacctataactattaataatataagcactacagcaaatactattattccatactcaaacagcattctaagatacatatcatctataaagaaatactttgcagggtctatcccggtcgggtctgcaatgcctccccagccctgttcctctataaactgtccaaatgccttgatgctatactcactccacactttgtggctcaccatcagcctttgagatagtacagtgtctattttaaccattacagcattgctcgcgctataaaaatagctcagcgccaaaaacagacccgcccacactatcggcaaatatttaaatatctcacacaccctgcgtgccagatttttcctctcaagcagataaatcaggcctgtcagaaccaggaatcctgtcaggcacactgttcccgtaaaggctcctgcttttatatatataaatacacctgccacaattacgattagccatctgagccctgccggatatctgtatttttcgttttcccaaaccctctgccatataccaaggcagcttaccgccaatatcaggtaaaatacatgtgccgcaaagtccgtcggatatataatgccgtatgaatgtctggccgccgctgcatttctcggtgaatagcctatcacatccgctatcacacctgtctgactagctatagctgccactataagcatgaccgataccaccgccgtatatacctttagtatattgtcaaacctcacattttttgccccggcaataagtagtaccggctgcagcagttcataataaccggtttgtaagcctactattccaaatataagaacaactacggcaattgcaagctgctcttttctgctgtaatatccggaaaaaaggaccttggctcctgtatacaaaaccatcgctgcaagaaaaagcttaaaggttcctaccagcacctgctgcgagaacatagtagtctcgtatacacattttgccagcacaataccatataatataaagtatcctacatcccatctgttaattttctgtgttgaaatcgatttatttttgtccataaatgatattttaccatatttgatatataattgccacatttcaaaaaattataacaaaaatttaataaaagctacagtttatgcgtctccgctcaactgtagcctttaaaatcgacctatttaattacttcaggtcatcatctgtaattgtttcaccattcataaccttctgtatcaactgtttagcatgctctacgctgctctcatccggaatagtaacataaactttctgaataggcatagaatatgttgttttcttggtaccctgaccagttactgcaaatgacttaatattccagcttcctccctctgacagctgcatattgataagagatgaaatatctgagcttttaaaatccatggaaatcattccctcaagactgtcaagaataccggagtagttggtcaataatgccgtactgtttgtcatcttatctattactgctgaaataagatccatctgatggcgtcccctgccattatctccgtccggaagattatgcctctcacgggcatatgccaatgcttcctctccgtttaattcatttggaccctttgaaaacttgtaagaatccatagatgaactaaatgcctgttcagaattcacagtaactccacctatttggtctataagagtctcaaaacctgtgaaattaatctgagcatagtagttgattgtatccagatcatatactgaagccaatgtcttcattgaacaatctataccatacaatccacaatgtgtcagtttatcctttgtcccatgagataccgacgtttcaacatagtaatctctaggtgtatttaacaataacacctgtctactctcaggattgacaaaagccagaatatttacatcgcttcggctctttgcaagcttcttgcttctggtatctgatccactgatatatacaacgaacggctcctttgtcacctgaacatccttttctgtcttctcaacctcatatgtcttagtataagcatacaatacctttgtctttgtttcaaaatcttcatacccctctgtatctgtgataacagatacatatgaggtattgagtatcatcgcctttacctcacccgaataaagggcatccaccatctctattgcagacgcatatggctttgtattgattgtactgtctgtttttttattaatatcatctattgtttcctttgtctcttcatatccatatgaatcagtatatgcaaaggtataatccttggcatcatcaatagtctcagcgggatcatccttcataacatagacaacaatcttatcctccatgacatttttatttccggtcatatcattaagtgtgcccatcaccttgctaagcacagacgtgccatataagctacatatgataaccagtatagatataaatgttcccaatcctcgcttaaaatagcccgacgcttttggtttcattatgttttgtcctaagtgaacaagtgcaaacaccaggaactccataattaataaacccccggctgcaaacatgatatactttgcaggtaacatttttgtttttacagccatagcaaatatcatagcactagcaataagctgtaaaaccaataatacccttgcaaatattatccattttgtagcctttttctttttcttcatttgtttctccttctatctataaatacatagtacttatctattttaacaaatgattttgatttttcaatattttaacaatgattataacaaaattaataattttttttaaaatttaaatgtgttttccagtgtctcccacttctgatccttatcactcaagttgattggtgtgccatcctcaagtgtgtatccgcttccgtcagcgcttcccggatactctccgacaagctgtggccactcgatgccgattgcaggatcattccatgcaaggccgctctcatctccaaggtgccagaaatctgttaccttgtagcagaactctgctacatctgagagtactaaaaatccgtgtgcaaagccctccggaataaggaactgcttcttgttctcctctgtgagctctactccgaaccacttgccgtatgtctttgaatcgcttcttaagtctacagccacatcaaatactgagccttttactgcacgcacaagctttgcctgtgggtattccttctggaaatggagtccgcggagcactccctttgtggagcatgactgattatcctgtacgaacactctgtcaatgccagcttcctgcatatcctttgaattgtatgtctccataaagtatccacggttgtctccatgcactgtaggctcgatgatgcaaagtccttcgattccacctacgtttttctgtactttaatctgtcccatgatttctatgtcctttctnnnnnnnnnnnnnnnnnnnnnnnnnnnnnnnnnnnnnnnnnnnnnnnnnnnnnnnnnnnnnnnnnnnnnnnnnnnnnnnnnnnnnnnnnnnnnnnnnnnnttccacctacgtttttctgtactttaatctgtcccatgatttctatgtcctttcttgtattacgtgaacatcccaacatctaactcaacctcgctacttcgtagcttctttgctcactaaaattctatctcctgcagatatctgtgcagcgcatcctgccatgtagggagtggcttaaatccattctccacgagcttgctcttgtccagtctgctgttaaacggacgtgctgcctttgacacaccgtactctgctgttgtaacaggtgctactgtaagtctgtcctcagaatactctgtatgaccaagctccactgcctgcttaaagatttcctttgtaaaatcataccagcttatatatccaccctcgtttgtagcgtgatagtaaccgtatttatcagtctctatcatatctacgagcaatcttgaaaggtcgagtgtatatgtcggtgtaccaatctggtcacttactactgtaagcttatcgtgtgtcttgccgacatttagcattgtcttgatgaagttcttgccgtttacaccaaatacccatgctatacgcactataaagtacttctcaagtgtatttgccactgcaagctctccgtcaagctttgtctgtccatatacattgagtggtgcatagtccttgcagtcaggctgccatggtgtggtgccctgtccgtcaaatacataatctgtgctgatatataccatcttggcatctatcttcttgcaggcatccgcgatattctgtgtgccgtctgcgttgattgcatgcacctttgcttttttatcatcatcctcggccagatctactgctgtccatgctgcacagtgtactaccacgtcaggcttaagctctgtgattgttttttccactgcatcacggtctgtgatgtcgagtgagacatatggcatctttgtaactgctgtgccatcatctgctccgctgtactgtggtgctatatctgttccgattccttcgtaaccgcgtgctgcaaggtcgttcattacgtcgtgtccgagctgacctgcaactcctgtagcaaatactttcattttgggtctcctttatacaaatattcgtaaacaggcccaacatatatgcgcaatcccgcatgctttggcatgctttcccgctgcttacgcagctaagattgcttatatacgttgttcctgctctattctagagcctcaaagaatcaaaatgcgcttatgtaagcgagcttacaacacgcatttcgattcttcaaggtttacgaatagcagttatctattcgcgtacatcttctcgtaatagttctggtactctccactgatgattgtctcccaccactcacggttatcaaggtaccatttgattgtcttcttgatgccgtcctcaaacttggtctctgggagccatccgagctcgttgtggatctttgtagggtcgattgcgtaacgcatatcatgtcccttacgatctcctacgaatgtgataaggctctcaggcttgttgagctccttgcagataatttttacgatttcaaggtttgtcttctcattgtggccacctacattgtaaacctctcctacacgtccgttgtggatgataaggtcgattgccttgcagtgatcctctacataaagccagtcacgtacgttctcgcctgttccgtataccgggagtggcttgtcattaagcgcatttgcaatcataagtgggataagcttctccgggaaatggtatggtccgtagttgtttgagcaacggctgattgttacaggaagtccatatgtgcggtggtaagcaagcacgagtaagtctgctgctgcctttgatgatgaatatgggcttgatgtatggattggtgtatcctcatggaagaaaaggtcagggcggtcaagtggcagatctccgtatacctcatctgttgatacctggtgatatcttttaataccatacttgcggcatgcgtccataagcactgatgttccgatgatatttgtatcaaggaatacctgtgggttctcgattgaacggtcaacgtgtgactctgctgcgaagtttacaaccatatcaggatgctcttcctcaaataatttgtatacagcgtcacggtctgtgatgctctcctttacgaaacggaagtttggattgtccattacaggctcaagtgttgagagatttcctgcatatgtgagacagtctaagcatacgatacggtaatccggatatttgttaagcatgtgaaatacgaagttgcttccgataaatcctgctccacctgttacgataattgtcattttgatttcctccttaatataactgctcgcggtattttccatcaagtacgtcctttaagtactgtccgtactgattcttctttactagctcatatgtctttaatacttcatcctttgtaatccagccgtttaagtaagcgatttcctcaagacatgctatcttacggtgctgatgtgtctcaactgtcttgacaaagtttgtagcatctacaaggctctcatgtgttcctgtgtcaagccatgtgaagccctgtcccaaaagctctacattgagggcttttttctcaagatagattctgtttaagtctgttatctcaagctctcctctggctgatggcttaaggttctttgcatactctactacattgttatcgtagaagtaaagacctgtgacacagtaattgctctttggatgctcaggtttttcctcgattgaaatagcctttccttccttatcaaactctacaataccgaatctctcagggtcatctacatagtagccgaatactgtggcgcccttaccgctcttggcattttcaactgcggccttgagtctcttgttgagtccgtgtcctgcgaagatgttgtctccgagaaccatggctactgtgtcatccccgatgaatttctcaccgataacgaatgcctgtgcaagtccgtccgggcttggctgtacctcgtaggtgaggttgacaccaaactgatgtccgtctcctaagagctccttaaatcttggtgtatcctgtggtgttgaaatgatcaggatatctctgatgccggcattcataagcactgacataggatagtagatcattggcttgtcataaattggaagtaactgctttgatgttaccattgtgagtgggtaaagacgtgtgcctgaacctcccgctaatataatacctttcatgttgttctccttcaaactgaaactacgtgctgcatttgatgctttcggtctgtagaatccactgacctgattcatcatttacctgcattataaaaggtgccccaagggcaccttcaagtacttttttatatttttagcatttttcacaaaatatatgcttataatatcctgtttttaaatcattttcgtgcaataaatacacctgcatcctttgtgatatggaaccctccctctgtcttctttctgacaaatgccgcaaattccttatagcggtccacaatatacctgttctggttgccgtggcacgaaagcacatactctatcacaggctctgctttttctaccacaagctcatcctcgtacccatgccagcttacatcaccaaagtattttccaagtattgcctcaccattttctttaccgaattgctcatacagcctttccgctgacagctctatgcggtcatcaaactgctgtaccaggtcgtttatttccttcatatgccgtgagctgtatgtactgcacacaaacacgccaccgggctttagcaccctttggatttcactgcacacggcatccagattgtcacaatagaacagtacatggtctgctatcacgcagtcatacgatgcatccggcttatacagcctgtgggcatccatcacctcatatgtgaagcgcttgtcgtctgcacctacatttctcgtcgcatcccttaccatgccatacgatatatcagtcagggttatctgcatatctgccggtatcctgtctatgttctgtgtccagagagaggcatcaccacagcccacctcaagcaccttttccccctcaaaaaagctgcactcatcaaatacccagctaaaccagctcaccggattcatcgagaaatccctgtgcagattgattctggctgatatatttgaagcatccctgtactgctgctttagcttttgctccatctcgtttatattaaccagctccagcatatgactccagtccacacttcgcccctcgtctatcacctctgaagcctcctgcagtgctgatttcataagcttcatctgctctatcctctcctccacgagaccaagctgcatgtgaagcgactcagacatgacattgctgtccgtgtttctgagtgtcatctccttgatatcatccagggaaaatcccagatatttgaggaacagtatctgctgtagacgcgcaaagtcgtcatcattatagaatctggctccgttttcgtttacgtaggatggttttaaaatattgtgctcgtcatagtacctgatggtcttttttgtaatatgcgctttttttgcaaattctcctgaggagtagtagccgggtagtttcatcgttgcgttgcctttcctcttattttcttacttttgaacttcctatatctaagtatatcataattttctaatacaggatttattaatatttacttattttcattgtttctgcttgtttttccggaaaatgtacttataattataatatcactatgcaacaaggagaaaacaatgaaatacgattatatagtagtaggttccggtctctacggagccatcttcgcccacgaggcaaaggccaagggcaaatcagtgcttgttgtagacaagcgtcctaacatagcaggaaatgtctacacagagaagcaggagggcatcaatgtacacatgtacggagcccacatattccacaccaatgacaagagggtctggaactacatcacacagtttgctgagttcaaccgcttcacaaacagccctgtagccaactacaagggggagctgtactcaatgcctttcaatatgtacaccttcaacaagatgtggggtgtggtgacaccagaggaggctgctgcaaagattgaggagcagaaaaaggaaataaccggtgagcctaaaaatctcgaggagcaggctatttcactcgttggacgtgatatctatgagaagctcgtgaagggctacactgagaagcagtggggtcgtgattgtaaggagcttccggctttcatcataaagcgtcttcctgttagacttacctttgacaacaattacttcaatgctctttatcagggtattccaatcggtggatacaccaagatggttgagaatctgctcgacggcattgaggtcagactaaataccgactaccttgagcacaaggctgagcttgatgctcttgctgacaaggttgtatacacaggtccgattgacgcatactttggctttaagctaggtactttggagtaccgctcagtgcgctttgagaatgagaccctcgatattcctaacttccagggaaatgccgctgtcaactatacagaccgcgagactccatggacacgtatcatcgagcacaagtggttcgagttcggtaaggatgaggatggaaatgatctgccaaagactattatcagccgtgagtactcttctgagtggaaggcaggcgatgagccttactaccctgtaaacgatgagaaaaacggacagctctacgccaggtataaggagcttgccgataaggagaccggtgttatattcggtggtcgtctcggcgagtacaagtactacgatatggatactaccattgcttctgtacttgatatgtgtgagaaggagcttggctaatagtcaggcttcccacaaaatgctttgttcatgtcatattcaaaagcgccatggcaatttaccatggcgcttttatttacattatttttttccggccagatttatctcagccgcaggaatatgctccctcaggcactcatatccatactccttcgaatatgcatatatagccggaagctgtcttgaaagaaatagcgccggtgcttctgtcacagagtatgcgccacagtgcccgaactcaagaacatcaccaagttcaagcttcttaagcttcacctcgcgtaccagcacatctgccactgtacagaggcttccgcagagtgtatagtctgtgtccggcagttctgtgaattccacaccggcagctctatatatactaatcggcggcacctgcatagccattctctgtccaaagtaattcagatggtggattcctccatccaaaatcgcataattggcatcgcctgtcgattttaagtcctttacctgtgtgtagtatttaccgcatgaggctgcaaggaaacgtcccatctcaatgccaagcggatattccacagcaaattctctaagcacctctgctgcctcatcaagtgatcgtttttccctttcctgccagtcatcctcaaaatactccacgcaaagtcccgggccatactctacaagctgtggctcaaagctgtatttttcttttaatacgctcaatgcagactttattttttccaagtccttatttattttgcgaagactcttctgtgtgccggaatagtagtggatgcccattaccgcaatgcccttaaactcatccggatgcgaaatgatgtattcaatatcctcaagcgacatgccaaactggttgccacttgtcaggcgcagtatgacatgtgttttcgtttcggcaaactcggcttcatgcgcaccttccggcatacgttcaagcatcacttctgatatcagcgccgcatgtcttatgctctcacaggtgagtataccggcgccatatgaaactgctcgctctatatcgcatttttccttcatcacacctgaatagatgatgctctccggcttcacgccaagtgctatacatatctcaagctctcccgggctgcacacctccacatggtctaagccctccggcagcctgtgaagcagaaacggatttgcctttatcgaaaagcaaagcggtatcctacgtcctcctttacaatcaagagcagcccttatcatggctgctcttttcgcaaactcgtccgtatcaaatacatagtacggtgtctgtctcatatactttattcctccacaagctctttcacaagcttctcgatcgcatctactgagttgaaattctcaggaaccagatcctttggtctgattgtgatgtcaaactcatcagtcagctccgatacgagtgaaactatatcaaatgactcaagaattttgtcatcgatgagctttgtctccttctcaaaatccacatccggtcttaattcctctaaaatctctaaaattgtgtctctcattttacatttcctccagttttttcatatcatattttccgtttggaagcttaggaagctgctccagcttcttgattttccttggcaccataaagcccgggagctcgtccctcagtgccagcgcaaggcttctcctgtcacagtcacctgtgtagaaaagtatcagcacctcttttgctttattatatataacgcagctttctgcgactccctcgaccacattggcggcatgctccacctcatcaagctcaacacgatgtcccatgtgctttatctggcggtccatacgtccacaaaaatgaagtatgccatcctcatcgagccttccgtaatctcctgtgcggtacatacgctcaggataagccttattgagtggattgagtgtaaatgccgcagctgtcctctccggatcattataataacccagcgccaggattggtccacatacgcatatctcgccctgttctccgacagccggctcatttccatgctcatctatcaggaaaaccctgtaattgtcataggcttttcctataggaagcacctcgtcctcttccactgtatgatccacgctatagtatgtgcatgatgctgtggcctctgtcggcccatactggttcacaaaatgtgcttccggtagattttcctgccatttcctgagcaccctgcacggcatcactgagcctgagaagcagatttttctaagactcttaagccctacttcctcaaatgctccaagcgatgtgaggatggtaaatgccgaaacactccagccgacactgctgaccttcttatcattcatgtaatcaaacagggcatttggctccataaaatactcttttggaataatcgctgtgctgcagccggtctttagcggcagataaatgtccctgattgccgcaatatagtcaagcggtgactgattgcccagcacatcgtcgcattcaatatgcatcacatcacaatatgcattgatgtatgtcataagtgacagatgcgatgtcatgactccctttggattgccggtggagcctgacgtgtagataatatacagcgggtctgtcatggacatctgcctgcggactgttgcaagcttctccagtgagctgtcatctttttttcctgcacagcctgccacaacaccaccatctgtatcgttctcactatccgtcacagcgtctcctgctgattcactgattttacaattactatcagcgcccgccacctgatcgaagcgcgatatatcctcagcaataaatatctgcggtctatcgaagccttctgactttgccagctcatccactatgctctccacatgctcaaggctttccctgtctgccacaatagcccttggacacagattttcaagtattttttcaattctcttgtcaggaagcgatgcatcaatcggcgcatacggtctgcctgcatataccactcccaggaagtatgccggtgtcaccattttccttccggcaaatactgcaacaggggttctgtccactccaagctgttctaccagatatgctcctgtatttcttgctatatcatacacctgcgcaaacgtaatgctgcattcagtatccgaaaatgcaggcttgtcagggtattttgccactgtggcctcaagccactccagtacgtttttcatcttagtcctctttcatgcattaataaacgttgccgaaaaaattatagcacataacatccgaaaaaaatgtcatgtactatcgaattaataattcttaagaaagccttaatttttttctgtaggtttttctatatttgattctcctattaaatatatcggtctgtcctttgcctcgagataaagctttgacagatacagtccaagtatccctatgctaagaagctgtataccaccgataaaaagaatgatgaccaccgttgatgcccagcctgctaccggatcaccaaatacaagtctccttattatgataaaaagcatagctgctatcgccacaataaagctgaacactcctgctattgatgcgatgtatagcggagcatttgaaaatgctactattccatctaaactatagagaaacagctgccaaaatgaccactttgtctcgcctgccaccctgtttacattctcaaattcaagccacttcaccttaaagcctacccagccaaacagtccctttgaaaacctgttgtattccttaagcgaaagcagtgcatccacgtatttcctgttcatcagcctgtagtcacgtgccccatcaaccatatttgcctttgatattctgctcatgagcctgtaaaattttcttgcaaaaaaagatctgatcgctggttcacccttgcgtgtcacccgccttgtaccgacagcatcatagccctctttgataagaacctgatacatttttggaagcatttccgggggatcctgaaggtctgcatccattattgccacatattcacccaccgcatgctgcaagcctgcatacatggctgcctccttgccaaaattacgcgaaaatgatatgtatttcacaccggaatcatttgtggcaagctcctttgcaacatcaagcgtaccatccatggagccgtcatccactataatcagctcatatgacaatcccgatgtctcactcgcttgactcatctgattcagtacccaggttattttattataaaaaagaggcagagcctctttctcgttaaagcatggcaccacaatgcttatcttatttttttccatataagccaccctgcatataacatcaaataaataaaaaatccgattgctgctcctgccgtatttgtcacaaaatcatccagctggcaatatcctctgccggtaaccagctgcgtgtactcaattgctgcgcttataagagcaccaacaggtattgtaaaccatctcatccaatttttaaaaaccagtggaaataaaagcccaaatggtataaacaatactatattttctataaaataagcgtgcatctgaagtgtcatgccccatgtgctccacagcaccatatcggcgacgccggttctgcttcccggctcccttgaataatacactatcattataagcgtatacatataagccacaaatgtgccgcagaacagcatatgccagattttgcccactatcttttttcttctctcatctgcctgtgatacctctctcattgtgaaaagatatcgcagcagacacacaaaaatatacatcgcaatgcagattaaagccaaatataccgctgacggaagatatttgaacttttcctgtatgtctcttattatataatcctttaaactcaatgtccttttttatgctccttgtaggcacgaatgaactccagctgtcgttcatcgtcctttttctgttcgtcatcagacatatgactcactttaataattatacacaatattatgccaattacaataataccggcacataatataaaaataattaagatttcaggcatagactatttcctccggcagaatttaattactattctctctacagattaaattatatccacttaatttatcttaattcactcatttatgaaccctgataacagcaaaagctgcatgatattctcacacagcttttgtatattacgtgtattatctttggcattaacctttattttaattttgcaacaaccatatccacatatttctgacagatttcctcgctctctgcctcaaccatgacacggataacaggctctgtacccgactcacgcacaagtatacgtcctgtatcgccaagctctgcagtaacctggtcgacagccgcctgaacctcaggatttgcaagtgcctcggccttgtcagccacacgcacattctgaagtacctgtgggtagatactaagcccctcacagagctggctcatcttctgttttctcgccatcatgacctccatcatcttaaggctggtaaggataccatcacctgttgatgcatacttagagaagatgatatgtcctgactgctctccgccgatgcggcagccgttctgctgcatgtactcgtatacatatttatcacctactgcagtctttgcgtagccgattccaagctcatcaagggccttatagagtccaaagtttgacataacagtcgtgacaacagtattgttatcgagctttcctctctctttcatgtactttccatatatgtagaggatatggtctcctgtgattacattgcccagttcgtctacacagagacatctgtctgcatctccatcgtatgcgaagcctacatcaagaccattgtccaccacgtacttctgtaagccctcgatatgtgtagagcctgcattattgttgatgtttagaccgtttggctcattgttgatgacatagcactttgctccaagtgcctcaaaaatagactttgccatgttccatgagcttccgttggcacagtcaagacctaccttcatgcccttgaatgagtagacaccaagcgatatgaggtatcccatgtaacggttacggcctgctacatagtcaactgtgcatccgatagcatccttatgtgcataaggtaattccttccactcctgaccaaacaggcgtagcttgccgtctatatagtcctcgacaaggagaattgtctcctcatccatcttctctccattgctgttgataagcttgattccattgtcatagtatggattatggcttgccgaaatcatgataccacaatcaaaatcatcggttcttgctacatatgccactgatggagttgtggtaacgtgtaatagatatgcatctgctcccgatgctgtaagtcctgatacaagggagtactcaaacatgtagcttgaacgtcttgtatcctttcctattactatcttcgccggctcgtcgagctgcttctgcttcttaagctctccataataccagcctaaaaatctaccaatctgatatgcgtgctctgctgttaaattgacattagcttctccacggaagccgtctgttccaaagtattttcccattgtcgtccccttgtgaataaatttttcttatattatacacttaataaatatgtttgtgtagtaaaataagcttattttttaaattattcgacttcataaaatcaattgtttataaatatgataaaaataacatatgtatataaaccaaagctacatagatatcttatggcactccatataatatctcttatcattcgcttctccgattgagaatgtctttctgggaagcactccgcccgcattgattgcagggaacaatgtgctcttgtctatcgactgaagaaagattccacatcccttagtctccttaaccagtccgtgaagtgcctcatcaccatggatatagtctatttccacattgtcatgtatctcaagatacttatctaaaataccctggagtatctcaaccgggaggcggtcacctctatttgtgatattaattccggaattctttatttcggtagcgcctgattcaacatactcaaatactatctcatcgccctcagtgctcgcaagtccttgttttgtgatttcagcttcgaaaaacgacagcatgtcctttacatcaacatttgtaagcagtctgtgaataggcttaaactcaagcgcctcactgtgcagattacagatttccacaagagcatgccttgcaggatgagttttcaactgctcctctgtgaattttcctgattttttgatattttcccagcatgtcttcgctgttgcaagggaatggtttccatcacctactgcaaataaaaagcctccacagctattctgttttgctgcaaatgcctctgtcacctgccttgctgcctcaccctcgacagcatagccgcggatatgtccgcctccctgcatgagctctgtatcgtaaagcttacgaagagtatccctgatagcatacacatactcgattattccatgctttacagctgctatatttgcagcatcttcctgtgtagcaccctggcatccatcaattttttgtctgtctatatgatcatcaacaagcagcataacatgtggcagctcaatagctgcattctctcttattttcactctcggaggtatacgtgagattactgttccctctgttgctctgatgagagtcttctttttcgggtcgaaatcatagtcatccagatcaataagtcctactattccaagacgcacccctgactccgtagtacgctcaacaagcacatagccatctgccaccgcttgctttagggttccatctgtgagatatgtatccatagtggtattaatatatttgattctctcatcatcagtcattgaagcatattttgttttcctgccggtttctttgtcatttttgacaccagcccctgacgaattgcaatcattctcctgtttcgtaattgttcccagatatatctcaggaaataccacattaagtgttgacggagcatcgcccacatacttttccacagcatcccaataatcagcctgacttgtgaactggtcacaggcgataactgaccatttttccatatctataccatcgtttggcaaaagaatatttgccggattgaaacaatttgacatatcaacaattctcctttaaatatacaaaatatataacaaaaatccgctatactctatagtataacggatttacttttatttgcatatattaaattccttttgttgttagaattcttccaactgcatcatctaatttttctgccggtatctcaccactgttaactgcagacagcactgcattatagctgctctcaaagcctgttgaaacataaagcatgctcattcctgccttaacagctgccacagccgcctcatcctgtgtatataccttattaagagatgcgtctgataaatcatctgtaatcaaaaggccattaaagcccatggtagttctcatatagtttacggcacctgctgatgtagagcatggcgtggtttcctctcctgtcacactctggcaaatcacatttcccatcatgactgccggaacacctgcttcaattgccttctgatatggcacaaaatcagatgcctcaagatcctccagcttatctgtcatccagagcattcctgtcgctgaatctgtagtagcctttccttttcctggaaagctctttgctacagaattgattcctgcatcattatagctgcttacctgtgctgcaacacagtcacctacggtcgctgactcgctgccaaatgcatatgtatcgttatctgcattatcaccatatgctatatccgctgtcggcccaaaattcatattaaggccattggtagccatatatgagcctatctttcctgcactgctgcccgctgcgtcagcatctccaagctgtgatggtgcctgctgtgcctcatatccattagctgaagcaagaggaagtctttctccaccttcttcatcaattgcaagaaacagattcacgcccagtcgctcctgcgaaaatgactgcagactgctcatcatctttgtaactgcagcctctcctgagaaattttcctgtctgaaaacaaaaccaccaagaggatatgtaccaatagctgcctttgtcttgttaccggcctgagtgaactctgatacacctgtaatctcctcaggtctcgtaatgaatagctgggctaccttttcctctgttgtcatagaagacagctttgtcttgacagaatctgacggagtaaatgccggtgctgtctgctgtctatcagcttgtacctgctgaattccatccgtctcctgagtaggattctgtgtctcctgctggctttctgttattttcttattcgccttattccccggcatcacaaaatgcactgctccaaataccagcacaactatcagtgcaattacttctattgtgatgaggtacttatctccattttgtctgaagttcatatttaatccccaaaatttgtatttgttaaatcgttattaggtccgcttacttttcctgataatgcactgctgtattcgtttacaattgcgctaggactatagcctatatcaccttcaagaaactgatgcactcctgtagccatgtctgcaagtgtagtcggcacctcaacccatgcaccatcgacctttccaccatagaacacctgtggatacgccgtcgaatcctctactgtatagtctgcaagatttttaaatactgaaagaatctcatcagtattatagttagtgttgacatgtccaatcaggtctgataccatcttaatctttgccgctgtattcatctgcttagctgattcaaaaaccttgaacagcactgttctctgtctttcagcacgcttatagtctcctccggctgtataacgtattctggaatacgcaactgcctgagttccatccagtgtatatgtgccggctgaatcaatatgggatgagcttgttccacgaatcttattgacctcatcaatatatccgtttatcacctttgcctcagatgcatcaatatcctgtacaatgcctcctacctcatctataatttcaccgactgtattgaaattgactgtaacataattctttatgtctaagtccagatttttgttaagtgtatctactgcaagctccggtccgccaaacgcatgtgcatgtgtcaccttctggtatccatgaccatcaatattcatcatacagtctctgaaaatagataccatgcggattttcttagcatcatgatcaaccctgacaatcataatggaatcggaacgtgttcctttatcaagctgatctgagcggctgtcaacaccaaatagtgcaaattcctctatgcctgatttgtctgtaatgttgtcctcctcagtctgagtatcggcttttgtcttaactgcctctgtacccggctttatgtctttggcttctttattcttaacattactgctgttaatctttacaagtattatcgctataatagcaataagtacaatcattactgccgtaataattatatttttcttttttttcatctgcactattctccgtcattcatatgtgtctgtgcctgctaattttcgtcatcgtccctgccataataattgccataataattaccataatagtttccatagtaatgaccatacttagactcctcaaacctgcacttattgagcacagctccaagaatcttgacgcctgagtcctcaagtgtacgctttgtattgatgattgcacggctgcttgtagcattctgggcagcaactattactgctccgtctacattctttccaactacggccgcatcaatcgcaactcctgtaggaggagtatcgacaagcacatagtcaaagttcttctctccaaactcgataagctctttaaactcctctgtctcaagaagctccgtaggatttggtacctcatgtcctgcaaaaagaatgaacacacccttgatgtttgtcgcatatatcactttgtccaaagatacctgacctgagagataatgtgagagtccgtatatctttccaccgctctccagcttcgctctgattcgtcctacaaggactgacttacgcatatcggtatctactacaaggactgacttcttagagtccgccatcgaacgagccagatccataactacggttgtctttccctcattaggcaagctgctggtaaagaggatggacttcacaccctttccactgaaactgatgcttgttttaagagctcgaagagactccttcattgtatagctctggtcttttatctgattaataactactgtttccattaaattgccctcttcttactcttgctatcgtctgatttagatgactgtttttttttgttttttcttctctttgactttgctccatcatactctgcctcatcaacaggaagtgatgcaagcaccttgaggcctgttctggcctccatatcatctgcattggaaattgtatcgtcaagcatgtatccaagtacaactatgccggcagcaagaaacagtccgagtacagcaccgataactgtattcttaaggatattattattcaccggtgtctttgaagcatatgctgtctggataatctttggctgtgactgatccatattgtcagcgatatactgtgatgaaacttttgcaatctcatctgccactgtttttgaagcttctaaatcagtgtctgtaaccacaatcttgagcacacgtgtatctgtcggattctctattgaaaccctcttactgagctgctcgtatgtctcgtccatatccagattgtcaattacctgtgataaaactgtcctgcctgtgataacgtactcatagtcgtttgtcagactcgagcctacctgaatatcagcaagactggtgatagatgttgacttgctcagtacatacatctctgcagatgcctcatactccggtacaaaagtaatcttggagtataatccaaatactgctgcaagaagcaccattgatgccacaagtgccttccagtgcttcactaattcgtgaaacagcgctactaaatcgatttcaatttcctgatctcttattggttcgttgttttccattttcctaccctttacatattgtaacattatttttcggtttaatcctatgctatattactacacttcatttcttttgtctatttttagaagtcacaaaaaaagtattaagaatatgtcatattttgtaaataattatgccatataatagaaaagtgccgtttccggcacttttctttattgtattttcatttgctatattttatttgttcctgttctattgttgctgttctagttctgctgtggctgttctgatggttcagtcggtgccaccggctgtggctgtggttttggatttactgttacggttattgaactgcttgcgctattccagcctgccatttcacctgctatagctgtaatctgtacgctaccagccctgtggatagtcacatttccggcagcatccaccgatgcaatcaatggatcacttgacttgtaagaaagccctgctccgtttgaagcacttgctcccagagaaaatggtgcatctccctctgttacagttttattaccgcaacctattgtcacagatggtgtctgatttggctgtggctttgcatttacagtgattgtaattgtcttgctgccagccttatagcttgtagtagcctcagacttgacagtgattgttgcagttccgacacctactatcgtcacattaccgttctcatccactctcactacaccctcattatcacttgagtatgtgagctttgcattatcctctgctgtcacaccgagattgaatgctccgtcaccctctgtcacattataagagccagctccgccaaaactctgcgctttgccggccaccttgtcaacaccaccatatacaattactttttcatctaatgtcacattctcatatagcttcttcgcagctgaataaggcatatttatgcagccatggctgccgctgtacatgtagatatttccaccgaaggtacttctccacgaagcatcatggaatccaattccaccattgaatggtataaagaaattaacccatgacttatatccgtctccccttaagtatctgtccttatctcttgagaagatagaatacactccggtaggtgttccatgaccttttgaaatacatcctgtaacacactgacttgatacaacaagctctccattcttgtatacatataccatctgattggtaagatccacttcacagtaattgccaccatatgtgacatattcacctgtttcttcttcttttgcctcactgtaaactgcttccactgttgcagactttttattgtttattgcctcagcaatcgcctcatacagcttgtttccatctacagtctgtcctgatgatgtaacaggcacatttattatacttccgcctgtagtcttaaactgacctgttttcttctttgacacatcatgcttttttgcaagctctgtacagtatgtagccatattctcaccatcaagtgaaactgacaatccgtcattgcccactataagccactgggctatctgatcctttcctacagcctctgtagctgcttcacctgttgccggtgtgaaattacatgtcaccgtcacatcaagatatgcattggcttcttttaatgccttctttaccagctcgctgtccgcagccttttctccatcaacatatcctgttgcagatgtaagctctaccttatccttcagctcctttacagcgcttgtcagatttgtagctgcattgtcatatacaggtgcatctcccgatacaccgtcaacaccctcaaactgtcctgcctctgcattgtatgctattgtagcacgatatggcacaattgatcttatatcaaaggtctgtgtgtctgcctcagccttcttttgttcgtcatcatttgcctctgcatccgtatcactctgtgccgtagcatcagactgtgactgtgtttttgcagtgatataagagtctacaagagcagtctccagctcatcagacttatccattttaaaaagcttcacctgcttttccggtttcttatccttattggccgcatttatcagttcctgaagatctgctttgtcattgtacttgagtcccaaatccttagctgtcatatcaaatgatgcatcgtcaagcttcactgatatcttatacttgcctactgcagtctttatggctttctttgcctcgtcagcagtcattccacctacatcaactgatgcaagcttgtacttttcagggaatgtcttgtatgctttctttccacagcctgccattcccaatgccataagcacacaggccaaaactaccaggagttttatacttttcttcttcatctttgtcctctttatcttaattttatattattctcacagcaccatattttatcactttcttatatatgcctcaagtgagatttgtcacatattttccggttatttagacacattattcatcattatgataacaaaaaagcttcctaatgacgcacaatatgtaacaggcgtataaaatagttctgataaaccttatcgctcatatgcattttattcaacgcacaaaatactttataattcttatttacacatttatacatatctgtattctttttttcgatttgactgacaaacagcttcatcctttttctaagctgttttttatcagtgttcctaatcaggcaaagctgcaaatagtcgttgataaatttgcttgttttatcaaaccacagctgctttccgcctatactaaagtgctccgcatcccggcctgcctcaatcagcctcatgataaccttctcataatggtcaagcctcttcagtgagctttctatcgaaacgctctgatttacatcaccgactctatactcataaagtgccttatcatatgcatagatactttcggcatatgccattgggattattgagaactcctgatcctcgtagaataccccctcagagagtgtcagtcctgtatttctataaaactgcgtattatatatcaccccatgcaggctcagcccccaccagaaatcatacagatgctcatccacatatcctgcattatatggtccaccattttttgttatatatttatcgtcgtatggatactcatcagtattttctctctgcagcacatatgatctatagctcatcagcactgcatctgcgaaattctcatgtttattttcattatctctaagataacagatagtttctttcaacacatcagtgtttacccagtcatcagcgtctactaccttaaaatagcttccttttattatttttacgccttcattaattgccgagccatgaccaccgttttctttattcagtatccggtacacgtcaggatatttatttacatatttttgtgcaatctccacactattatcggtagagccgtcatttacaacaacaatgtccagcatatttaaaagagagttatcatcaataataaatgatgataaccctttatccaaaaactttgccgcattgtatgtcggtattattattgatagtatctttttattttctgtttccatatcctatctaattcctgtttctatatgttaatttccacttatatcgctgtctgtcaccatatttgacaatggtagtcagtattattttctgtatagtctgtctgctctgccaacccttttggcaagctcaagcagctttgcaaattgattctcgtaaaagctgttgctcacatgcagcttattaaacagccgaaatactttatatttacgctgtactgcctcatacataagtgcacttttttgagcgagtttcatgttaaactgctctactatcgctctgccggattgtctgtcggtattttttatcaaagctatttgataatagcttgtgattatgcccgacgtctttctgataaagtgttcctttccaccttgtggcatttttgcaaagctcttctctgcctcaagtacattaaatataacctgctccagatccggaagacgcttcacctgactcgctgctgaaacactttgatttacatctccaactctgtatacatacaactcttcctgaataaatctgacagtttttgcatacgaaaacggaacggttgcatactcctggtcttcgtaaaatacatgctctgtgagcttatatccaagtgctttatagaaccctgtgttatatatcactccgtgaaatgatagtccatcaaatacatcatcccacatgtttactatatcctttaaattgtactctcttgtaaaatcaggcacactcacatctgccggtctgtactcatcctttgatatgtcataatacctgaagctttgtatcaccgcatccgaatctacatgctcgagatattcaaccaggtgctttagcgcaagcgtatctacccagtcatccgcatcgaccacctttaaatactttcctctcacatgctccacgcctgtgttgattgcagaaccgtgtccaccatttgttttatttactatgacaaaggtatccggataccagtccacaaatttctgcgccacttcaacacttctgtcaggtgtgccgtcatttacgactatcacctcaagcttatcgagtatagccttgtcaatatctatttcctcaaagcggccctccgttgccattttacagttgtgctgtgctgtctgtgcatctgtatccctgcataccagaaatgacgacagccccttattcagaaacttttctgcattatatgttggtattatgattgataatattttactcattaactgttctatccgtcctgattactattattaaaaagagtattgcatactcattaacgcctattcatgaaattaattaccacgcagtctgctatagacccatgctgccatcggaaatatcttaaaacctgtttttctaagcatccagacgctcttcctgctgcacgcctggtacactcccgggtgctcctcacgcagcatctcgttaaacttcttcatctgctcaacgttccttgcatcattgccctttgccagaaatatctggtactcatcatcgactgcctcggctatgccgcgctcaaggtactgcttcttgtaggtctgcagattgccgtgcacgttgttgtactcaaacaatgcatcaagcaccttaaggtgctggtcatgacgcttgatcatcatctttatgtccacgctctgaccactccttccaagtctgtactgatacagcggcagaggtgaaaacgtgatgcttgtgcaatatggtatagggtagagtatatactcctggtcctcgtagaagcagtgctcatccacacgaatatcattcttctgcaatacatcagtacggatggtcatggaatgtatagtgatcagaggatccatgacagcctcagcaaagccccactccctgttgtagtgataagagtttgacactgcctttctgcgctttgtgaccttctttgtcctatcatccaccaggttgaagtcattggatatgacatccgagtgcgtgtgcttcaaaagctgtacaaattgtggcaaaaggctcttgtccagccagtcatcaccatccaccaccttgaaatactttcctgttgcgcgcggtatcgcatagttgatggtagatccatggcctccgttctccttggagagcaccttgaagctgtatggatatttctgctcgtaggtatgtgccaggctggctgtggaatctgtggaaccatcatccactatgagtatctccagacttctgagcacagacaaatctataaacgagtcaagacagttctttatatacttttcaacattgtaagccggaacgactatggttaaaagcttctccatatatgtttctccatgtatacctgtttccttgtgtactactctccgagtccatccttgatgtactgtataagatattcaagcgcctcactctcatcctcgccattgcagataagctctatctcatcgcctgactttatgcatgctccaagcactgaaagtacactctttgcattagctacatttttctcgtcatatataaatgttacctttgatttaaatttcattgcctctttgcagagattgccggccggacgtaaatgtaatccggtaggattcttgattattattttttgtgctaccacttttattacctcttttcggttatatatctatcaatgtgatgaactgtcagagccgttatttccggtgtttcctgacgatgtgctgcccgatgacgtaccagctgatgatgaaccacctgcgccggtgctgcctgatccggtgttgcctgatgttgtaccgcctgttattgagcccgaggctgttcctgtaccatcagttcccgttgtgccgcctccgtcacctttccttccgataactatctgaacctttatctcgccccatgtgtacttggtctcatccagatttggctttaccgtcactgtatgtgtacctgcatcaaggcctgtcacatcaattttacccttcagtgtagttcccgaaagcgtatctatatcagactgggtgccgcttactacgacactgctcttatctgttacaaatgtaagcgtatatccatcttccagtccgtcatatgtgatattggagctgttcagcgtcatggttgaagtcgcatttgtttcaacctttatatctatactgagctttgtcttgtatgagttcactataaaaactccatccggcagatatcctgtcaggtcaacagatgtacttatatcgtctgttgcgcccgatatatcgattgggcccacatctatagatgtgatattgttcaatgcttctgcattacccttgagcattacagactcctctgatagttctactccgagcacgctctttcctcctgccggtgagcctgtcgtagtacacttgataggtacctccttggtacttaagacatcaactgtcactgctatagactgatactggctgtccacatcaagctttgatatatctatctcatcgccattatcatcaatcagagtgagatcaccgcgatcagttatctgattatctgatattatggtattgtcatcgacctttatatttacattagccgatgctatagttgaaacaactgactcaggacctccgatctttactacctttggatttgcctgtggcttgtttcccagtgctttcgcacctgagagacttccaaccactgatacctttacctcaaactgcttctgcatatatttttcaactgaaagcgggagcatatggtctccaccgttgaaggtaatcgaatgtctgtacttagtgcatccaatatcgacctttacgcttgccttattcgtatcatccttatctactatgatatttgcaaggtcaacatttgcgtaaaaatcggaatcatcaagctcgttcagatagcttctcttacctgataccgaaaagctgatggtcttttccgaatccttgatggtaggccatagccccttgtcaacaaccgaatcgcgccctgtgacggtgactgttgtggtaaatgtctttgtcttgaccgggtcattgagattgtagaccacaagccagagtataaatgcaaatgctatcgcgagtattttaaagcctatattatttgtgaaggtttttagaagcttctttcccattcttaaacctccttttaattaattcaaacttacccggctccctatgtctgttctgcagaagcttaagctgtgtgcgtagatgatcggcatctatatcgtgctcaatctgccccttgtatgctgtagaaactgctcctgtctcctctgagactatgatggtaagcgaatcacttacctcactgactccgaccgctgcacggtgtctggttcccaaatccttcgagagtgccaggctgtctgatagcggaaggtaacatgtagctgacaccacacggttgccacgcacgataaccgctccgtcatgaagcggtgtatttttctcaaaaatattgatgaggagctgacttgtaagtatggcatccacatctattcctgttctgatatactctcccagatttatctcatcctccatgactattagtgctcctgtctttactctgcccatcgcaaagcatgcacgcaccagctcatcgattgtcttgtcggagaatttctcaatctcgcctctgccggtattgaaaaaatcacccaaaaaggtctttccaccaatattctccaaggcatttcgaagctcaggctgaaaaataacaacaagtgccacgagacctatattaaagagtttctcagcaagccacagtattgtatccatctggaacaatgctgcaacaagcacaaacaacagtatgataataaggcccttgaacagattccatgccctcgtggtctttatccacaaaagtatatgatagaagagcactgaaataataagtatctctataatgtctatcacaccgattttgatgcccggcacatttgtgaatgtaaggaactgatccttgaagcgtatcaatacaccactcacattatccatagcgccctcctttctcttatactatgtaactatttgtcatcctcaaatatattttcgtctatttcgagatcttttgcaatagcctctttgctgatattttcctgattatgtctcggaatcttctttccaaggcttcctgtattgccaaagtgctttacaaccttttcctccttggcaatcatcttctttggaactgccttgacgtaataataatattcatcatcctcaaattgtacgttttctgtacgtgcatagtcaagattcataaatataaactgtatgacaacacctgcaaaaatagcagctacagtgctgagcacaagccagattatcttctccggcagtccgagcaccagataagcaacaacaagtgcaaccaactgtatgagccctcctgctatggtagcaacagtccatgaattattgattttcaatcgtctgacctgatacaccaccagtgtggtgataacaaagattgccataactataaacatctctttgttgtcaagaagctgtcccattgtcacattgagctttgtagtgctctgcccctttttatctaccacctctgcaagcgctgatgcattctgtctgattccatcaaagaaatagtacagcagtgtgccacatattattgcaacaaccgaataagctcttcttaaaagacctgctgcaaccggcataacagatggtatgtgaagctgaaagcatataggtgtgagtatcacaagcatgccatccttcggtgcaaaacgaaaatagacaaaatacagtactaaaaaaagtacaaatgtgatagcacaaacctctatggacagcgcatacatatctaaaagtatcataatcgaagcaatccagagtattgcattcaccggaagcagtgcacacacaagcgctaaaagcagtgccacaagcatcgagctgattttcgccatatagccgatattcaaatctattgttataaatgcgataaatgcaacggcaaatctcacaaccggaagtataaagtgctcatactcaccgcaaaatttgactgccttatccttaatttccagtaacttgttcataaagcctccctaacgcttaatcttttcctcacgggaatatattctgcccactgccttcaggtgatttgcgtatttgcgcacttctcttctgccggccctatatcttgcagtatacaccacaattgtgacaaaaatgtaaaccgccataaatgcaatatacagtatgcctattgtgacacctattgccttaaaatcaagcttattgattctgtccaaaagctctgctgcattgacagcaacccacatcacaacaagccctgcaaatgcgaatgtacctgtgaagaagctttttaagccctctttccatatatagtcccatccgtagtagcttgcggactgtttctgcacacggctgtcatcgcttttgctgtcacaaagagcaatattaaacagttcccttactttttcttcgtttatcataaatcatcctcttacctgttatatctcatacggtttttgtcatcctgctgccacagcccttgcaattagatattctcatctgataaccccctcctaacttccctgtcctatgcaaatacacagcacatatacacggccaggacatttctttgctatctcgtgcccaatcgactccaccgtactgcctgtagtatatatatcatctactattagtatttggtcatattgtacaatactatcggccacttgaaaagccccctcgagacaatttctgcgttcaacataccccattgtcttgagtggactggtatttttcactctgcgcacaagcccttttgccatccttatgcctgttttttcagacaatgcccttgcaaaacactctgcctgattgtagcctctctggcgcatttttttacggtgcatcggcaccggaataataacatctatcccacatctctgtatccagtccgaatatctttccactgctgtctgtgcaaaataagccgcatactcacgtctgtttgaatacttgaacctgtacatggtctgctttatgctgcccttgtatgcaaaaagcgccttgccctgcctgtagctgtcatcttcccacatctgcctatgatgctcgagtgcccgtgcgcagtcgtcacaatactctcttcgctcagacaaaaccggcttcccgcagcgcatacactgtggctgctcaaccggaaagagcttttcacagcatctgctgtgtatatatctctcaaccggaccaattataccatcacataccggacagcgaggtggaaataccagattgattacgcctctcccaatatcctttattttgttcactaatccccctgactgtaatatccccatttgtaacaatattaacaaaaaagcgacaatacattcctgcaatgcagggacatatcatcgccctcatggctgcctgttataaaacgtatattctagaattcttcatctctcttgcctgcaaggaactctacatactttcctgtaccgatagcaacacatgtcataggctgctctgcagtcattgtattgatgccggtcttttcctcgataagctcctcaagacctctgagcagtgaaccgcctcctgtaagcacgattcctctgtctgcgacatcggctgcaagctccggtggagtcttttcaagcactgagtgcactgcctcaactatctgaagagttgcctcacgaagtgcttcctctgtctcctctgagctgactgtaatagtccttggaagtcctgttacaaggtttcttcctcttacctcaattgtctccggctgtgcgagagggtagcatgtaccaatcttgattttgatatcctcagctgttctctctccgatgagaaggttatgcttctttctcatgtatctgacaattgcctcatcaaaatcatctccggctatcttgatagatgtgctgactaccgaaccaccgagtgagataactgctatatctgatgtaccgcctccgatatctactatcatatttccgcatggctttgaaatatcaatacctgcaccgattgcagctgcgattggctcctcgataatcttaacatctctggctcctgctgcaaatgtagcatcctcaacggccttcttctcaacctctgtaacaccacttggcacacatacgctcacgagcggctttctgaagctcttcttaccaagcgccttctggatgaagtgcttgatcatcttctctgtaactgtataatctgagataacaccctgacgcagcggcctgactgcaacgatattacccggtgtccttccgagcatgaggcgtgcttcctctccgattgccttaatcttgttggtgtccctgtcaaaggctactactgaaggctcctttaacacaacaccctttccttttatataaacaagtatacttgctgttcctaaatcgattccgatatctgatccgaccattttaatagcccctttcctgccatatctttaaatttacacatacactctcttattatatacaataaatcccatttttcaaactttttttttgaaaaaggtcatatttaataaaattttaaaatttatctttgtctttttccagatatggtttcaaaaaccgtcctgtatatgactgttttacctcacatatctcctcaggtgtgccctgcgctatgacggttccgccgccgtctccgccctcaggtcccatatctatgatatagtcagctgtctttatcacgtcgaggttgtgctcgataacaactacagtattgcctccgtctgatagcctgcgcagtatctccacaagcttgtgtacatctgcaaagtgcagtcctgtggtaggctcatcaagtatatatatggtctttccggtgctctttctgctaagctctgtggcaagcttgatacgctgtgcctcaccacccgaaagctctgtggacggctgtcccagcttcacgtaggatagtccgacatcatagagcgactggattttgttctgtatctttggcacatttttgaaaaactcaagtgcctcctccactgtcatatcaagaacatcgtatatactcttgcccttatactttacatcgagtgtctccctgttatatcgtttacctccacagacctcacacggcacatatacatcaggcaggaaatgcatctctatcttaaggattccatcgccgccgcaggcctcacaccgaccgccctttacattgaaactgaaacggccctttttatagccctttgccttggcatcgggtgttgatgcaaacaggtctcttatcatatcaaacacgcctgtatatgtggcaggattagagcgtggtgtacggcctatcggtgactggtcgatgtctatgaccttatcaagctgttcaagaccatctataccgtcgtggtcacctgcgatacacctggctctgtttaaggatttggccagatgcttgtagagtatctcattggtcaatgagctctttcccgagcccgacacgcctgtaacacaggtcatgataccaagaggtatctgcacatcaatatttttcaggttattctccctggctcctcttatcgtgatatatccgcttggcttgcgcctctcctgtggcaccggtatctttattttaccgctcagatatgctcctgtgagtgattttttgcactttataatgtcctttaacgagcctgctgccactatctccccgccgtgcgagccggctcccggccctacatccacgatataatccgctgcacgcatggtatcctcatcatgctccacaactatgagcgtatttcccagattcttaagattcataagtgcaccaagcagcttgtcgttatccctctgatgcaatccgatacttggctcatcaagtatatatgccacacccacaagtcctgagcctatctgcgtggcaagcctgattcgctgggcttccccgcctgaaaggcttgccgtgccacgggtaagggtgaggtaatcaaggccgacctgctgcaaaaagccaactctcgcacggatttcctttagtatctgatctcctatatagtgctgctgctctgtaagctctatatcagcaaggaacttcacaagctccttcacagacatggaggtcatctcatatatgttcttgtccgcaaccgtaacggcaagtgacgacggcttaagcctctgccccttacagctcgtacacggagtaatacgcataaactgctcatactctgcctttgccgtatcagaaaaggtctccttgtatcggcgctcaacattatccacaaggccgttccatacaaggtcatagacaccttcgcctctctgacccttgtatctgaccttgagcaccctgccatctccaccgtaaaaaagcagttttttcatatctgcagataaatcatcaatcggtatgtcgagcggaagcccatagccctcatgcagcgcacgaagtgtcgcataggtatagctctttgggtctgtacatgactgccagcccatcacctgtatggcaccctcagatatggaaagcgatgcatccggcaccataagctgcgggtcaaactccatcttgtagccaagtccgtagcaggtcggacatgctccgaacggattgttgaaggagaagcttctcggctcaacctcatctatgcttatgccacagtcagggcacgcaaaattctgggaaaaggtcatctgttcgccatctacaatatcaactatggcattgccctctgtcagttcaaatacattttcaagtgaatcagtaagcctcttctctatgcccggctttacaaccaaacggtctacaacaatatcaatattgtgctttatatttttctccatcgggatatcctcggagagctcatacatgctgccatctacaatcacacgcacatatccgctctttttggctctctcgaacagcttctggtgctcacccttgcggcctctgaccaccggtgcaagaagctggatacgggtgcgctcaggcaacgccataacagtatccaccatctggtctatcgtctgctttgtaatggcgcgcccgcacttcggacagtgtggtattccaattcttgcataaagcagtctgaagtaatcatatatctctgtgaccgttccgacagttgaacgtgggttcttgttggtggatttctggtcaatggaaatggcaggcggaagtccctctatagactccacattcggcttctccatctgtcctaaaaactgacgtgcatacgatgaaagtgactccatatacctgcgctgcccctcagcatatatggtatcaaatgccagtgatgacttgcctgagcctgaaagccctgtaaaaacaacaaactcatctctcgggatgtcaagactgacgcactttagattgtgttcgctggcacctcgtattttgatgtattttctttctttttttgccataatttgtgttcctccaaattgcttccaaatatcataagcttttatcgtatatccctcagtgtgtttttcagcataataagcttatccctgtactctgcagcagcctcgaaattgagctctgccgctgcttttttcatctttttctctatatctgcaatatgcttctcaagctcttttttgctcattgactccggatctttgtcaagagcattctcatcggccgctaccttctttgagatagctatgagatcacgcactgatttctgtatagtctgcggtgtgatgccgtgagcctcattgtactcttcctgcacctttctacgacgctttgtctcgtcaattgcgacacgcatggagtctgtaatcttgtcagcgtacatgataacatggccctcactgttacgtgcggcacgtcctattgtctggataagtgaggtctctgagcgaaggaagccttccttatccgcatcgagtatggcaacaagtgtaatctccgggatatcaaggccctccctgagcagattgatgccgacgagcacgtcaaatacgtcaagacgcaggtcacgtattatctccgctctctcaagtgtatctatatctgaatgcaggtactttaccctgatgccaagctctgccatatagtttgtgagatcctcagccatacgctttgtgagtgtggtgataagcaccttgtgatggtttgcagtctccttattgacctctgacacaaggtcatcaatctgtccctcaacagggcgcactgatatctcaggatccaaaagtcctgtcggtctgataatctgctccgcacgaagcagctcatgctcattctcatacttattaggagtggctgagacaaagagcatctggtctattttaccctcgaactcctcgaaattgagaggtctgttgtcaag

SEQ ID NO: 1014 - DNA, 22312 bp, unidentified
  source 1..22312: mol_type = unassigned DNA
cgcgagctgagcgtgaaagaggtgctgggcgtctttgagaacagctacctcaaccacacccagccgctcaatgtgccggacgcgcacttcatccagaactcggacggcagcattacggcaaatgtcgtcgtcaccggcggcggcagcacggtcaagtgcacggccaccggcaatggccgcctggatgccgttgccacggccatcgagcagcagaccgggatgcactttacgctcgtacactacagcgagcacgccctggattccgacacgaactcccgcgcctgctcctacgtcggcctgaaatgggcctccggtgaggaaacctggggctgtggtacccacaccgatattatcgtggcgggcattaaggctttagtcagcgctattaacaataagtgagcagacagcaaataaaaaataagaaataataaataataaattttgtggaccgcgtcgctgcgctccgctcaaaaaaagactcccgtaggggcgcattctatatgcgcccgcggaagtatgctccgccgcgaacgggcacgggcggatatggaatccgcccctacaagatttgtttttgcccataagggcaaaaactccaccatatttattatttcttatttattctttattatttaaacaaccgcccttatcccaacaaaacggaggtacacgaccatgggcatgaccatgacccagaaaatcttagcggcccactgcggggaagcagccgttacggcgggccagctcatcaacgccaggctcgacatcgtgctcggcaacgatattacgaccccggtggccatcaatgagttcaacaaggcgggctttgattccgtctttgacaagacccgcgtcaacatcgtgctcgaccactttgtccccaacaaggacatcaagagcgcgacccagtccaagcagtgccgcgagttcgcagacaagtacgacatcctcaacttctacgacgttggccagatgggcgttgagcacgcgctcctgcccgaaaagggcatcgtgaccgcgggcgactgcatcatcggcgcggacagccacacctgcacctacggcgcggtgggcgcgttctccaccggcgtcggctccacggatatggccgccggtatggcaaagggcatggcctggttcaaggtccccgccgccatcaaggtcgaactcaagggtcagctgcacaagcctgtcacaggcaaggacgtcattctgcatctgatcggtgagatcggcgtttccggcgcactgtacaagagcctggaattcgtcggtgacggtgtgaagtccctgacgatggaggaccgcctctgcatctgcaatatggccatcgaggccggtgccaagaacggcatcttcccggtggatgaaatcaccgaggcatatttgaagggccgcagccagcgcccgtgggtcaagtacgaggccgaccccgacgccgagtatgagcgcagcatcgtcatcgaccttgacgcgctcgagccgacggtcagttacccgcacctgccggagaacacccaccttgcgaaagagggcaaagacatcaagatcgaccagatcgtcatcggctcctgcacgaacggacgcattgaggacatggaggccgcctacgagattctgaagggcagacacattgctaagggcgtgcgcggcatcatcatccccgccacgatggccgtctacaaggagtgcatcctgcgcggctacaccgaggcgttcatcgacgcgggctgcatcgtctcgacgcccacctgcggcccctgcctgggcggctacatgggcattctggcggcgggggagcgctgcgtctccaccaccaaccgcaacttcgtgggccgcatgggccatgtggattccgaggtctacctcgccagccccgccaccgcggcggccagcgcactgaccggctacatcactgacccgagggaggtttgagctatgaacgcaaaaggtcctgttttcaaatacggcgacaacattgacaccgacgtcatcatcccggcccgctacctgaatacccagagcgaggccgagctggccagccactgcatggaggacatcgacaagacgtttgtcacccgcgtcaaggccggtgacatcatggtcggcggcgagaacttcggctgcggctcctcccgtgagcacgcgcccgtcgccatcaaggcatccggcatcagctgcgtcatcgccaagagctttgcccgcatcttctaccgcaatgccatcaacatcggtctgccgattctggagtgccccgccgccagtgaggcaattgctgagggcgacacggtcagcatcgacttcgacaccggcgtcatcaccgacgagacgacgggccggaccttccaggccgccccgttcccgccgttcatccagaacatcatcgccaagggcggcctgatgaacagcttgaaggactgatgccctgtaggggccgggcatgcccggcccgcggctttacggcaaaagtgctgtgatggaaaggctgagggcgggacatgtcccgcccctacaatagcaacgagagggagaacagaactatgcagaaaaacatcactctgatctacggcgactgctccagccccgagatcgtgacccaggcggtgcgcgtcctggataagatcgcggccaggcatggccacaccttcacctacacccgcgcttacatgggcggcgaggccatcgacaggttcggtgacccgctccccgcgtcggagctggaaaagtgcaaaagctctgacagcgtcctgctcggtgccatcggcggccccaagtgggagggtctgcccggcgaccagcgccccgagaaggggctgctgcgcctgcgcgcgggcatgggcctctacgccaacaaccgcccggccaagatctggccgcagctggcggacgcctccccgctgaaaaagtccatcgttgaccggggcattgacttcatcgttgtgcgtgagctgatcggcggcgtctacttcggcgagcataagaccatcgagcagaacggcgagaaggtcgccatcgacacgatgccctactccgagcacgagatcgagcgcattggccgcatcggctttgagacggcgatgaagcgccgcaaaaagctgacctgtgtggataaggccaacgtgctggacaccagccgcctgtggcgtgccgtcatgcaccgcctgcaggccgagtaccccgaggtcgagtacagcgagatgttcgtggacaactgcgccatgcagatctgcaagaaccctgcgcagtttgacgtcattgtgacggaaaatatgttcggcgacattctctccgacgaggccagtgagatcaccggcagcatcggcatggtgccgtcctcctcgctgggcgagggcacctgcggcctgtatgagccgatccacggctctgcgcccgatattgccgggcaggacgtcgtcaacccgattgcctgcattctctccgcggctatgatgctgcgctacagcttcgatatgcccgccgaggccgacgagatcgaggcggctgtcaacgctgttctcgacgagggctaccgcaccgctgacatgatggctcccggctgcaccagggtaggctgcaccgagatgggcaacaagattttggagcatatttaaaaggcttccccccgcgggggaagctcagactgtcgaaaaactcctgtaggggcgagcattgctcgcccgtgcccgtatgccttgtaagaaagccatctcggaaagcgcgttgctgcgccaagctggcgggcgaccaatggtcgcccctacattctctatatggcaaagccggtgttttttcgacacgctgggcttccccccgcggggaaagctgtcaccgaaggtgactgatgaggggcgaccttcccgcagcaacccgtttatgggcaattgcggaaagctcgcccctcatccgacctcactgcgttcggccaccttcccccgcgggggaaggcaaagcgtcccccgatggttccgcaccatcgggggacgcttttatttctccatcacatcccgccagggccgtttttcggcaagctcgttgcggcgatggttgcgccagataagcagcgctaccagtgccgcgccgaacaggatgactgccgcaaggttgggcaggcccaccgcgggcagcagcggcgtgatccatttgtcgacgaaccaaaacaccacgaaccacaaaaacagcatggcggctgtaatgacaccgtaccgcacacctttttcggtggaggccgcccactcggcggggacaatgcgctgcagcagccacgcactgggcatcataatggcaatgcagagcacaagccagaccgcgtcataatggcagtcccacgggcggcccaacaccgtataggtcgcggtggaaaccaacgcaaacgtgcacagccacacaaggctgtctgccatgtagtctgccagcttgggtctgggcatgcttgccagcagattccgcttaaaaacctctacgtccccgatgaccgacggcagatagtcgcgccgggcctcggcctgtgccgccatcgcaatcaggtccttgcggatcagctcgatctcgtacccgatgccgcatgtgttgtctaccacgctgatgatttccgtgatggtgtcgcggtcgtactctgccaacgttgaaaaaatcaggtcgttctcttttttcaagtcgcggtattcgttgcgcattgttttcatggttcagccctccttgtcgtgcaaaatgcggttcacagtgtcgctggcgttctgccatgcctccgtaaattcgttaaggtactgcaccccgtcgggggtcaggcggtaatacttgcggctcggcccgccggaacccgcgcggtactcggcggcgatcagccccttgcgctcgagccgcagcagcaggggatagagtgtgccctcggtcaggtcggcaaagccgcagtcccgcagggtggtggcaatggcatagccgtaggtcggttcccggtcaatgatctttaaaatgcagccttccagcgtgcccttgcgcagctgtgcctggtcaaacaccggctcacctcctctgactaccttgcattaccatgttctttgactatattgtattgcaaagtagtggggatgtcaagcagaaattccacccgcatttttgtgtagaatagacaaaagcggcagtccctttttcaagagactgccgccagcagaggttattttcgtttgtaccagcaattcgccaccgcgtcacacgcccgctgcaccgggctaaggttcagcacggccagcgtcaccgcggccagcagcacggaccaaagcacaacgacaatcgtcgccttcccgcgcataaggtcgtacagacccagctcgaccagcagcgcctgcaccggcagatgcagcagatagatcgtcagcgtgtgccgccccagcccggccagcagatgccaacggctggccagcacagtcagcgccgccgtcgtcgcgatgcccacgaggtagaacacgacccggtactgcaccctgtcgccgcccgcatagctcacatcgtggaacagttccgcgctgtggtccatgatcgggtcagcccgcagcacccagagaaaatacgctccatagccaagcagcagccccgccgcagccacaagccgcaccgggcggtgctccgccgcaaacgcggccagcctgtccagctgcgggcggagcagcaccccgcacgcataaaacgggtagaatgcaaatacccgcaccagcgtgaagggccagtccaccagcccggcagccagcgccagccccacggccagcgccatgccaaggcaggaaccggccagccccagcctgtcccgcaggcggcacagaaccggcagtgtcaaatgccagaagatcagtgcgtacagataccatagatgccgccacggcagcagccacgcggccagcaggccgccggtctcggcaaatttttcccgcagaacggcggcacggaacgccagcatcagcgtctgccccacaaggtacagccacagctgttgtgtgaccagcttgcgcggattgaaccgtgctaccagcccgctgcagatgcagaacagcgccatgtggaacgcatagatgcagaaaaacgacgcactgacgaaggaataccccatgcggtactgctcgataaaatggccgagcacaaccagcaggatgccaaggcccttcagctcgtcaatataatcgcggcgctggggcattattggttctcccacggggagcgcacgatctcgccggaatcgaccttgccgaagtcggcgacctctgcgctggccttgacgatgccgcccggagccacatgcacgccgcggcccagatgggcgttgtggtccacgatggctcccgcgttgacgatgcagcccacgcccagatgggcgtccgcaccgacatacgcctgcggcaggatgatgcagcccggctccagcacggcgctggggctgacagacgcggcgtcactgataaaaaccggcgtgctgtagcccgctgctgccagcttttgcagcagctcgacgcgcagcttgttgtcgcccagcgccacaaaggcggggcgtccgcgcttcaaaatcgcggggtcaacgtaatcccgcaggccgcccacggcgtcgggggcgttgtcgtccagaaagtccgcgctgccccagccctcgtccatcagccagtcgttcagctgggtgccaaagccgccgcggcccaggatcagcgggcgctttgtgttgaaactgatttcaatgaatgccatagttatccctcctgttgggttacttcaccgtcgggggtctcgccctcggcgggctgtgcgttggggtcctccaggctggtacgggggtgcacgtccagcggattggccagtgtgccgttctgcaggtcgctcagggcctgggggatgccggggaagaaccgggcaatgccggtgccgccgcagtgcagaccgtcaaagaagtctgtctcctgcaagccttcaatgcacgcggggtcgtagctgccgtaaatcggcacgttgttgtcggcgcagtactgccgcagccagttttccacctggaagaagcccttgtggttctccggctcggtcagcaggtagccgtacagatacgggtgccacggcgacagcacaagaatgaccgttgtgccctgcgactgggcgtatctgacgaaggagtcgaacgcctggatctgggtctggctcagctcgtcaaagccctccatgtgtacgctgttaaagctcatacatgcctcggcggccagcgtgcggatctggtcctcggtctgattgcggaacgctacatcgtacaaaacgctgccgtcggaccgcttgatcgacgtggtctggttgtaggggtcgccctcgacggggttaaactctatcgtgttgccctcgtcgtcggtgacggtggcctgcccgcggttctttatgtagtagtctacgttgccctggaagtacgccgggtcggccagcgccttccacagctcgactttgtcaggctcctcgtaatcggtgggcacattcaggaccttcgtcaggaactcgttgtacaggtcggcgtcggcgcgcgcgtcaaacgcggcctcgctgccgtagaacacccacgggtctatgctccacaaaagaaccttcggggccttgccgtaggtgaccatcttgtagtagcttgtcatattgtcgcgcacgtccgcgccggtgacgcccatgttgaagaagctctcgacgccggtgttctcgcggttgaactgcagaacacggcttgagccgatgccgatggcctcgggcgtctcgggtacatcctgtgcaaataactgtaccacctcgcgctcgtccatctgctcgaagtttgtaacgtcgtagccctggagcatcaagtcgacgatacggcggggtgccagcgcgccctggaacagaccgctgcggtccacattgtagctgaacgccaccatgaacaccagcaccggcacaaacagcaggaacttgaacgccgtcttgatgccgaagtagagccgccgcgccagcccgcgcaggaacagcacgaacgggttgaccttctttctgcgggtgcgctgccgggcgggtgcgctgccgggggcaccgcggtggatcttgaccggcggtgcgggaatgggggtaggggatttcgccatgatacaccgcctttctcaatactgctggtagatgaacgccgactggccgaaggcggcgaagaacagaatcgctgcagccatgccgtagtagagcgtccagcgcagcggccagacctgctggcggatccagcgggcgacgctgcggcccttgtgctccgccgcaaagacgacgaagcagccaaacagcagcacgacgggcaaacggccatcaatgccgctgctgtagatgagattcgacacctgcgcccaggaccctgtcagaccgtcccagccctgtaaaagcgagccgtacacggcaaacgggtcggtgttgtagatagccgacgcgaagaacacgagcgtcaggcagaacagcgcattggtgaaaagacactgccagaataccttgaaccagcccatgcggtagagcgggttatagcggttgattctctgccgcgccctggcggtcatgacaccgaaggcggccagcagacccgtgaacaggccccacgccagataccgccagtccgcgccgtgccacaggccggagcagacaaagacgatgacgatgtttaagtagtgccgccacggggcgcagcggctgccgccgaggctgaaatagacgtagtcgcggaaccagctcgtcatcgagacatgccaccgccgccagaaatcgttgaaggtccgcgcctcaaacggggactggaagttctcgatcaggtcatagcccagaatgcgcgccgcgcccagggcaatgtcgcagcagccggaaaagtccatgtacagctgcacggcaaacagcaccgtggcggccacgagattcgggccgctcatgctgccgacatcgccgtagaccagcgagacatagtggctcaggttgtcggcaaggaccatctttttcgtgtagccccacagcatacggaacgcgccgcccgcgcagcggccatagctgaaccggcggcttttctggatctgcgggcgcatctggggatagcgctcaatgggcccgttgatgagggtggggaagaagctgacaaacagcgcgtagtgcagcaggtttgtctcgacccggcagcggcgcttgtagacgtcgatggtgtagctcatcgccgcaaacgtgaagtagctcaacccaagcggggccagcagattctcccggtgggagaggatgctgccgcccactgtgtctgccagcaggttccagtatttgtagtagacaaggatgccgatgccgaaccccaccgacgcagccagtgccagcacccgcacgggcttggccctgaccttgccgatgatcaggccgcacagccaggtcagcaccgtggcggcggcaatcacccagaccagcgggcggttgacggggtcatagcagaagaagccgtagctggcggccagcagaaagtagggccgcagcacacggggcagggcatagttgatgagcgccactgccgcaaaaaaggcgaggaacaacagcgaggtaattgccatggtctgatcctcgcacaggaaggcgaggacctgctcccaagttatcgtcatgattcctattctccgcaattatttcttttcttccaggtcgcgcacgcgcttttccagcatggcgttggcctgggtcagccgcttgcacttgtcggccagctggctgatggcaatgctcagcgagagcagtaccaccagcacaaagcagaacattaacaaaaacaccagattgaccggcatctcaatgtccaacaggtcgcgcagcacgtagaccacgtaggggaacgccgccgcaatgaccagcccgacggccagcgcaagccagagcaggctgtacttgacgctcatcagcccgcgcttcaaaaacgcaaagatgataagcagcagtaccaccgcgcccagaatcataaacagctgtaattgtgcggtcatgcgcggcctcccttgcttttgcggatggacagacggtcaatgatgagcgccagcgagaccttgatcatgtagtagacgctcttgaagctgtggatgctggacacgccgccctgccgctcccgcatgatgacgggggcctcggccaccttgaagtccgccaaaatcgcggccagcgcggcctccggctccgggtagtcgatggcgtagtgccgggcaaaataggcggtcatccgcgcattggtcgcgcggaagccgctggtcacgtccagcaccctatgcccggacagcaggaaaatcagcccgctcaagaaccggatgccgacccggcgcataaagctggtctggaagccctcttttttgacaaagcggctgccgatgcacatatcgcattcgccgtccagcacgggctgcacgatctccatcaggtaggcggggtcgtgctggccgtcgccgtccatctgcacggccacatcgtagccgttgcgcacggcgtacaggtagccgcactgtacgttgccgccgatgcccagattgaccggcaggtccaggaaggggtaatgatgcctgcgaagcagctcggcgctgctgtcggtagagcagtcgttcacgacgagaaaatccacctccgggcattccgcacgcagattttccaccgtattgacgatgttatcctcctcattgtaacacgggatgataacaagaacttttttatccaaaggggtgtacctctcaatttgggtagtgtagcattttggaaacggggacggcgcccttggccccctctgggagggtgactccccactgcgtggggagatgtcgcgtagcgacagaggggctcgggcccgaagggctccgcccgcaggcggtgggggagagaaccttgcggttatccgaaacttttcgggccgtggcaaggttctctccctccggccctgcggggccacctccctcccagagggaggcagggagaaaaccgcagagcgatttgcaaaagaaaacgtaggagcggattccatatccgcccggggaacctgccgctgctgcacacggctgcgggcgagcaatgctcgcccctgcaacgcggttccgctcagacgcctttgaccgtaaactcctccagccgcttcagcagctcggcacggcggtagtgggcggtgtaatacgcctttgccttcgcgcccagtgcggcccgctcggcgtcggtcatgcggtacagcgccagcatattgtccgccagcgccttttggttgcgggccgggctgacaagcccaccgccgctctccaggactgccgcatagcccgcgccgttcatcgaggccagcaccggcttggccgcggccatgtagctggccagcttgccgggaacggtcagtcccagatcgggtgagtcggaaagcgagatcagcagcgcgtcggccagcgccgtaaaccggggcacatcagcggcgggcacactgccgtaaaacgtcacggcgtccccggcgtgcaggtcggcagcctgtttctgcaaagcctcgcggctcatgccgtcgccgaccagaagaagatgcaggtgctccgccccggcggcgcgggcgtccagcacggcacggatcaccatgtccaggctttgcgccggggtgaacgtaccggtgaacactacgttgaaccgccccgcaaactgcgcctccagcgccgcgtcatgctgcggcacggcatagaaatcctcgcagtactgcggaatgaccgctacgtccgccgtgctcttgccggtgcgggcgcacagccgctcttgcagcggcccgctcatggcgatcagccggtcacagcgcctgtacaggctgtcgctgaccgactgcgcgacccagcgcataaacctgtttttgaccggcagcacgctgtacagattctccggccagaggtcaaggacgtaattcgtaaacggtatatggtgcttttttgtataccggatggcaggccagcacatcagcacggggctggtgttgaagcagaacaccgcatcgtacccgccgggcagacgctttaacgcccccgccgcgtagagcggccagctgacgtagttcagaaaaatcgtcttgccggtgttgcccttgcgggggatctcccgcgcacggaacacccgcgcacccttgtagacttcctcaaacgggccgtcggcgctgtagccgtcgaaccattcgcccttcgggtagttgggcagaccgcagagcacgtccacggagagaccgtcctgcacgaagccttcgacaatatcgttgatgcggaaattttccggccagaaatgctgggtcactaccagtatgcgcataatatatcgtgttcctgtcgcttagtatttgcgccacaccatcttgttgacaacaccggtgtagctctggatgatcttgacgaccttgtcggagacattctcgtccacgtagttgggcacgggcaggccgaggtcgccgttacggttcatctccacagccacgtccacggcctgcagcaggtggtcgccgtcgatgcccgccagaatgaagcaggccttgtccagcgcctcggggcgctcggtggaggtgcggatgcagaccgccgggaacggatggccgacgctcgtgaagaagctgctttcctcgggcagcgtgccggagtcggacacgacgcagaaggcgttcatctgcaggcagttgtagtcatggaagcccagaggctcatgctgaatgacgcgcttgtcgagcttaaagccgctctgctccagacgcttgcggctgcgcggatggcaggagtagaggatcggcatatcgtacttttccgccatcttgttgatggcggtgaacaacgaggtaaagttcttctcggtgtcgatgttctcctcgcggtgggcagacagcagaatgtacttgcccttctcgagacccagacgctggtggatgtcggacgcctcgattttttccagattctggtgcagcacctcggccatcggggaaccggtcacgtaggtacgctccttcggcaggccggtgtcggccagataacggcgggcatgctcggagtaggccatgttcacatcggagatgatgtccacgatgcggcggttcgtctcctcgggcaggcactcgtccttgcagcggttgccggcctccatgtggaagatgggaatgtgcagccgcttcgcaccgatgacggacaggcagctgtttgtgtcgcccagcaccagcacggcgtcgggctgaatggcggccatgagcttgtagctctccgagatgatgttgcccatcgtctcgcccagatccgcgccgacggcgttcatatagacctcggggtcggccagctgcaggtcgtggaagaacacgccgttcaggttgtagtcgtagttctggccggtgtgggccaggataacatcaaaatatttgcgagtcttgttgatgacggcggccagacggatgatctccgggcgggtgccgacgatgatgagcaatttcagcttgccgttgtttttaaaggaaatgctgctgtagtcagacatacttttctccttagtagctactatgtgcaggggatgtaggggcgaacatcgttcgcccgcagaaacgttacgagcggggcaaacttccgggtcgatgacgagcatcgacccctacatcgcaggggcggattccatatccgcccaggaactttgccgctgccgcacacgggcacgggcgagcactgctcacccctacaatgcgcccgttttacaccttttcaaagaatgtatccgggtgggccgggtcgaactgctcgttcgcccacatcagggtgacgaggttctcggtctcgctcaaattgatgatgttgtgggtgtaccccggcagcatgtggatggcctggggcttgtcgccggtcacctcaaattccagcacctcgccgctgccgacgcggcgctcctgaatcagaccgtggcccgaaaccacgatgaaaaactcccacttcgtgttgtgccagtgctgaccctttgtgatgccgggcttcgagacgttgacgctgaactggccgcagttctcggttttgagcagctcggtaaagctgccgcgggcgtcctcgttctttttcaggtcaaagatgaccttctctttgggcagataggacagatacgtcgagtacagcttttttgcaaagctgcctgccggaatctccggcagtacgagcgttgcgggctgagccttgaacctttccagcaggtccgcaatttcgcccagcgtgactttgtgggtcaccggcgcggcacagtagcgcccactgtcatggaaaaccggcgtcagaccgtcgtaatcgcagcggtgaggcttaccctccagcgcgtcgagcatttcctccagcaggtcgtcaatgtacaaaagctccagctcggtggcgcggtcattgaccgtgatgggcaggtcgttggcggtgttattgcagaaggtcgccacggcgctgttgtagttggggcggcaccacttgccgaacagattcgggaagcggtagaccagcaccggcgcgccggtctcctgcccgtaggtgaagaacagctcctcaccggccagcttgctctttccgtagtcgctctcgccgtagcggccgatcagcgtcgcctggatcgagctggacagcatgaccgggcagcggttggcgtgagatttgagcgtgtccagcagggtagaggcgaagccgaagttgccctgcatgaactcgtcgttatttttgggacggttgacacccgctaaattgaacacaaaatcggcttgtgcacaaaagtggtccagctctgcggggggcgtgtcgaggtcatactcaaacacgtcctcgatctgcaaggcggggcgggtacggttcttgccgtcgcggacagccttcaggttctcgcagagattgcgccccacaaagcccttagcgccggtcacaaggatcttcatgccttctcggcctccatctctttcagggcgttccggacatagtcggtggtcaaaattttcttaaccgtgccctccacgtccagacggtgcgtgttgtggcttgtgtaggagtcgtcggccatcgtgtggacctcacccttgacgacgaacttgtcgtagttcaggtcacggttgtcggcggccacgcggtagtaaccgcccatgtcctcactgcgcaagcgctcctcgcgggtcatcagggtctcgaacagcttctcgccgtggcgggtgccgatgatgttcgtgccggtgtcgccgaacagctgctgcacggccttggccaggtcgccgatggtggaggcgtcggacttctggatgaacaaatcgcccgggtttgcatgctcaaacgcgaacatgaccaggtcaacggcctcgtccaggttcatcaggaaacgggtcatattggggtcggtgatcgtgatggggttgccggcgcggatctggtcaataaacagcggaatgacgctgccgcggctgcacatgacgttgccgtagcgggtgcagcagatcgtcgtgccgccgcgctcggcggccacgcgggcgttggcatagatgacgtgctccatcatcgccttggagatgcccatggcgttgatggggtaggcggccttgtcggtggacaggcagacgacgcgctccacgcccgcgtcaatggcggcgtgcaggacattgtccgtgccgatgatgtttgtctgcacggcctgcatcgggaagaactcgcaggacggcacctgtttcagcgctgccgcgtggaagatgtagttgacgccgggcatggcatcccggatggactgcgggctgcgcacatcgccgatgtagaacttgaccttgccggcatactgcgggtggttggcctgcagctcgtggcgcatgtcgtcctgcttcttttcatcgcgggagaagatgcggatctcgccgatgtcggtggacaggaaatgcttgagcactgtatgcccgaagctgcccgtgccgccggtgatgagaagagtcttatccttaaaaatgctgtctgccataatatcctccttataattggctgcgcaaaaggcacagagatcctttataatcttattcattttagcacaaaaaacgctgcttgaaaagggcacagggttggaaattgctgctttttgtggtataatagctaagaaatcacagcaaaatgctttttacaaggaggacacgcccatgcgcgcctacgaacgtcttttaaaatatgtaaaggtccacacgacctctgaccccaacagcggcacccaccccagcacgctgcgccagtttgacctggcgaagatcctcgttgaggagctgaaggagctgggcctgaccgatgcccatgtggacgagcactgctatgtctacgccacgctgcccgccaccccggggcaggagagcgccgcgccgctgggccttatcgcccacatggacacggcggacgacgccagcggtgagaacgtccagccgcagatccacgaaaactacgacggcgaggctgtcacgctgcccgccaccggcacggtgctggaccccaaggtgttcccgttcctgcgcgagatgaagggccagactctcatcaccaccgacggctcgaccctgctgggcgcggacgataaggccggtgtggccgagatcatgaccgcgctggagcgcatcattgccgaaaatcgcccccacggcaagctctgcatcggctttacccccgatgaggaaatcggcgagggcgcgagcctgtttgacgtcgagggcttcggcgcggcctacgcctacaccgttgacggcgaggacgtcggcgagatcagctatgagaacttcaatgccgccgcagccgtcgtgaccgtgcacggcttcagcgtccaccccggcagcgccaagaactcgatgatcaatgcgcagaacgtggccatggagttccacgccgcgctgcccgccttctcccgccccgagcacactgagggccgtgagggtttcttccacctgacgagtatgcagggtgacgtgaccaccgcgcacctgggctacatcgtgcgcgaccacgatgccgccaagtttgccgcccgcaaggcccagatgcagcatattgccgcctgcctgaatgaccgctacggcgcgggcacggtggagctggacatcaaggacagctattataatatgttggagaaaattcagccccacttccatctggtcgagaacgcccgcaaggccatccgcgcggcgggtcttgaacccatcgagaccccggtccgcggcggcaccgacggcgcgaccctgagctatatgggtctgccctgcccgaacctcggcaccggcggcttcaacttccacggcccctgcgagtgcatcactgccgagaagatggatcagggcgtcgaaattttgctgaatctggtcgagctgtataaataagggcccggagtttattgaaaagaaattgaataagacataacaacagcccgtgcttcccaatcgaagcacgggctgcttggctattttctgcgaaccgtaaagcaggatgtaggggccgggcatgcccggcccgcaacctgacggctgtgccccttttctggttggctttgtagggaggggtcttgacccctccgcggcggccagaggtctggccgccctacggactctcgttcatgttgttggtaggggagggattcatccctcccgtgcacctgcccatagctgcaacattctccgggcagcatctataccgcccatgcgaacggggagctatttacgcgttccgtcgtcattaaaatggtttttcaaggctttttctgtcgggtaaattgatgcaaccataataaaacattgaattgccacaagaatcagccctgcaattccaatcgtattctcatcactatggtataacggaatatgtatcaaagcggatgctatagtcgttacccatcctactttccaccaaagttttccgcagtagtcgtgggcaaattgccaggtgtccatatttttcatggagcgagttgtcctatacccaaccagactatttatatgctttgggcagtgtttccacatcattcttcctacaataaccataacaatgggaactagcatatcacatagtaacataaaccaccaaaaccacataaaattcacctccactttaagcaggctgtaggggccgcacatgtgcggcccgcagcctgacgggaaacgcccttttgcgggaaagccgcgggccgggcatgcccggcccctacacggcatttttagaaatcacttcatcttccccacatacaccagatacgaatacaaataaatccacgcgctgccgccaagaacggcggccagcagcacgatcagcgtagcaatgtcgcccagcaggccgcccaggaaggcaagcaccaacaggacaatgcccataacgacaaaggtgtacccgcccatgcgctgggtgcgctgccagttgtgcgcgtcgttcagcgcccagggcgtgcggcagccgaaggtataattctgcttgatctgcggcataaaattgcccatgatgatgaacagcacgccgatgccgccgcagaccaggatgctgacgaggttgctgctgtccggcagcttaccgaaaacagccaactcactcagccagctgaacgcggccatcatcacggtgaacagcactacgcacaggttccataccttgccgaacttctcaaaattctggtgcttggggtcgattttgcggatgacctcaaacaaaatcaacatcgtaaacggcagcgcggccaaaatcaaaaccgtggatttcggcccccatccgttgacctgcccgccggcgccccagtgggtgggcacaatgtccggcagggaggggtagaagtacaggtgcgcggcaaaattcagcacgcagaccacggttaaaatccagaacagcttattctttttcattgctatcgtctccctttacaagtccgcagtcgtaaaaccacttcatcaattcctgaaatacggtcagattcacactgtacacaatgttctggccgcggcgctcatcggtaataagcgccgcacttcttaaaatgttcagatggtgactgacggacggctttgtcatatcaaaatgtgcggcgatctccccggcggtcagatcgccctgtgccagcagttctaaaatgcgccgccgcgtcgggtcggccagcgccttgaaagcatctcccaaacagaacaactcctttcctgataaacaattagataaacgtctaactgtctatgcctttactatactcctatgcacctgccgctgtcaatagatattttgaaaaatatctaactatccgctcccctccgattgcttctccaacttttaccaatgatttttctcgcaaattcacaatttgtttgcaattttcctattgacatggtatgtgaatgtgctacaatattagcagtcgaacagatagagtgctaaagaaaaacgaacacacagaatttgcgaaagcggattcttgaactgcaaaacaaaagcactttacgtgcgagactgccagaacaatgcgctatctgcactaaaggaggtacgcactatgaacatcgaacaaatgacacagaaaacccgtgaggctttgcaggctgcacagcgcatcgcggtggaatattccaacaacgcggtggagcaggagcatctgctggccgcccttgcccagcagcaggacgggcttatcccgcagctgctgcagaccctcggcattgacgccaatgcctttgcccagacggccttgcagaaggtcgaggcgctgccccgcgtgaccggctcgggccgtgacccggagaagatctacatctccaacgatctggaccgcgccctcaatgccgccgagcagcaggccaagcagatgaaggatgaatacatcagcgtagagcatgtattcctcggtattttgcagcggcccggcaaggctgccagtgaaatcttcaagactttcggcatcacaaccgaaaaatttatgaagcagctgagtacggtacgtggcaatcagagggtcacgagtgataacccggaggacacctacaatgctctgaaaaagtacggtcaggaccttgtcgaaatggcaaaggcgcataagcttgaccctgtgattggacgcgatacggaaattcgcaatgtcatccgtatcctgtcccgcaaacgcaagaacaaccccgtgctgatcggtgaggccggtgtcggtaagaccgccatcgccgaggggctggcgcagcggatcgaaagcggagatgtgcccgaaaacctgaaggatcataccgtgttcagtctggacatgggtgcgctggtcgcaggtgccaaataccgcggcgagttcgaggaacgcttgaagagcgtcctcaacgaggtcaagaagtccgagggcaagatcatcctcttcatcgatgagctgcacaccattgtcggtgcgggcaagaccgacggcgcgatggatgcgggcaacctgctcaagcctatgctggcccgcggcgagctgcactgcatcggcgcgaccacactggacgagtaccgcgagtacatcgagaaggaccccgcgctggagcgtcgtttccagccggtcatggtcaatgaaccgactgtcgaggacaccatctcgatcctgcgcggcctgaaggagcgctacgaggtctatcacggcgtcaagattcaggacgccgccctgatcgccgctgcgacgctgtcggaccgctacatcacggatcgcttcctgcctgataaggccatcgacctcgtcgatgaggcctgtgccatggtcaagaccgagctggattcgatgcccgccgagctggacgagatgaaccaccgcatcacccagctgcaaatcgaggaggcctctttaaagaaggagaccgacgagctgtccaagcagcgtctggccacgctggaaaaggagatggccgagctgcgcgacagcttcaacagcaagaaggcgcagtgggaaaacgaaaagaacgccgtgaacaaggtgcagagcctgcgcgccgaggtggaatccaccaaggccgagatcgaaaaggcgacccgcaccggcgactacgccaaggccggtgagctgcaatacggcaagctgcccaccctgcaaaagcagttggaggaagaagaaaagctggccgaagcaaagaaagaatccagcctgcttcgtgaccgcgtaacggaagaagaaattgcgaacatcgtcgcccgctggaccggcatcccggtctccaagctcgtcgaaggcgaacgcgagaagctgctccgcctgccggacacgctgcatcagcgggtcatcggccaggacgaggccgtgcagaaggtctcggacgctatcctgcgctcccgcgccggcatcgcgaacccgaaccgccccatcggtagcttcctgttcctcggccccacgggcgtcggcaagaccgagctggccaaggcgctggcacaggccctgtttgacgacgagaagaacatggtccgtatcgacatgaccgagtatatggagaaattcagcgtctcgcgtctgatcggtgcgcctccgggatacgtcggctatgaggagggcggccagctgaccgaggccgtgcgccgccacccctacagcgttgtgctgttcgatgaggtcgaaaaggcccacccggacgtgttcaacatcctgctgcaggtgctggacgatggccgcattaccgacagccagggtcgcacggtggacttcaagaacaccgtcatcatcctgacgtcgaacctgggctccgacctgattctggaggatctggaaaagagccgtgccaacggcagcaacgagctgtccgacgaggccagaaacgccattgaccagctgctcaagcgccagttccgccccgagttcctgaaccgtctggacgacattgtctactacaagagcctgaccaagaccgaaatcggctccatcgtcgacctgatgctggccgacctgcgcaaacgtctggaggacaaacagctgaaactggttgtcaccgacgcggccaagaacgccatcatcgacggcggctatgacccgatctacggtgcccgccccttgaagcggtacatccagtcccatgtggaaacgatgatcgcgaaggagatcatcggcggcgcccacacggcaggggacaccctgaccgtggatgcggatgggaacggacagctggtgctgcgctgaaccctacaataataaatgacgctccgggcggtatggaaaatgttccataccgcccggagcgtttttgcttgtcttgcagcgttgcagggaccgcacatcgcgacccgttagcttccggcagcccaggcgcttccggggcgatgacgagcatcgacccccacgccgtaggggcggattccatatccgcccgctcatccgggcg

SEQ ID NO: 1015 - DNA, 9164 bp, unidentified
  source 1..9164: mol_type = unassigned DNA
ttacttattgttcttcttctcattctcaagcttcttcatagctcttaccttaagtgaaagaccgaagaggttgatgaatccgtcagcatcatgatgatcatacatatcacctgtcttgaatgatgcaattgactcgttgtaaagtgaatatggagatgttgttccagccttgatgatgttacccttgtaaagtctgaacttaacttcacctgttacatattcctgagtcttctcaacgaatgcctgaagtgcttcacgaagaggtgtctcccactttccttcgtaaacaacctgtgcaaacttgtttccaacatccatcttgaatgttgttgtatctctgtcgagaactaattcctcaagctgctgatgagtttcgtaaagaattgttccaccaggagtctcatatacaccacgggacttcataccaacaacacggttctcaacgatatcaatgataccgataccatgcttggcaccaagtctgttaagctctctgataatatcagaaaccttcatagccttgccattaactgactttggaacacctttttcaaatgtcatagtaacatattctggttcatccggagcttcctcaggagtgcatccaagaactaataaatgcttgtagttaggctcattagctggatcttcaagctcaagaccttcatggctgatatgccagatgttacggtcacggctgtagctgcagtctgtgctgaatggaagatgaataccatgctgtctgcagtattcaatctcatcctcacgagactgaagcttccagttagaatctctccaaggagcgataatcttgatatctggagctaaagccttgattgtaagctcgaatctgatctggtcattacccttaccagtagcaccgtggcagatagcaacagcaccttccttacgggcaatctcaacaagtctcttagcgataagaggtcttgccattgaagtaccaagtaaatatttattttcataaacagcgtgtgcctgaacacatggaacgatgtagttgtcgcagaactcatcagtgatatcttctatatataacttagcagcaccgcatgagagagctctctgctcaagtccgtccaactcctcttcctgaccacagtctgcacatacgcagacaacatcatagttgtatgtttcctttaaccaagggatgatggcagttgtgtcaagtccgccagaataagcaagaataactttttctttcattatatattcctccgtatattattaagtttacatagtaaaacacatatgctatgcatctgcagattataataaactactttatttaaaaatgcaacaacaaattatgcatattatacattaatatacaacaaaaatgtataaatataaaatttcttcaaaatatcctttacataagaaaaaaagttgctataatgtaggttatcaatttacattttgcgttattttatgcataaatgttgaatatatgcattttgcttcgcaaaacaaggaggagttatgattaaagtaggcattatcggtgcgacaggttacgcaggtaacgagcttgtcagattattattaggacataaggatgcagagattgtatggcttggttcgagaagttacatagatcagaattattcagatgtatatagaaacatgtttaagcttgtagatgcaaaatgtatggacgacaatatggagcagcttgctaacgaggttgatgttatatttacagcaacaccacagggcttatgtgcatcacttgttaatgacgaaattctttcaaagactaagattattgatctgagtgctgatttcagacttaaggatgttaatgtatatgaacagtggtataagcttgagcataaagcaccacagtatattgatgaagctgtctatggcttatgtgagattaacagagacaaggtgagcaaagatacaagaatcattgcgaatccgggctgctatacaacaacatcaattcttacactttacccaatggttaaggaaggaataatcaatccggatacaattataattgatgccaagagtggaacttcaggtgcaggacgtggagctaaggttgccaaccttttctgcgaagttaatgagagcatgaaggcttatggtgtcggaactcacagacatacacctgagattgaggaacagttaggttatgcatgtggaagagatgatttaaagcttatcttcacaccacatttggttccaatgaacagaggaattcttgtaacagcatacgccaaccttgccaaagatgttacatatgaagatgttaaggcagcatatgacaagtactatgataaggaatatttcgtaagagtacttcctaaagatgtatgccctgaaacacgctgggttgagggaagcaactttgttgatataggatttaagattgagccaagaactaacagacttataatgatgggtgcgttagataatcttgttaagggtgcagcaggtcaggcagtacagaatatgaaccttctcttcggacttccagagaatgagggattacagcttgcaccaatgtttccataataaatgtagcgtaaattcagaatttacacgacgaaatatgcacaatgacagagtatatgtgatggtacaataggaggatgttatgaatataattaaaggcggtgttacagcagctaaaggattcaaggctgccggatgtgaagcacagattaaatataagaacggaaagaaagatatggcacttgtatacagtgagaagccatgtgttacagcaggaacatttacaactaacaaagtatttgcagctcctgttaaatgggacagaaacattgtatataatgaagactttgcacaggctgtagttgtaaacagcggtgttgccaacgcatgtacaggcgttgaaggagataacgcatgtgcagaagaagcaaaggcagttgcaaaggttcttaatgtaccggagaatgcagtacttatcggttcaacaggtgttatcggaatgcagcttcctgttgacagaatatgtgcaggaattgaaaagcttgctccaatgcttgatgcttcattagaagcaggaacacaggcagcagaggcaattatgactacagatacaagaagcaagcaggttgctgtagaagtagaggttgcaggtactaaggtaacaatcggtggtatgtgcaagggcgcaggaatgattcatcctaacatggcaacaatgctctgctacataacaacagactgtgatatcgacaaggcacttcttcagaatatgacaagtgcaattgttgatgattcatttaatatgatatcagtcgatggagatacatcaactaatgatacagctcttgttcttgcaaatggaatggctggcaacaagaagattacagaagagggtgctgattataatgctttctatgaaggcttaagctatgtatttacagagctttccaagatgattgcaggtgacggcgaaggctgtacatgtcttttcgaggttcaggtaaagggtgcaacaactaaggcagaagccaagacacttgctaagtcaattgttacatcaagtcttactaaggcagcaatattcggacatgacgctaactggggaagaattctctgtgcaatgggatattctggtgctgactttgaccctgaaaaggttgatatattctttaagagtgaagcaggtgagcttcagattgttaaagatggaactgctacagattacagcgaggagaaagcaacggaaatactttcacagaatcctgtaattgctattgcggatgttaagcagggcgatgcaagcgctacagcatggggctgtgaccttacatttgattatgtcaagataaatgctgattacagaagctgatctgacacagcattttaaagcaaatatatctgaataaatatgaaatggagattattatgagcgcaaaagatatgacagaggaacttatgaaggcacaggtgcttgttgaggcacttccttatatccagaaatttaacagaaagataattgtagttaagtacggcggaagtgccatggtagatgaagaacttaagagaaaagttattcaggatgttgttcttcttaaactcgttggttttaagccaatcatcgttcatggcggtggcaaggaaatcagcaaatgggttgaaaagtcaggcatgacacctgaattcaagaatggattaagagttacagacgagccaacaatggagattgccgagatggttcttaacaaggttaataagagtcttgtgtcaatgattgagcagcttggagttaaggcatgtggtatcagtggtaaggatggcggcatgttaaaggttgagaagaagtattctaagggtgaggatataggatatgttggtgaagtgacagatgttgacacaacacttcttgattcattgcttaaggacgatttcctcccagtaatatgccctattggatatgatgatgattttcatgcatacaatattaatgcagatgacgcagcatgtgcaattgcaagagctgtcagtgctgaaaagcttgcattcttaacagatatcgaaggtgtatataaggattttgacgataaggattcacttatatctgagctttctacttcagaggcgagaacacttttagagagcggaacaatcggcggcggtatgcttcctaagcttaataactgtatagatgctattgagcatggtgtatcaagagtacatattcttgatggaagaattccacactgccttcttcttgaaatatttactaacaagggtgttggtacagctattctttcagatgatgcagaaaaattctttgattcagataaataattgcgaaccgtaagcgttgaggttataatattatattggcccatgtgaaaatgtgtgctcataagaataggaaagtgagagtaatcatgaatacacagcagattatagaaacagcagaagagaagctgattcatacatacaaccgttaccagatagtacttgataagggtgacggagtaagactttacgatacagatggtaaagaatatcttgattttggagcaggtatagcagtatttgcacttggttataacaataaggaatataacgatgcattaaaggcacagattgataagcttatacacacatctaattatttctataatgaaccggctgtagaggctgcaacagcacttacaaaggcttcaggaatggacagagtattctttactaacagtggtacagaggctattgaaggtgcagtcaagcttgcaaagaaatattattatgtcaagaacggaaaagctgatgcagagattattgcaatgcagcattcattccatggaagaagtatgggagcacttgcagtaactggtaataagcattatcaggaagcattcggacctatgataccgggaattaagtttgcacagtataacgaccttgacagtgtaaaggaacttgttaatgacaaaacttgtgctataatatttgagacagtacagggtgaaggaggaatttatcctgctactaaagaatttattgaaggtgtaagaaagttatgcgatgagaagggaatccttcttatacttgatgagattcagtgcggaatgggaagaacaggaagtatgtttgcattccagcagtatggcgttaagcctgatatccttacagttgccaaggctcttggctgtggagttcctgtaggtgcatttgcagcgacagaggaagttgcgaaggcattagttccaggagaccatggaacaacatacggtggtaatccacttgcatgtgcagcagcaaccaaggtgttcgaactttttgagaagcagcatgtattagataatgtcaaggaagtatctgcttactttgaagaaaagcttgatgagcttgttgagacaatagatgttgttgtcgagagacgaggaatgggacttatgcagggacttgagttatcagttaatcctaaggatgtaattgcgagagcacttgataacggacttattctgttctcagcaggaactaatgttataagatttgttccaccacttgtaattactaaggcagatgtagatgaatgcatagctaagcttaagaaatccttctagaatcaggagtttactttatgaaattaagaagatttatcagtatgatgctgattgttaccatgctgacagtctttgcaggctgtggtaataaagatgacaggacacaggctgcgaagaagcttaatcttagtggacctattacagttaatgtctggtataatgacagtgcatatgagtcttatcttgaattcgttgccagacaatttaagaaatctaatgaactggtgactgttaagccagtatatattgaggcggattcatatattaattatatatatgacgaatcggtaaggaataacaatgcatgtgatatatattttctgacatctgaagagatggagaaggcttatctttcaggtcttacctctgagaatgatatgtatcctgaagtctataatgagaatgtgtatggtaaggctgcaatgactgcatgttcgtatggtggtaagttatatggttacccggtgtcgttcaacacttcatttcttgtatataataagaaatatgcagaagcagttgatactatagaccagattcgtaatataagtgataattatcagattacagatgagaatcaggatgtttcaatggtgtttgaatgggatcctgattcaatgttccttaattatgcagcagcaggagcctatattaatataggcggagttaatgcagagaacagggctgaggtatctcttaatgaggaaaagattaagaaggttcttactaagtacgctcagttaaaagatgcatttggtattgacagaaatacagtaagtcttaaagactgtgcagatctgttttctactggaaatatgctctatactgtgcttgatgcagacagtcttgcagagattaatgttacagatgtagattatggaatatgtgagtatccttcaatgggagatgaccttgattctaaggcaatgtctgttactacgatggcagtagttaatccgtacactaagaatgtagatgcatccaaggctgttgcaagagcaatttcttatgattatgcagattatcttggaagcatggctaagaaaagctgtgcaagggcggatttaaaggttaagagagcagaaagctaccagaagttacaccagatttattctgactctgttgtaaaagccaaatatatcggtgttggagaagtatacatgagatatgagattatgcttcatcaggtatatgatggtggaaatgttgatacagcttacagtacatttgcaacaacaatagaaaaaacaactaaaaataataatgaaaacagtacgcagagtacgaaataacattatgaataaatatcctgttattaactaataattatcctatgcagattaatgaggaggttagttaatggcaggatttttgattgcaataatatcaggtgcacttatgagtttacagggtgcatttaatacaaatgttacgaaagcaagcagtgtgtgggttacggcaatgtttgtgcagttgacagcactggcgacttgtgcgattatgtgggtaattgacggaagacctgatatcatgaagctgtttaaggttgataacaagattacacttcttggaggtgtgataggtgcatttataacatttacagttataaaaagtataagtggtcttggaattgctaaagcggaggttacgattgtagttgcgcagataattgtttcgtatctgctgggacttttcgggctgtttggaagtgagaagactacattttcatggattaagctcgtgtcgcttcttattacggttgcaggagtatgtatgttttattttcttggtaatccgtcaacggattaatatattatgaataattatgataaatgtcagaattatctggcaggaaggaacagaatggaagatttattcagcgtatgcggaaagatacgattaagaaaaggtgaaggaagaaccttaaaggcaggcggtgcctgggtatatgataacgaaattgaatggatgtctgacggaataattgacggacatcttgttgaggtgcttgattttgatgattatttcatgggaatcggatttattaacagaaaatccaagattacagtaagaatgctgagcagacacacagatgttgttgatgagacatttattgaggagagagtaagggctgcggttgaatacagatttaacacagtagatacctctgcgtgtcgtcttatattcggggaggcagattttctgccgggacttgttatagataagtactcagatgtgcttgttgtggaatcacttgctttaggaattgacagatttaagtcacttattgtcgaaaaagtgaaggaaatccttcgtgaaaaaggcattgatatccgtggagtatatgaaagaagcgatgccaaagtccgtactcttgaagggatggagagagttaagggctttattggtgatgaatttgacactaatgttgagatagttgagaatggtgtccactacatgatagatgttgtgaatggacagaaaaccgggttctttcttgatcagaagtacaacagacttgcaatgcagaagctgtgcaaggacaagcgggtattagactgttttacccatatgggtacatttgcattaaatgcaggaattgcaggtgctaaggaagttactggacttgatatatcagaatatgctgttgaacaggcgagagccaatgccaagcttaacggacttgagaatacagtacattttaaatgtgcaaatgtattggatgagctgccaaagcttaacgaagcaggtgagaaatatgacgttgtaatacttgacccgccggcatttaccaaatcgagggaagctacaaagaacgcaatcaagggctacagggaaatcaatatgaagggacttaagcttgtcaaagacggcggctatcttgcaagctgttcatgctcacacttcatgacacaggagcttcttaccaagactattaaggaagccgctaaagctgtacataaaagactccgtcaggtcgagttcaggacacagtcacctgaccacccaatactgtgggaggcgcaggagagctattatctgaaattctacatcttccaggttgttgatgaaaaatga

SEQ ID NO: 1016 - DNA, 28011 bp, unidentified
  source 1..28011: mol_type = unassigned DNA
aaggtgctgtatgtctccaatatcaccgatattgacgataaactgatcaaaaaaggccaggagaatggcaccaccatgcaggaggttgcccgcaagttcgaggccgagtacatcaaagattccgagggcctgaacgttaagacccccaccgtgcgcccccgcgcaaccgagcatatcggtgagatcatcaagatcgtcaaggacctggtcgaatccggacatgcttacgttgcccacaacggcgatgtctacttccgcgttaagtctgatcccggttacggcaagctgagccacctgaacttggacgacctggaaagcggcaaccgcgaactgcgcagccagatggatgacgacctgaaagaagaccccgcagattttgctatctggaaggccgccaagccgggcgagccttcctggaacagcccctggggccagggccgtccgggctggcacattgagtgcagcgccatggcccgtaagcacctgggcaagaccatcgacctgcatgcaggcggccaggacctgatcttcccccatcacgaaaacgagattgcacagtcggagtgcgccaacggctgcaccttcagccattactggatgcacaacggctttttgaacatcaacaaccagaagatgtccaagagcgccaacaacttctttaccgtgcgtgaaattgctgataagtacggctatgagccgatccgttattttatgctcaccgctggttaccgcatgccgctgaactatacggtggacctgatcgagagctgcaagaacagcttggagcgcctgtacacctgccgcgataacctggattttgccatccgcaatgtccatggcactgacactgccctgactgaaaagtgcgaagaagcacgcaaaaagttcaagaccgccatggatgacgacctgaacacccccgatgcgctggccgccatttttgagttcgttaaggacatcaacaccatgtccgatgctgccgataaggctacgttggaaaaggccgccgccacgtttgacgagctgaccggtgtgctgggcctgatgtacaaccgcaaggctgaggaagcccccgacgaagtgaagcagctggtggaagagcgcaccgcagccaaaaagaccaaggactttgcccgcgccgatgctctgcgcgccaaaatcactgagctgggctggaatgtgatggacaccgccaagggcccgcagctgaccaagctataattattactgcacaatcacggcaaaacaaaggaattggaaacagggaagcatctgcctctgcttccagttccttattttattgcagcggcaaatacgctgcattatctggagagtttagaatgacaaataccagaaccaaacaggaagagcgaacgctgtatattatattggccgcagcgcttgccgtgcgcctgctgctggcccttgttactgaaggctacacctatgatatgagctgctttgtggcctggggggataagctggccagcgaaggtcccgcggccttttacagcgccgattattttgcggactacccgcccggctacatccttgtgctggggctggtcagcctggtgcgcaaggcgctccaactgagctatgaatcccgctggacctattttttgctggcactgatccccgcaatctgtgattgtgccgccgtggtgctgctggaccatatcagccgccggtatatggggcagggcagggcacagcgctgcctggtgctgtttgcggcgttctgcccgctgaccttgtttgataccggcatctggaagcagatcgatggggcttttgcgctgccgctgctgctctgcttctggctgctggaagagcgccgctacctgctcgctgcggtgctgtacggcgtggcgctggccatcaagccgcaggcactgttggctgggccggtgctggccgtctgctttttggtggctattgcggatgccgtgcgggatggcaaaagcccgctgaaatcggtcggccagatttttggcggtgctgcgctggctttgctgccgccgctgctggcgggcctgccgttttacggggcaaaaaatctggtgccgtccttgatcgataagtacatcaccacggcgtctggctaccagtatgccaccatcaatgcgttcaactggtttgcagcgctgggcggcaactggcaggcgctggatgcttgcccggtgtttaacctgagctggaaagtgctgggcattttcaacatcgctgttatcacggtgctgcttgtggtgctggcggtcatcagctggcgggcggggcagttttccccgctgctgctggcagcgttttacacggtggggatttttacctttgcccactgcatgcacgagcgttatctggtgctgggcatgctgctggtactgcttgctgcggcgcgctggaatgacatccgtctgtatggtgccgggtttggtctgtcgataacgggcttcttgaacctggaaactgtgtataccctggtaggcagcgatgacgagtggctcagcagcgataccagccgcgagtttgccatggcagtgggctttgccgaaacggcagcctttgtgctgctggctttcaccgcgtgggccatctgccgccatggagcgatttctccactggcaaaagtggaaaccatcgaaaaagataaaacaaaaacagtgcagaaaaagctggaactgtgcaccctgcgcattgatccgcagcctgcctggacggctaaagagaagaaagccttggcaacgctgacgttgatcgttgctgtggtgagctttgcctaccttggcagcatgaaagcaccgcagaaccctgtggatgctacggacagcacggcaaccatcgactttaccccgcaacaggacgcggtggaaatctgggtgtaccccggcatttccaccggcggcagcctgcgcatcacggatgcagcgggcaatgagctgtaccagaaggaactgagctatgcaacgccgttctgctggagcaaaacggccatcacggctccggcagggcagaccctgaccgcaacgattgaaaatgcgcagatgtttgaactggccctgcgggatgccaccggtgcgctggtgccggtaacgggcggcgatgccctgtttgatgagcagagcgaagtgccagatgccatcagccagctgaacagcatgtatttcgatgaaatctatcatggccgtactgggtacgaaatgctgcaccgcatgacggcatacgaaaccacccacccgccgctgggcaaagattttatcatgctgggcattgctatttttggaatgacagcctttggctggcgctgtgccggaacgctgttcggcgtgatgctggtgccgctgatgtggtgctttgcccgccgtctgacccacaaacgctgggccggggccatggcaggtgcgctgattgccgctgggttcatgcgattttcccaaagccgcattgccacaatcgatatttacggtacgttctttatcctgttaggcgcatattttatggtatggtattgccagagcgtgctgcaaaacggcgtaaacggctcgctgctgcccatgacgctgggcggcgtggcatttgggcttgggtgtgcatccaagtggaccggaatttatgccggggcagggcttgcggtattgtacctgggtgtgctgtatgcccgctggaagcaaaaacagccgggtttctggaaagaattccggatggctgctgtgggcggtgtggcgttttacatcgttgtgccgttcctgatctatcttgcatcctacctgccttattggtggaaagaccctacctttggtttgcgggattggtgggattgccaaacctacatgtactggtaccattccaccctgaaagcaacccacccgtttgaaagccgctggtacacctggctgctggacctgcgcccagtgtggtattacaaaaattcttacctggaagctgggcttcagggcagcattgcgggtttttataacccggtcatttgctgggcggggctgttctgcattttgctgctgctgtggcgccaggtttcggctcgcggcacggcaaagggagcgggcgttctgatcttgtacgccagccagctgctttcctggatgctggtatcgcgctgcactttcatgtaccattacttccccagctcggtctttgcgttgacggccattgtgctggttttaacgcagatgaagcggcaggaccgcgccaaaaagattggcgcggggctgtgcattgcggcgctggtgtgctttgcctggttctatcccgttctgtccggcttacccgtgccgaccctgtgggcgcagagcaccaagattttgccgagttacgggttctattaaggcagttacggggagtcttttcggcctttttgaaaaaaggcctggcgaaaaactttaattattttcacgaattgcattataggcaataccgcataattctaagtgccgatacggcgagcaaggtgcggcagatgctaagccaaaagcgcagataatactggatgtcttatcgagcattttggcaacgcagatgccgtgccgcagccgccgaagcggtgcttaagccgctaggcgggaattgtgcggtgttgcctatataaaataaatgtgcggctccgggcggtgaatgcagcggggccgcacatttttgtgtgcaggagaatttgaagaaaaagcaatatttttagagtgcatctctaacctggcgctccgacttggccgccctactgacactttagaagatcccccaaacaaaaaccaccgccccaatcagggcggcggccaatcaatattctatatgcgataagtaccaatcttcacgcaaggtagaggcttacgcggcaaaaatcaggtttccggcaggtagatatggtggggcaagccctcaacatagatgggggtcagctcggcctggatcagcggcatagcataagccaggaactccggcagcatggcagtgtggtcggcattgacccattccagcggaactttcttttccaggttggcaacctcgctgatggggtgcaggctggtggtacactggtacggtgcgttggaaatgcggtccagtgcgaccatttcgccggtgtggccctcaaaagcggctttggcggcagcaccgcccacctggtatgcctcggtgatatcggtacggctggtcaggtggccagcgcagcgctgcagggtggaaagctcaatgcagcgggtcttggtgtccagacggcgggcaacggtgttggccaaaaagcgtgccgtgccggtcagggctttgtggccgaacgcgtcaactgcgtgcacatcgtcggccagctcgcagacatagcggccatcagccagtttaacgccttcggaaacagcaatcacgatggaaggcttttctttctgcatccgctccactttttccacaaagcggtctacattaaagggaacttcgggcaggcagatcatatccacgccctcgcagtcctcaccctttgccagggaggcagcggcggtcagccagccggcattgcggcccataatctccacaatggtaacgtacttggtgccatatacggtggcatcgcggatgatttccttcatcacaacgccaatgtacttggcggcgctgccgtaaccgggagtatggtcggtcaccatcaggtcattgtcaatcgtcttgggaacgcccataaagcggatatcgctgccaatatgggcaccgtaatccgccagcttgccgatggtatccatgctgtcattgccgccgatgtagaagaaatagccgatatccagttcgcccaggatctcgaacagcttctggtatacggcttcgccctcggtggtgtgccagtcgggcagcttgtagcggcagctgcccagatagctggacggtgtgcgcttgagcagctcaatgtccatggcacttttcaacttgtcatccagtacgcagacgcggcgctccaacaggccggccacgccgtgcatcatgccgtacaccttacctgcaccgcggcgcttgcagctttcataaacgccggccaggctggaattgatgactgaggtggggccgccggattgaccgacgatcgcattttttgccataaaataatctccttctcttcggcagtgccgtgcgcactgctgtttgtgtgccgtgcggcaggcgggccgccctatgcacaattatgtcataattagtgtaacattttttaatatgggataccattgcaggggttgacaaaaataagaaagaatatttagcactatttttgttccgcttgccggaacctgcaaagcgttgcgctttccgtattgaggaaaatcattccatacagcggaatcacatagtcttgtgaaagaaataactgcgagaaaacgcctaaaaacattgcaaaaattgcatatacgtgtaaaaataacgaaaaaacggcaggcggaaagaacactttttgtaccgtaataagtgcaaaatttgtatgtaggcggcaatagacaggcgctttttatgtaaagagaaatttccggaacagaaaagtggagagtgaagaagaaacaataaagaccggaggaaaaggtccacagagatccgaagccaactatgatttatatggatcggtttgattgaaaagatagcatgtccccaaagtgaaagaggaaggttcccaataagaaacaaaatatcccggagtgggagccgcccacagcaggcggcacaccgttccgggatgttttaatgttatttgataagatccggaaaaaacgctcgcttagttcttttcaacaatcagcatacgcatggcgttcagcacggcaagaatcataacgccaacgtcggcaaagacggcccaccacatattggcaatgccaaaggctcccaacagcaggaagatggctttgacggcaagggcgaatacaatgttctggtacacaatgtgcatgcacttgcgagaaatcttcatagccaggctgatcttggccgggtcgtcatccatcagaacaacatcagcggcctcaatagcagcatcacttcccatggcgcccatcgcgatgccgacatcggcgcgcatcaacacgggggcgtcgttgatgccatcaccggcaaaggtcaggatatcgttcttgcccttggtggccagcagctcttccacgcggttgactttatcggcgggcagcagctgggcatggtattcatccagccccagctggccgctgatctcgctggcaacggcttcactgtcgccggtcagcatgatggtacgcacgccctgggctttcagggcggcaatggccggcttggagtgttccttcacttcgtccgcgatcagaacagagccaaggaactggccgtcacgcgccacataaaccacagtaccggtgccggtatttttggtgtaggtaatcttgctgtcgtccatcatgcgggcgttgcctgccagcaccacatggccgtccaccatagtgcggacaccatggccagcaatttcctgagcatcggtcgcacggcgggcatccagctcgccgcaggcttcgcgcagactcttgctgatgggatggctggaaaagctttcggccaaagcagcctgttccagcaactctttttcggtgcagccgttggccgggctgacctggctgacggcaaaaacgcccttggtcagggtgccggttttatcaaacacagcaatggaggtgttggcaagtgcttccagatagttaccgcccttgatgaggatgccgcagcgggaagcgccgccgatgccgccgaagaagctcagaggaatgctgatgaccagcgcgcagggacagctgataaccaggaaggtgagcgcacggctgatccaggtcagccagccgccgcccagcaccagcggtggtaaaatggcaagtaccaaagcgccgatgcagacggcgggggtgtagtaatgggcaaacttggtaataaagttttcagcgcgggcctttttcaggctggaattttccaccatgtccaggatcttggcaacggtggattcaccgtacagcttggtggtgcgcagcttcagcaggccgtcgccgttcacgcagccgctgatgatctcgctgccgggatgcacaaagcgaggcttgctttcgccggtaagggcggcggtgttcagcgtgctttcgccagaaatgacctcgccgtcaatgggaactttctcgccggggcgcacgaccagcacagagccgatgggcacatcgtcgggatcaacggtacttaccgtgccgtcgtcagtttccaggttggcgctgtcggggcggatatccatcaaatcgctgatgctcttgcggcttttgccgacggcgtaactctggaacagttcgccaatctggtagaacagcataacggcaacgctctcactgaactcacccaggcagagcgctcccacagtggcaacggccatcaaaaagttttcgtcaaaaacttcgccgtgaacaatgcccagcacagctttgcgcagcacatcgtggccaatgatgaagtacggtaccaggaagagcaccagctccagataccagggtatagccaccagtttggaagccagaataatggccagatacagcaccgctgaaataatgatacgtttcagcgtctttttctgcttctttgtcataagataagacctctcttttgggtgttcgtcaggaaaaaaggggcaaaaataagggcggttggaaaccgccctgagcgtgtcacaaaagctccacgctacaaaggtggggttcgccgcagtgtggctgcgccacgctcctgcacccctcctttggaaccaccctgccgcaaagaagcatgttctcatgcctggacggcactcggacctgctttttgcttgcaaggtattccaagcgtcggcacatgtccgccgcttggaatggattccgaaacttccaggcggttggaaaccgtccgaaaatgctgatgcaaggagcttacagctcgatctcaaagtccggctcaacacgcttggcggtcttaacaacatccttcagcacggcatcgaacttatcatcatcgacatccagaaccatcttttgggccataaagctgacggaagcgctgttcacgccgggcagctttttgacggcatcttcaattttggcggcgcagtttgcacaatcaacttcgattttgaatttcttctgcatgataatatctcctttggctttatgatcaatattttttgaaaaataaggggtaacaagagttgggggcgttttattcctccacatgctccatgccaagtgcaatcatgctgcgcacatgatcatcatctagggaatagaacaccgtttttccgtcccgccggaacttgaccagcttgctggctttcagcagccgcagctggtggctgacggcgctttgggaaacatccagcagctgggccaaatcgcctacgcacagctcactctcaaacagcgcgtacaggatcttgatgcgggtggtatccccaaacacacggaacagctccgaaaggtcatacagaacctcatcgtccggcagatcgctgcgcagcctggcaacgatatccggctcaccgtggcagtctgggtcacataccggaacatcaggcagggcgttggctaagccatccggtgctgtggcgggcggcgggaactttttggtatcaggcattgggagtatcacctcggtatcaaacattttatcatatgaatgattgctcatatgttaacattataatactgccaacaggggcgtttgtcaataagggaaggcaaaaaatatcgggaaattttttatggaaggagaggggccgggggtgggggatgagaaagaataatgaataaataataaagaatcatgtcggtgggccgcggcgcaaatactctcctgcaaaatgagtcaaccgtgagcatggaaacctccgaaacaacaaaaaaagccgcgcgtcccacccccatacaatgggcaaaacgcgcggcacaaatttattttgttggtgctatattaggtaaagcaaacaggcgtaactctgcccagccgattacttctcatcctcatcccacgtgcggtcactgatgatgtagcgggggcggcgcttggtttccatgtagatcttgccgatgtactcgccgatcacgcccaggcagatcagctgtacgccggaaacaaagcagatgatgctggtcatgctggcccagccggatacggtggcacccagcagcgcttccacaatggcccagatcacgccgataaagctgatgagcgccacaataacgccaaacccggtaatgaaccggatgggcttgacggaaaggctggtgatgccgtcaaacgcaagggacagcattttggacaggggatagtggctttcacccgcaatgcgctcgtggcgctcgtaagcaacgctggtggatttaaagcccaccagcggcaccatgccgcgcaggaacaggttgacctccttgaaattggcaaactcatgcagcacgcgggcgctcatcaggcggtagtccgcgtggttgtaaacaacctcggcccccatggcgttcagcagcttgtagaaactttctgccgtaaagcgcttgaagaaggtatccgtatcgcgcttggagcgcacgccgtacacaacttcgcagccatcgttcacataggcatctaccatggcgtccatggcgttgatatcgtcctgaccgtcgcagtcaatggagatggtgatatcgcacttgtccttggcttccatcaaaccggccagcactgcgttctggtgaccgcggttgcggctctggctgatgccgatgtagtgcttgtcgctcttggccaggtcgcagatgatggaccaggttttgtccttggagccatcgttgacaaacagcacgcggctgtcatcgctgattttaccggcggcaaccaggtcggtgatctttttcaaaaacagcttgctggtaatgggcagaacctcctgctcgttatagcaggggatcacgatgtacaggatcggattttcgcgggtagccttcatggtttacagcacctcttttttgctttttctgctgcgccgcccggccagcaggtaaattgccgtcagcagaatgctaatggcgctgaccccgatcccgcaccagagcggggtgggggaatagtggaaacgaatacagtttttaccggcattcaccttgacggccatcaggccgttgatgttcaggatctctgcagattcgccgttgaccgtggcgctccacgccttgtcatagggaacactgaaaaatgcgtactgctcgctgccggatgtgatttcggaataaaaatagtctgtgccataatcaaacacatcggtgcaggcttcgcggcgcttgtccatgtcggcatacttgttttcctggctgatctcaccatccagcgcggcatcatagtggcgcagtatggtggaaaccgtggcttcgtcctcgtccgccaccacaagggtctttaacatggaatgggcgcgctcggcggggtcaatctcgtcaaactcactgcgggtcatgtaggtatcatagcagaagccgatgggcagggcgtgggaatcctgatagacgttgatctgctcgtgaccgttggaaaaactggtgtagatttcatccggccagtcggagttgttgcggatataatacccaacggaaagcagctcgttggtgccctccggcccggcgggggtaatggcgtggcgctcgtcccccagggcatcatacagtgtaaagatggagggggaaagcgtgctcaaaaaggaggtacggtccggcaggtaagccgccatgccgcggttggaatacggctcccagaaataatagcggtagggcagggcatcaggcaggccgtcgccgctgtggataacgtcaccataaatttctgtggtggtcaggccgatcgtctgggtgtaggcacgctgataggtgcccacggtaaaaccggtggtcagtgcagcaaccagagcagtgcaggccgtcagggcagccatggggcggcgcaggcgcagccgccgcaccccgcccagggcagcaaacagcagaaccacgccgccgatggcaatcaatgtcaacacaaccagccagtatttgcggtacactatggtatcgcgcttgacgtacagatacagcgtgatagcggcgatgactgcagccgaaataccgcagcccgcacgccaagggtagtcctgcagatggtccagcaccttgatggtggccagcaccagcaggaacaccagcatgtaataccagcggcggtacggctcgctggtgaacatgacgaacagactgttgctgaccgggctggctgctacaaggaacagccccaccagcagcacatgcagccagtcccacttccagcgcagcagataagccagaaccaggcagacgcctaccaagggcaggtacgccgcgatggaataccagttatcatgcaccacagcggaaaaattgaacatattctccgccgggaagaagagcgcccgcagcatttgcaggtaattgggccagtcaaaggtcagttggctcaagctgatgtgatccgatacgcggggattattgagcaccgccgcaatggaggggatgaacagtacccccgccatgccgacgcccagacagccttccaggatgcaggccggaattttgcgggcatttttgcgcagatctgccccggggcgtgcgtcctcgccgccaaaaagataccgcgtaatatagtaaaacaccaggaagaaaacttccccgataaagaagtaatagttgaccagcgcgttgatggtaacggcaaacaggaacggagcttttttgccctcctgcatgcgtttgtccagccccagcatcaaaagcgggaacagggcaatcacatcatggaagtgatagaacaccacgttgatgcaggaaaaaccggaaaatgcatacaacacactgccaagcagggcgcttttctcgctggcactgcggcggaagtaagcaaacgaggtcagcccggcaacagcatatttgagcatatagatccagccgaccagatagggaaacgcgctggcggggaagagaaagctcagccagaaaaacgggctgccaagggtgtaaaagctgaacgaggatacaaagtccgaaccaatatcaatgcgccagttccacagcacctcgccgcttttgatggcgttgttgcacagcatgttgtaggagagctgttctgcgtcaaaatccgccgcaaccaacagcaggccgccgtcccgtatcatgtagggcagcagtgcagccgcggcaatggcaaagttcagcacaaaagccagcagcagccaccggcgcgggaaacggttttgcagtgtttgtttcatgtagcagcctcgcggcatcagccctgaccgttagaaagttcgatcccgcgggtgggcatgtttgccatattgttcagggtagagctgtatttttcactcagggattccatagcccagtcagtgcagtccataaaggtattgtcaaaaatatcattcatgaacgcatcttcgcccataaacaccccggcgtaatgcccgccggaaatggtgttgcgggcaatgatgttctcatagcagggggtaaaatccaggccctgcacggcttcgtccgcgttcaggtcagtgctgagctcaataccaaagaagtggaaggtatcgctggcaccccggttgttgtcaatgatctggttgcacagaatggtgttgctgaacgccgagcgcacagccttgatgccggaaccgtaattgtcccgcacaatgttgccgtaaatggtgttgtaggcggtgttatccagcgagatgccgggcagcttggcgggggaggaaccatccgccatgcggccctgatccagaataaagtcagcttccagatcctcatcactcatgcggttgcggccgccgttctggcggatctcacatccggtaatgtagttgccgaaggagccgtaatccaggcacatgccctctttttcgttcttgtagatcgtgttctctacataatagttcaggtagccgctttccgaataaatgccggaggaatggttctgcgcaaccgtgttgccgcgcacaaccagctgatggggagactgtaaaatatcgtacagcatttcatccgggaacggattgtaggcggtctcaatgtcctcaatgggcatggagcagagcaccagcccggcggtcaggttgcgggcaccagagttattttcaatgcggttgccttcgatcacgccattgctgatctcgccgttcaggaagatggcaccattctggttttcatggatgctgttattgaccagtgcaaagccggtgttctcccccataacgcaaaggcccttgagggaaacattgctgatgtcaaggtcagccagatagaaactgctggaattcttgacatacacaccgtaattacacccgccgttgatgacaaagccggtcacggcggtattttccgcctggtccagaacaatggctttgtccagcgtttcattgccgggagtcagcactgcgccgttgccgtgcaggatcgtaccagtgggtaccaccagggtggcatccatcaccagagcaggggagatgacctccaccgtgctgccggggttggctgccagaaagtcattcagttctgccaggctggaaccggtaaaattcacagcctgggcggtttcggcggtggccaggggggccagccgggtcatgacagagttgtacaggtttttccagttggcctccggggtatcaaaggtggcagggtcaataccgagggtctgaatgcgctggatgacctgcaaaggggcaatcaggctttcggtgtcggactgggtcatccgctccaaagcgggcagggcatagcgctcggtcaggctctggctgtcggtatccagcagggaaacatattcctctgcgccgggatccgcaaaatccacaacctgcccggtaccggccagcacgcagctgatgggctccggctcagcggtagcctgtggttctgcgctgggggccaggctgaaaatcacatgcggggcaggggtcagcttgaccccgaccacaccgatcacggtggcagcagcaatgcccgcaatggtaagaacaaacgaatttgcctcttttttggccataagtgtaagattcctttccgggaaaaccggggataggcccggtaaaattacttgtccaggttcagatactttttccagaagtccagactgcgcacttcgccgcagcgctcgcggtagctctgggcggcagcgtcaaactgggcgtcgatctccttcatgcaggctttcatctcgcgcacgcagcggctgtattcttccttgctgcgctcggtcacaaagcctttctgggagttggaatcatagttcagcaccttctgtacgcggtaagcattgtaggcggtcatgtgcatcatgctcacaacggtgttttcgcgggtggggggcaccagccagccgttgcgggtcagcttgaccttgaggtttttcagcttgcccttgtttttttcttcctctttggtggcgtacaggtagcgggaataatcaaacggaacatccagctggtccaccggctgggccttgtagccatatgccataatctctttgtgcagggcttcggcatcggtctgttccagccagtcaatgcctttcaaaaagtcgcgcacgccgcggatcagcaggtcagcattcttatagcggtagcggttcacttcgcccatcacctggctgcgcaggtcggctttcagggcgttggcatcatagccggggcagtgcatgctgttgtcaatgcactggttgcgcaggatgtagtagtacatcgaggaagaatacttgctctcaaacggctcatgccatacgcagatgccgttcagggtgaccaggcgtttgcagttgcgtaggccgtattcaatgtcatcgccgcggataaagatgggcatgggcaggttgtccggccgcacaacggcaatggggatgcagcagtaccaccaggcgttatactcatggcgttcttccagctcattggcaacgcacaggtcaaccttggtcagatcaaagttggctttgtggctgatcaactggccctggttccaggcggcgccgttttctacctgaatgttagggcggtccagccgcagcatggcaccgccgacaaatacatccgcatattccggcttgcgcaggctcagcagggtgtaggtgcgcagcagcacatcggtatccagcacaatgtcatcatccatgaccagtacatgggtaacgcctgcgccattttcgttggctttcaggatctcgatcatgccgcgggtaaagccgccggcaccgcccacattggcgttgggcacaacatgcacggtatcgctgttcagcttatcgtaatccagcgtctggccgttatcggaaacaaacacttccaggtggttgtgcagcgggctggcggcgttttccaaaatatcgctgcgcatgcgggcaatgttgcccataacgaacggctcccggcggaaggtgcagatatccacgccgattttgacgggctgcacatccttttcagcggcatcgcactcataagcgccgccgcaataggcggcattgccgctcagggcctgcagctcaaaaaacagcatgccgtcagcgcccttgggaaaatcgaagcagaattcctgcacggaatccgcctgcactactttttcggccagcacggcgcgcacgctctggctgttgatgaaatggcggctgcacagcacaacgcgcagcttgccgctcagtttcagccgcagcgaaaaattctgcgcggcggtgtagcggcgccatttgtctgcgctgacgctgttaaagtaggtatcaaagcagacgcattcgccctgctcaatgcgcaggatatccccctcatcgcggaagctgggggctttcatacggtaatacagtcggtcctcggtgcatatgcccacgcggggccaaagcagcttttgcagcagcatacggtattctcctttcactttttgccttatcatatccggcaaagcattcaagtatccggcacagcattataaaatgccgccgttggattgttttccgcgcgcccatgcgctcaatgtgcggtagggcaggtaacgcccggcccgcagcagacgggtgtttttgttggtcatcatggcagcgatgtgtgggtaagtctggcacagcatctcgtcataccggcgcagggccaggccggtttcacggtcggggggaaagcgcaggtacagctcaatcaggtactgcgccacatcccgcgcccgctgcaccagcagcaggtcccgcccggcgggggcaggctgtgcggccagcggttcggcagcatccaacagaatgcgcgctacgcggatgtaatcctgcgtgtgggcgcggtagctggccatgctcacgctctggccatcccgccccaggcggtactggtacagaaccaccggcacaaagcagatggtctgcgccgcagccatgccaacaaacgtatagcccatatccgtgtagctgcaatgctccggcatggggcgccatgcggcgcgcagagttttggtgcagaaggtcagcgcgtgcatctccatgcacaaatcaggtgtggcctgctgcacttcatccacagcatacacacggtttgtatcaaatttgcagcagacatcaaaggcctttccgctgccgttttcctgcacggtgcgatagttggtgtataccgcatccgccgtgcagttttgcaggcggcgcaaaagggtctgcaaagcattggtgtcaaaccagtcatcgcagtccagcgtgcgaaaataccgcccggaggccagctctaccgcggtattcagcgtggagccgtacccgccgttccccttgctcaccagccggaaactgccggggtgtgcctgcacaaaggcctgcgccagcgcggcggtgtcatcggtggagccatcatcaataatgatcacatccagcagcgcctgcaggctttcatccgccaccaggcaggattcaagcgctttttgcagcgtggcagcgccgttataggcggcaaccgaaaccgtcagcagcttttccatcaggtttcaccggcctccatagcgcgcacatagtccgcgcagacttcacgcgatggcccatccccgcgcagaacaccgtgatccagccagatggagcgctggcacagctgctgcacctggttgatatcatggctgacgaacagcagcgtggtgccgttggaaagcatctcttccatgcggcggtggcatttctgctggaacataaagtcgccaacggccagcacttcgtcacaaaccagaatgtcggcctgtacttcagtggcaatggaaaagcccaaacgagcgatcatgccgctggaaaagtttttgaccggaacatccacaaaatctttcagctccgaaaattcaatgatgcggtcaaaatgctccatcatatagtcccggtcgtggccaagcaccgcgccgttcaggaaaatgttttcccgcgcggtcagatccatgtcaaaaccggcgcccagctcgatcatgggggcaatttcgccgttgacggcaacgctgccgccggaggggtacatcacgccggaaatcactttcagcatggtgcttttgccgctgccgttgcgcccgatcagcgccagggattcgccgcgcttcatgctgaaagaaacatgtttcagtgcgtaaaattcgttaaaaaacagcttgtgggtcagcagttttacggtgtattctttcagggtctcagttttttcctgcgcaaggttaaagcgcatggaaacgtcattgactttaataatctcgtccatacgttacctcacgtcagatatacaggataaagttcttttgcagcttgcggaacaccaacaggccaatagccatagaggcaacggcgcaaaaaatgcaggcaatccaggtgttggggccgggaatgttgccgtacatcatcaggttgcggaacaggttgatgtagtggtacagcgggttcagcttcatcagtttctgcagggtttccggcagggcggtgatggggtagaacagcggggtggcgtacatccaacccatggtaaggatactgtacaggtgcatcatatcacggaaatacaccgccagcgcggaaagcagcagccccagcccgcagctgaaaaagaagagcagcaccagcggcagccagctcaaaaagatggtccaatagaaggtggcacgggtaaagatcatgaccagcaaaaccgcaccaaagctgaacagcatggtgacaaagcgggaaaccgcctggctgatgggaaagatgaacttgggaatgtacacctttttgatcagcggggcgttctggataacagaagtcaggcccatgctggtggtctcattgaaaaaggtaaacagggtgttgccgcagatcaggtaaagcgggaagtttgggatatcgttgcggaacatgtacgaaaagatgatgctttgcagcagcatcatcagcagcgggttcaaaatgctccagatgtaacccagaaagctgcggcggtatttgactttcagatcgcggctgacaagttcatggatcagcggttggtattttttcaggtgggtccaggcgcgctgcgcggagacctgcattgtttcggccatgtttggctccctccagatttatggcccgcataaaacgtcagaacgctgttttgtgcggcacttgtatcaacaccccgcgcggcagccgccgccagggcacagtttctactattatacaataaaagacattaaaatgcaattcgaaccgggcggcaaaaaatcatgggtgtgcgatgttttttgccgcccggtaccgccctttttgtgcaacagtgaaaaggaacgcaaaatatgagcgcagtttgtgtaaaaatcgttgaaaccgggacgaaaatacggtacaataaatatgacataacaaaccctgcggcgggccatgacctggttttgcccgtggggccataaaagagaggtagatgttatggaacattttaaccccctgctcctgcataacgacagcccggctaaatttattacgattggtgaggtcatgctgcgcctgaccccgccgaactatgaaaagatccgtatggcttccaactttgaagccagctatggaggcagcgaggccaacattgccctggctcttgccaacctgggtgtggacagcacgtttttcagcgtggtgcccaacaactctttgggcaaaagtgcggtgcgctggctgcgctccaatgatgtgcactgcaccccgatgatcctttccaccccggaggaaaccccgacccaccgtctgggcacctattacctggaaaccggttacggcatccgccccagcaaggttacttacgaccgcaagcactccgcttttacggagtatgacctttctaaagtggatctggacgccctgctggacggctttgactggctgcatctttccggcattaccccggctttgggccagaactgcgccgattttgtgatggcctgcctgaaaaaagccaaggaaaagggcctgaccgtcagctttgacggcaacttccgctccaccctgtggacttgggaagaagcccgtgactactgcaccaagtgcctgccctatgtggatgttctgtttggcattgagccttaccacctgtggaaagacgatgccgaccacgcccagggcgactggaaagacggcgtgcccctacagcccagctatgaacagcaggatgagatcttccagcgctttgtggagcgttaccccaacatcaagtgcattgcccgccatgtgcgttatgcccattccggctccgagaacagcctgaaagcctttatgtggtatgaggaccatacctttgaaagcaagctgtttacctttaatattctggaccgtgtaggcggcggcgatgcatttgccagcggcctgatttacgccatgctgcacaactacaagccgatggatatggtcaactttgcggtggcaagctccgccatcaagcacaccatccatggcgatgccaacatcaccgatgatgtttccaccatccgcaacctgatgaacatgaattacgatatcaagcgctgagaataagtttgttttcagcagtgccccaaacggtgcagcaggctgcggctttgctgcaccgttttggtatggtttagaaccgtttaagaatgtacaaaccttgcatcccgtgttataataatgccggatcagtaaatgaaaaaggtgggtagattatggaacaaaacaccgttcaaaaaccggattgcgccgccattacggcgcaggcacgccaggcagcggaagaactgctggcggctgcacacctgcgcgccggggatatttttgtagtcggctgctcttccagcgagatcgttggcgggcatattggcaaggacagcagcatggaagccgccgcggctgtgctggcgggtattctgccggtgctcaaagcgcagggcgtctatctggcggcccagtgctgcgaacacctgaatcgcgccattgtcatcgagcaggaagcagccgaaaagtatggttatgaacaggtgaacgccgtgccgcagccccatgcgggcggcagctgggcaaccaactgctggcaggcgtttgaacatccggttctggtggaggaagtgcgtgccgctgccggaattgatatcggcggtacgctgattggcatgcacttaaagcgcgtggccgtgccggtgcgcctgaccatcaagcagatcggcgctgcgcccatcatctgcgcccgcacccgccccaaatacatcggcggcagccgcgccgtttaccaggagatgtgaaccatgctgacacaggaacaactgacaatgatggccgaaaatgtggcccacatccgtgaaaatatggccgccgccgcccgtgaagccggccgcgacccggcagatattctgctgtgcgccgcctgcaagacccgcactgtggaagaggtgattgccagcgccgttctgccaattgacctgtttggcgaaaaccatgtgcaggaactggtggaaaagaccgacgccaacgcttattgcggtaagccggggcattttatcggccatttgcagaccaacaaggtcaacaaagtggtgggccgtgctgctttgattgaaagcgtggacagcgagcacctgctgcaaaaggtggagcgcgccgctgccgccgcaaacctgacccaggaaattttgatcgagatcaacatcggcagggaagagagcaagtctggcgtttctgccgaaagcctgtggcccctgctggatatggcagccgcacagccgcatatccgcctgcgcggcctgatggccatcccaccggcagctgcaaccccggatgagacccgcgcgttctttgcccaaatgcgggaactgctggcaaaagctgctgaccgccattatgagaacgccaaaatggatatcctttccatgggcatgagcggggattaccccgatgccatccgcgagggtgccaccattgtgcgcatcggcaccgccatttacggcgcacgcgattacagcaaaaaggcataaggcattccaggaacccatacctgcacgttgacagctgcaaggtgaataggtaaagcaacagcccggaaccaccgcaaatgcaggcggcagttccgggctgttttgttaagcggtggtgggggcgtgggcctcaaaagtctccaccggagacttttgtgcgcggcttagccgtgccgccctgttcaacccccgtgaccatgccaaaaaaagaccccaaaaagctctgcgccttttggggttttacatcagtgccggtggtgggggtcgaacccacacggtgtcaccaccaacggattttgagtcggcccaagtgagaagaacttggtggattttttaggaatttcaaggaacttatttcctgccctttttagtgaaaaagcacctatccacgatacaatttttgattttcggacgtacttacgattggaaatctggcagaccaacgcagttgagaaatcactctcgctttgtggacaatctttcaaaaatggcagactaaaaaccaccgcattcggaaagtagaggcacataaaaaacggcagtacccaatagcggacatttttctactatctaacggtttggcgacccgctattattcaaaaactgtcattctgccactttgttacacttgtcaaaactatccaaggggaaactgtatctttttataggaatgggctgcggcgcgttcctctcccccacaccccctctccagctggctgaagaagcagccaactgaaaaagagaatatcggctcttgtaagcatcttacctgtcacacaggcaaggtgcttttttatttcaaaaatcggaggtcatcatgggcaaatatcagaaaaatatcgaagctgcgcggcgtatcagcgtgatgcagtatcttcaagcctatcaccccggcgaactggttcgcaaaacggacaaggagtattgcaccaagacgcacagcagccttgttatcacgcccgcaaatgggctgtttcactggttttcgcagagcaagggtggcaacaatgcactcgactatctggtaaaggtcgagggcatggattttgtctcagcggtacggttgctgaacgaaatgacaccgatgccggtctctgttcagacggctaaggcagcacctgtgcagcagcagcagacatcccgcccctttgtgctgccgcctgcggacaggaacgccgaagctgcaacggcctatctgatgcggcgcggtatcagcccgaaagtgctgcgctactgtgtgggtagtggaatcctataccaaactacgcgcggcaactatcgcaactgcgtttttgtgggcaaagatgaaaacggcgtaccgcgctctgcttttcagcgcggctgtcaaggcagctttcgcggagatgtcgcgggcagccaaaaacagtatggctttctgattcccgccgaatcggaaaactgcgataccgttgagatctacgaagctcctattgatgccatgtccggcgcaacgctgcggcagtacaaacatgattccccgtggcgcagcgtccactacttggcgctgggcgggttgaaccatcagccgattgactactttttgcagcagcatccagaagtaaagcgcgtgtcgctttgctttgaccgtgacgaccccggacggaacttcacaaaaattgttgcgaaacggcttgcagaacgcggatatatcgtacaggacacgcccccagccataggcaaggattataacgactatctgctggcggctcgtagacttatcagcatggaacggtaaaggagtggaacatgaaaactattgcagttgcaaaccaaaaaggcggtgtgggcaaaacgaccaccacagtaaacctcggcacagcacttgcggctatgggctacaaggtgctgttggtggacgccgacccgcagggcgatttgagcagctatctcggctatgagggcaccgaaaacggcgcaacaatcagcgacctaatggaatcggttatcaaggacgaaaagccgccagaagtagtaattcaccatgaagaaaaggtggatttcattccttccgacattggtctgtccgatatggaagtgagccttgtaaacgttatggcgcacgagaaaatcatggaacaggcattggagccgttcaaggataaatacgactactgcttgatcgactgtatgccctcgctgggcatcatcaccgtagcatcgcttgttgcggctgacagggtgttgattcctgtgcaggcgcagcatttcgccctcaaaagtctggtgtccctgttcaaatccgtcaaccaagtgaagcgccgtatcaattcccggctggatattgacggcattgtgctgacgatggtggacaagcgcaccaacctttccaaagatgtgtgtgctgccctgcgcagcgcctacggtcacgcgctgaaaatttaccgtgcagaaatcccggtcagtacgcgcacagcagaaagcgccgccagtacacatagcgtgctgacctacgatgccaacggcccggccagtttggcatacaaagcgcttgccaaggaggtgacggagaatgagagagtacggcagcaacatcaatctgccctcgctcgataatctgttttcgagtgagcaggaacggcaggatgcaaaattagagaaaatccaaattttgccgctgacggaattacatccctttcggaatcacccttttcaagttcgtgacgatgacgagatggacaaaatggtggacagtgtcaaggaatacggggtcatgacccctgccattgtccgccctcggaaagatggtgggtatgaaattgtagcgggccaccgtcgctgccatgccagtcagcgggcgggcgtggagaccatgccctgcattgtacgggatatggacgacgatactgctattattctgatggtggacagtaactgccaacgagagcatattttgccgagcgaaaaggcgaaagcctatgaaatgaagttggaagctattcgtagaaaagctggtagaccgtcaaaagaaaattcccgacaagttgtcggggattttgaaagcgccgatttagtcggtcaagcaagcggcgaaagcgggcggcaagtccagcgcttcatccgtctgaacaaactcacccccgaacttatgaaaatggtggatgatggcaagctaaaaaccactcccgccgtggaacttagctaccttaccccagaagaacaagaggacttcctctcttatatggaatccgagggttgcacaccatcgctgtcacaggcgcaaaagctcaaagaagccagcaaagaaagcgtactgacaccagaaaaaatccagcatattatggccgccaaaccgccaagtgtaaagccgcgtgacccgcagcttatgattccagttgctaaagttgagcgctattttcccaaaggatttacgagcgaccagatgcagcaggttatcgtaaaactgctggaaaactatgcccgcgcccaccagcacggcagcagatgaggggggacactgatgacgagattattagttgttgaacccagctactgcccttatcaagcgggtttttccagtgcggcgactgcggtttccgaggtaatcgagggtgaaagccaaattctaaaaccgtttggcacacctcgcatcgggctgatatgtagtaaatcgcaaagccagctgaaatataacagacaggtcaatgacgagggaattaccgtgcgcgggcgatttctcatctgcgggctaaatggtgataaagtcgtgggcttatccaaagaccaagcagaccgatacagccgtctactttttctaccgcaagtcgaagatatggcaagcggtgaactgcccgccgcaaaggtacgcccgcaggatgaacgctacgggaacaaactatctttttgggaaaggttggaaagataatggaagaaaagacagataaagtagtcggctacatcgaatatctcggtgcaggcgggatgatcggtgaaatcgttccttacacaagcgtggaaaaattcaaggatgaaattctggattccttggattgtgggcggccagtgacaccggttgtattctcagatgaactggatgagccactccaatttgattcagacacctattttccgtggggatttcgcagcgaaaagcgagtgcaaatcccttatgaaatctatcaaactaacaggcgagaccttgtttttatggagtattctcctgcgaggctcgctgccggagcaaaggactacgaactcgtgtacaaggggcagatggagcgttgggaaacgctggacagcatttattcacggcataatcgggatgaccgtccaaacgccaaaagtatgcgttccgtctctgtcagcgatattattgtgacacacaaagataacgagacacacgctttttatgttcagccgattgggtataagcaggtagataacttgttgccggaacttgaaaatgccacactgtcaaaagcagaacagcacgagcgataaggagcagcctatggctaaatacgaaaatatccgtgcgcttgccaaaaagcaactgcaagccgtaacggagagcagtgaccgctggaaagcatttttgcggacagcggccattgcttataattatagtttcccaaaccagcttttgattcacgagcaaagccccaccgccacagccgtggccgacatagcttactggaataataatgcgggtcgctgggtcaagcgcggcgcacacggtatcgcggtatttgacacgcgggcaaattcttcccggctgcggtatctgtttgacatttccgataccatcccccgtgcggaggtccccgacgcgctgccgtgggtcattacagaccagaactggcggcctgtttgggataaaatcgtagcggataatcacgctgacagcatccagagcgctctcctcatgctctctacatcctgcgttgcccagcgcagcgccatgttcacaaccgcactgggaaaagccatagacggcagcagcttacagtgggccaagccggacgaacagcggcagctatttatacagcttatcacccaaagctgtctgtatatggccgcgctgcggtgcggcgtggatactgcgcggctggatctgtctgcccttgagtccgtgaaccagtttgatacaaaccgcatcactctgtgtttgggcagcgcttgccaacaggcggcacggcctctcatgcagcagatcggcagcatcacgagagaaatcgacagtgttgcacgcgccgaaaaagtccgctattatggtgacaaacaggaagaaaccaataacaccaaggaggtcaacaatggagtacatgatggtgaacggctaccaaatcccggcgctgacgctgaacgagccgccgatgccggagatcggcaagtacggcagcctgcggcggaaattcctgcgagagaacgcgccgatggtgttcgacgagatgctgctggagggaacgctttacccgcatctggcggagatggacaacgcagtacaccggcaaatcgagcagacgatgcagacgctgatgcagcagagcaccgccccgaaccggcagacagaccc

SEQ ID NO: 1017 - DNA, 9784 bp, unidentified
  source 1..9784: mol_type = unassigned DNA
ttatttcactacctcatcccatgtggttgcatcaccagtgtaaattgtctttacctgatcactactgagttcatctgttgtattgtttttatttacaataactgcaataccgtctgtagcaattacctggctgtccagtttatctttttcttcatcctgtaattcacgtgatgccattccgatatcataacttccatcgattgctgatgtcatacctgttgtagagtctgtagtctgaagctcaatctctgctcctgtattgactttcttatacgcctcgatcaatttttccataaccggtgatacggaagaggatccgccgacaactgcttttccggatggcttgcttcccgcataagcttctgctgaatcgtctccgatatatccgttgtctgaaattacctgctgtccttctttgctcatgatataagcgatgaagtcttttgccacttcattatctgcacctttctttgttgcaatgttaaatggtctgcagattttatattttccatctttgatgttctgctctgtagcttcttctccgtcaatctttaaagcttttactgtatcatttaatgatccgagtgatacataaccgattgcataatcatctccggctactgttgtaagcattacggatgtgctgtttgtaatctgtgcatcatctgttgtcatatcaactttttcaccgtctttcttttcttcaatcccgaaaagttcgatgaatgctcctcttgttcctgaaccatcttctcttgaaacaattgtgatatcatttgaagaatcccagtcgctttcactcttgctgctcttgtcatctgaggaagcactgtcggaacttccacatccgactgcaagtcccgctgtcattgttgctaccgataaaattgcaataaactttttcaacttcataatcatactctccttagattctcatcttttttcattctgctttttttccttgtcgctttcgacaatagttatcttataagacgtatgttaaatccaaaatctgcgaattgttaaatatatgtaaagtgtatgcagaaattttatagaaatgtaaaatcacttttttcacagccggattttatgactgtgcgctttcaaattgaatttcttaatttttcatgctataattcctctacaggactgtctgaaaatgctttttctgatatgttcttattacttatttacaaaaacaaacaaaaaatttacattataaaaaagaaagaggattataattctatgtggattgcagatcaatggaaagattatgaagtaatcgattgtagtaatggtgaaaaattagaacgctggggacaatacactctggtccgtccggatccgcaggtaatctgggatactccgaagacagaacgcggctggaaacatatgaacggtcactatcaccgcagtaagaaaggcggtggggaatgggaattcttcagtctcccggaacaatggcagattcattataaagaacttacattcaacctgaagccttttagtttcaaacataccggtctttttccggaacaggcaacaaactgggactggttctctgagaagatcagaaatgccggaagaccggtcaaagtgctgaatctttttgcttatacaggcggcgctaccctcgcagccgcggcagcaggagcaagtgttacccatgtagatgcttctaagggaatggttgcatgggcaaaggaaaatgcagcttcttccggattgtctgacagaccgatccgctggctggtcgatgactgtgtaaaattcgtagagcgtgagatccgccgcggcaatcactatgatgccatcattatggatcctccgtcatacggacgcggacctaaaggagaaatttggaagatcgaagatgcaattcatccgctgatcaaactgtgtacacagattttgtcggatgacccattattcttcttggtcaattcttacacaaccggacttgcaccggctgttttgacctatatgctcggaacggagcttaagaaatggaacggacatgtggattcacaggagattggacttcctgttacacattccggactggtgctgccttgtggagcttccgggagatgggaagcggtttaatacaataggaactgaatttcctggtcccgaataaaatatagaagcgctttctgtgcctaaaagtttctaaccatgatctcatatacacagaaagcgcttctatatttttattcagttacgttttcgcatgctctactcattaaacaacttctcatgaatgttttctatattctttataccatttttctgcttcttcagtggtcatatgcattccttcagccagttgttgaattgtttcatttttacccagattaacaagttctgccaaatgtataattgctctaataccttcgattcttcagatcctccacaatttcattataccgttttttatttaaccggtagaaaaataatacaacagctgttacaatccacagaatccccggaatggttgtaaatgcatatttcataatactgataaccgtatcattttgtgcctgatttgccacgtatccatattttccaagtaatgccgcaagcatcgctgtaccgattgccattccaatcttatttccaagagaaacgaatgcatattgaaatccatcattccgaagtccggttttccattctccgtattccacacagtccggaatgatcgcatagattgctgtattaaatcctgaaaaaaagaactgtgtaacacctgccaaaatatagaatacaactgctgaatcttttacattaaagaaatacattgccagcattgaaatacctgttaaaaaggcaaatatcgaagctgtccttcctttattgttaagttttcggaatactggttgaaaacatgcggcaccgataatggatggaataataatgcacatagaataagtagtataataagatgcatttccttctacatatgtaaaataatataaaatgtcagcatttcttccatataatgtaaatccaaataaaacctgtccgattaatgcaagtatatacggtctgttctgcatcacggcttttaactgtactttaattgatattttttccttttccggaattgtcacctgctccttcgtcttcgcaaagcagaagaaatggcatgccgcaaatatacatccataaataattgctacaaataaatatccgttcttcgcactctggcttcccagctttccaatcaaaggtactgtaataatgttgataatcccgattgcaatcatagccgcaaccgaacgcgaagtattaatttttgcccgttcatcaatgtcctgtgtcatcgcaccgcaaagtgttccatacggaatatttacacatgtgtatcccagcacaagcaggcaatatgtaataatcatatagataacctttgccgtatctggccagtccggatgtgcccagaatgtcaacattaaaagcactgccgtaatgggtgctgcaacaagcagccatggacggtaacgtccccatcttgtttttgtcttatccgtcaaccctccgacaatcggatcattaatcgcatcccagaatcttgaaaataacatcaatgctgaaacagccgccatactgattccaaacacatctgtataaaatatcattaaaaaattacttacaaacatccaactgaaattgcatccgacatcaccaaatccatatgcaattttactgatcaatggcacttttccattcttaccctcgtttcccatggctcctccttatcagcgtttctgacaaaacttctgttctctcctgatctaatctttattcctgtacattaatgattactttcatcgttgtttcccggttatcatcgatatactgataagctttcagatactcctggaatgcaaatgtttttgaaatcagtggtcttaaatgaaccttttcttcatttacaagtctgattccgtcaacatagtcatcgtgccggtacatcattgtgctcttgatatccagttcatgatcattatccaccgcaagatcaatctctgccattcctgcaaacactgcaaccaatacaataatgcttccttttcttgcatacttgattgcctgtcccattgtgatgttatttcctgcacaatcataaatcacatcggctttgtctggtccgaatgtttccaacattgcttcaccgaaatctttttcttttgtattcacacagacatcaatgccacattctttcgccttatccagacggagatcactgacatccgtgatcataacttttgctgctcccattccctttgctgcctgtgccacaagattaccaatcggaccggcaccaagcacggcaatgttcattcctttcacatcaccaacctgctttactccgtgaactgcaacagccagtggctcgatcattgcaccttcttcatatgacatttcttccggaattggtgttactttcgatgcatctactgcaaaatattctgatgctgttccggttgtctggaatcccataacttttaattcttcacacaaattgtattttccgtgtctgcatggataacattctccgcaataaacctgtggctcaattgttactttctgaccttcgtgaaatactgtcacatctttcccaagttttacaacttcaccggatacttcatgtccctgtgttaccggatatgaggtaaatggatgcttaccgtgatatacatgaatatcagaaccacaaatgccgatattcataatctttaccaatacctgatcatcttttacctccggaactggtacctctctgaaaataatctctcctggatttgtcattacctgctgtaacatattgttttcctccttcattcttttatattgtcttttattaaatgttttattaaagtaattacattattgtacaaccactctattttgtcaatatatgaatgcctatttctacttgttgcacaagtttgatcaacttttttatgcatatttaccaactggatatgcatagaatttgccactggcaacttctcttgcatacttagatatctataaaacctgccaattgcagcttcttccgaacatctgacaataaaaaaagaggtaaatattcaaagtccgtaatcattacgagccttgaatttcacctcagtttttcattcttattctttttcctacaacatatcaaatttataaatgctgtatatattcagagaggaaatgttttgccgctccgacagctgatgcctctcttttataggagcaattttttaagtaacgtacatcatgttcaaaaccattatatgccatcactttttcccccagtggtatcatatactctgataaataccccccgacttctcctccaagtatgatatctgtgtcatacgccattcgcagattggaaatcaaaatagccagattatccagatactgattccatttttccacagtctttgtatttttctgctccactttttccataaattgttccaacgtcatttcctgctcttcatcagtcaatgcactggctgcgcaataggcatctgcacacccggcttttccgcaataacatttctttcctcccggcaccagaatcatatgtccgaattctcctgctttctgattctgaccagccaccagttttccattaatacagaatgcgccgcctaatgtattgttgagcgaaagatacacagcatcctgatattcatgcatatcttctgccatcatcgcagcatttgcatcatttgcaaaatacaccggataagaaaatacctgttccagaaagctcagactgaaattctccaattgcagtgcatgagatttcacaaccattctattcgcctgatcaataataccgggaatcgaaattccgattcctaatatcttttcccggtcttctacatccttcaggaagtcctccaccatttcagctacttttaagcaataagatgtttctgttgaaaattttaaccgcatccggattgttttttctatttcatactgcatgttcagcaatacgattcccagatgatttgctgtgatcactacaccgactgcatatttatatgccggattaatccctatccgttttgctttacgaccgccggtagattcatattctcctatctcgatgaccatattccggtcgatcagttcgtttacattagaaagcaccgtcggcatacttaagctcagattctgcgccagctctgcctttgatgtaattttattattgatgatatagtttacaattttagattttgtaatattctttttttcatttcgccctgccatatcagacctcttttataaattattttacaaaagtatcttagtccttttttgctattctgtaaagaataaatatgttgcttctaaaaaactttttcccaaggcacaacgatataaaacaagccaccgggacagataccactcttttttctccatcccaatggctcaatttaatattcctattacatccgctaacgaatcacagacccgatacgtaagttcccgtatctcctgtgtcggctgcacaagatccggcaccatgatcacctgcatgcctgcctgatgtgccgacaggattcctcctggcgcatcttcaaacgccatacaatattccggctgtattcccagactttcacatgctttctgataaatctccggatccggcttcgctttcttaaccatatctccacagaccacactgtcaaaatacgaatctattccggcccggatcagattccccatggcatactctctgctggaagatgtcgctactgccatcttatgtccttgcgattttccataagccagcagttcttttgcaccttttttcagcggaagaccttctttatccacaattttccagaagttatcccgtgtcagttttccaaattcttcaaatggaaagtcttcccggatatattttctgaaatattcattccggcctgcgcggttcattccgagtgtgtgatagatgacgtcccccatatgcgggattcccaattcatcacctgcgatctcccatgagcgctgtacaatacgctcagaatcgaacaacagaccatccatgtcaaatataaaagcttttatatccatcctagaactctatgcctcttccaagtgcatccttcagataatctgcaacttcttctaatttatgtacggcctccatcttctcttcgaattcatccccgatggattccttattaatgagtgcctgctgaatcttctttacatctttgattaaattctctgtcatatcaaaaacctcccttttactgtctatcaggaaatttactttccgatgatcgatttacctcaatgtatgtatcagcattataacacaaaactttttactattctctgaaattatgttacaatttgattaatttttgcaaattattatctttttctcagatttgttcatgcatcattcgaacgaattcttccattacacgtgttttatatttgtgtgtcttgtaatagaagaatacttttctctttgcttcttccccatctaatttgtagtacaccagattttcaaatgtcgggagctggcttaccaggatatcactgatgaatgttgctccaagctgcgtagacgaggccatatatgctgtcgactgctgattgaattccaacacaatattgggcttaaatccaacatttcggcacagcctgtctcctctggttctggtatcatttccctgagtcagcataataaacggaagatctgcaaatctccctaacggaactgccggatatttctggttcagataatttttatttttgatattcttataagaaagctgatacattcccagttcttcatttacggcaaaatgttttggaaccgcaagtaatatattttcttcgcaatataattctttattatatagaatactgtcatagtgataattatcaatgacaaaatccagcgcattactgcccagcatttcttccagttcggctgtattcccctctatcagctgaatatgtacatccggaaatttctgattaaattgggtgatcagagacggtaccacatatgcggcaaacagcgtacttgctcctactgcaagattccccgtcttcagacccgccaggtcattgatgtaattctctacccgctgttcgatctgggtgatctcctccgctgcctcaatatatacttttccgacctctgtaagctgaagcggtgttgtacttctgtcaaataacggttccccgataatctcttcaatctttttgatccttgcactcaaagacggctgactgatgtacagattctgtgccgctttggtaaaacttctttctttatacacttcataaacatattttttccatacaaacatacacgtaacctctcatatcctgctatcatctgtttcctcttttcacatgacagctatagtcagactcttataattgttataacactataagtattagattctctgtccacacggacgtatcattatattaatgaaacaattattccaatatgaatttggggtttattggaataaagataaaataataaaaagcggggaataaaattatgaaaccaatcgtacgcgccgggcgcatgaaaccagtacactctgatatccgtggtccattattcgtagaagctatgaaacgccagaaacaggggatcgatatcttaaaattaaataccgggaatcctgcaacctttggctttggtctgcctgacagcatcaaaaacgctctgatagaacacatgcaggacggtgtcggctactgtgacttcaaaggaatgcctcaggcaagacaggcaatctgtgattatgagaccagtaaagggatcaaaggtatcacatcagatgatgtattcatcggtaacggtgtcagcgaagttgtatcgttcgctttaacacctttgttaaatgatggagatgaagtcttagttccttctcctagttactccctctggggcaattccgtatatctcgaagacggtaaaccggtcttctatacctgtgatgaacaggccaactggtatccggacattaaggatatccgttccaagatcacagataagacaaaagcaatcgttatcatcaatccgaataacccgaccggtgtactctatccaaaggaactccttcttgagatcatccagattgcaagagaatccggacttctgatctttgcagatgaaatctatgaccgtctcgttatggatggcaaacagcacatctctcttgcttcactgacagaggatgttccggtcattacattaaacggtctgtccaaatcacactgtctgtgcggataccgctgcggatggatggtcatcagcggtccaagagaactgaccgaagattacagacaaggcatcatccagttaacatctctgcgtctgtgcgccaataccatggcacagatcgtcatccctgcagctcttgatgatatggagacacctgcttctatggttcggccgggtggcagaatctatgagcagcgtgaagcaaccgttcgtgaacttgagaagatcgacggtctgtcatttgtaaaaaatgacgctgcattctatgtcttcccgaaactggacgtgaagaaatttaacatcaccaatgacaagcagtttgcccatgatctgctggatgtcaccaatatcctgctcgttcccggaagtggattcgactggaaagatccggatcacttccgtatcgtcatgcttccgcaggcagatatcttaagtgatgcgattcgccggatgggaacattccttgacggatataagcagaaataa

SEQ ID NO: 1018 - DNA, 8063 bp, unidentified
  source 1..8063: mol_type = unassigned DNA
tcactcgatatagatcattttctttgtcatccctccgtcgatcgttacgttctcgccgttcataaaatcattttcctcctggcagatgaacaggcacaaacgggcgatgtcttccggtttacctactcgccccgacggatgttgggcgtgatcttctgggcgaagctgttcgtagtcgcgcgtctcgatccagcccggcgaaatcgagttgaccgtgatatgccattgggcaagcgatagtgcaagggcgtgtgtcagcgaatagataccgcctttggatgccgcataaccttcgctgccgggttcgctcatcagatagcgagtggaacagatattgacgatccgtccgaacggattgggtgcctcctgtgattggcggtgaatggccaatctgcgggaagtgatgaaaaccggacgcaagttcacggataatatccggtcgaaatcttccacaccggtttccgtgataggggagaaacaactgattcccgcattgttgattatgatatcgatatcgccccattccttgaaaatctgctgcatgcagttctctagcgcttcttggtcacttacgtcaacatggaaaaaagaggttccggtctgcaacgctgtctcttttcccgccgcttcgttacggtcgcagaacgccacgcggtgtccggcggaacggaaagctcttacgatcgctttgcctataccttccgcacctcctgttacaaagactctcctggttttgtggataacggttgttttcctaccattgtacggatggttcgtacgtccctccttgcgggatttatattcttcgtatttcttttccagatagttgtctgccatgatctttcgctttttaataggatggcaaaagtaatcataattgaatctatttacaatggttgtaggtgaacgatatgcaatcggggaattattgtggattcggagcacgaagttgccaaaatgccacggccgctgcggctgccacattaagtgaatcgacaccgtgcgacatggggatgcggacaacatagtcggctgcggcaatcgtttcctgcgaaagtccgtccccttcagtccccatcacgattgccaatctgggttcggttgccaagacaggattatcgatggaaatagaattgtctgtgagtgccatggctgccgtacgaaaacccagtcttcccaagtcgccaagagaaccgtccatccaagtccagggcacaagaaagactgtccccattgacactctgactgcgcgacggttcaatgggtcacaagagttgcgtgtcagtaatacggcatcaattccaagagccgccgccgaacggaaaatagcaccgatattggttgtgtcgacaaccccatcgattacgacgatgcgtcgggccttctggcatacatcttccatgccgcgtggctcaggacgacgcatggcgcaaaggacaccgcgtgtcaggacatagccggtcaatgtcgcaagcaactccctttctcctgtatagacaggcacgttgctacaacgttcaatgatatcggaagcatctcctgtgatatgcttgtgctcgcacaaaatggctaaaggttcgtagccggcatccagagccctcgtgataacctttgggctttctacgataaaaatacctttgtctggctcgatacgattgcgcaactgagcttcggtgagtgtacagaacatctcgactccgggatgagataaagaagatatttcgataacaggcatttgacaagtcttttaataaatagcaatcttgattacaccgtccagtttgttttcaaaaactcgataagcctcctcgatctcgttcaatgcaaagcggtgggtgataaggggagtggtgtctatcttgccttcctcaatcagttggagaatctcagcacaatcacaaccgtctactccaccggttttgaaaatcaggttcttaccatacatgtcaggcagagggaaaagtagaggtttatcgtaaagagccacgattgtgactgtcgcgtttggacgagcgcattcccacgccatctggaaactgtcttcgctccctgccacttccagaacaacatctgctccgccgtggtcactgtttttgagtacaaactccttacagttatcaggagtcgtgatcaatacgtcagggtaatgttcacggataaaccgaaccctttcaggagacttttcacagacaatgatatgcttcgggttcttcagcatcgagcagagtaaagtacaaattccggtaggccctgcaccgatgatgaggaccgtgtctttctccgtaatttccgagatgcgagtagcccaaaaacctgtggcaagtatgtctccgacaaacagagcctgctcgtcactgaccgtgtcgggaatgcgattcagtccttgatcggcatagggtactctgacatattccgcctgtcctccgtcgatacggcagcctaaagcccagccaccgttgaggtcggtacaattattgacatatccgtgttggcaaaagaagcattttccacagaaagtctcgacgttcacggttactctgtctccgggtttgacagatgtgacacctgttcccacttcttcgacgacacctaccatttcatgtccgacggttgttccgggtattgcgcggggtacacttccgtgcttgatatgcaggtcactggtgcagatactacccagggtcacacgcacgatcgcatcccgtgcatccgtaattttcggtttcggtttttctgttaaaccaaatttgcctttttcaatatatgtatatgcaagcatgatatgatctttattgattaattgattctttctataacaaaggtagcaataatcggtgagatatggaaaagtagagcaaagttattgagaaataggctttttaagaaaatagcttctgcaactgaatgacggaaaaagccaagtctgaaccaagttaggacttcgctacgttaccgattcgttaccctgcataattggtggtatcggaacttaggaagaatagagaaatacgctattatatagtgagttactgacaactcatgcaacaatttcggtaacggatgatagttgcaccgttcctctgcgatttgcgtatcgacgaaggactcttcaccaagtaattttgaaaccaaaaaagttcagaaagatgaagagtacattttcagttatcttctacctcaaacggcaggtagtgaaaaaagacggtacagtgcccgtcatgggacgtatcacggtggacggaagccagacacaattcagttgcaagctgaccgtcgatccgaagttatgggacaccaaaggcgggcgtgtcacgggcagaagcacggcggcactcgaaacgaaccgcctgctcgacaagatgcgcgtgcgcatcaacaagcattatcaggaaatcatggagcgtgacaactacgtcacggcggaaaaggtcaagaacgcctttctcggacttgaacaccgctaccataccttgatgcaggtattcaaccggcataatgaggactacgagaagcaggtggaggcgggcatgaaaaccaaagccacgctttccaagtacaagacagtgtacaagcatctgcaagagttcctcaacatccgctaccatgtgaaggacattgccttgaaggaacttacccctgcattcatctccgacttcgagatgttcctccgcacggacaagcattgctgtaccaataccgtatggctgtacgtgtgcccgctgcggacgatggtgttcatcgccatcaacaacgagtggctgacgcgcgacccgttcagggagtacgaaatcaagaaggaggaaacgacccgcagcttcctgacgaaagacgaaatacggcagttgatggaagggaatctgaagaacgccaagcaggaactttaccgcgacctatacctgttttgcgcattcacgggcttgtccttcgccgatatgcgcaatctcacagaggaaaatatccgaacctacttcgacgaccatgagtggatcaacatcaaccgtcagaaaacgggcgtggtttccaacatccgcttgcttgacatcgccaagcggattatcgacaaataccggggattgtgtgaggacggcaggatatttcccgttccccactacatgacctgtctatacgggatacgtgccgttgccaaacgttgcggcatcacgaagcatatcacgtggcatcagagtcgccatacggcagccacgacggtgttcctctccaacggcgtgcccattgaaacggtgagttccatactggggcacaaaagtataaagactacccagatttatgcgaagataaccaaggagaaactcaaccaagacatggaaagtcttgccgccaagttgaacaccattgaggaatttaccggatgtaacatctaaagcagaacagccatgaaacgaggaatcattatcatagaggacaagaaggtcagcgtaaccggtaacgaggtatggatgaccgccaccgaaatcgccgggctgttccatgcaggcgttccggcagtgaacgccgccatcaaagccgtccgcaagtcggacgtgctgaacgactatgagatatgccgctacatgcggcttgaaaacggtttgtatgccgatgtttatgcccttgaaatcatcatccccatcgccttccggctgaacacctactgcacgcacgtgttccgaaggtggcttgtggagaaggctcttgccaaagaaaagcagcaggcatacgtgatgctcatccacaaggcaaacggatattgctgaacacacaaagacattgatgatgccgacaacagaaagaggaaacggacagctccacgaccggggttgtccgtttcctctttgtgcatacagccgccttatctcaccctttcagcggttttctataatttgcttccaacacttcgcgcagtcccgattccggataaagcacctttcctgccagcaggataaaaggcaatatcctgttgttgcggtattcctgcaaggtgcggcggctcacgcggagcagttccgccacttccttgtccgtcaggtatcgctccccatccaatggcggacggtaactttccaaaaaatcggagagccatttggattccttccgcatcttttgcagcaatacggctactgattcacaatccatcgtgataacattgttgtcttcgttcataatcatatccgttttaagtcagacaaggctatctgtcagtggggcaaatcgtaccgataagcgggatgagccttttcacatcttccggcttgtagtaaaaacggaagccgatttgcgaataaccgataaagcccctgtcacgcagtttctgcaacgtgcgttggctgattctcaactgcccacaaacctcttcgcccgtgagccacttgccgagccttttggcatcccccttgcgctgcaaggcggcgaccttctccacgaaggcatccgtttgtgccaccatttcctcgaaggtctttttctcgatagatactatttccatatacaaaacgatttttgaatttgctgcaaaggtaacggcacgggctgaaacgcccatcggttttgtctgaatggcagcttgttgcgccgattgtccgggttgcggagcctttttcataaaaatcttacgtgagtcacgtagtgagttgttaaagccgcccttttccattgccgaactttgccgcagaaacaataaaacaagcgcatatatgaaagtgataacgattgaaagttccgcataccggactatgctggaacagatagcggagatagcaggatatgtccgcgaagcgaaagaagagcgacggcggaaggaggcggaaacgaaagaccgcctgctcaatacggcacaagccgccgaactgctgaacgtgagtacccgtaccctgcaacggatgagggacgaccatcgcatagaatatgtgatagtacgcggcacttgccgctaccgcctctccgaagtgcaaagactgttggaaacaaataccatcaggaacaaggaagaaacagtggaagccctgctgcacaactattcgttgcggacgggcggcaagaaaaccgacaaaggaaggaggaaataagtatggaactgcttacccgaaacaatttcgagggatggatgcagaaaatcctcgaacgcctcgaccgtcaggacgagctgctgctggctatgaaggcgcaggggcaacaaccgccgttcctgtccgaaggcatccgccttttcgacaatcaggacctgtgcatgctcctccagatcagcaagcgtaccctgcaacgctaccgcagtgagggcgcactctcctacaagaccttgggcaaaaaaacctattacagcgaaacggacgtgttggacttcctttccaaacatgtgaaggacttccggcagaacgacatcgagttctacaaggcacgcatccgcaatatgttcaataaataaccaattaaaatttaatcagatggcaaagaaaaaagacgaaaaggacgtgctgattgtccgtgacgagaagacgggtgagatcagcgtggtagccggactgaatgcggacggcacgcccaagcgcacccccgccaaggcggagaacgcgcagagtttcctgcaattcgaccggcacggagacgtgctggacaacttcttcaggaacttcttccgccagtgcaaggaacccagccgcttcggtttctaccgggttgcggcagagcaggccgacaatctgctggaagtgatgaaggagctgctgaagaaccccgaagcctacagtgaattgcttgcaccccacaaggtggacacttccggctacgagcaggaagtgcagaaagtgcaggaggaacagcaacagcaaaaacaagaagaacaacaacctgatcaggaaaataaagaaaatcaggaagaacctaaaaatcaagaagaaatggaacagaaacaagaacagaatcaggaagccccgcagcagacgcagggcagacagggctaccagcccatcgacgagaacaaaatcaactggcaggagctggaagagcgttggggcgtgaaacgcgacgagcttgaaaagtccggcgaccttcagaagatgctcaactacggtaaatcagacttggtgaaggtcacgcccaatttcggcggcgaggcatttgaattggacgcgcgactctccttcaagaaggacggcgagggcaatgtcagccttgtgccacacttcatccgcaaggagcagaaactggaagaatacaaggaacacaagttttccgatgaagaccgcaagaacctccgcgagacgggcaacctcggcagggtcgtggaccttgtggacaaggaaacgggtgaaatcacaccctcattcgtcagcatagaccgcaagacgaacgagattacggatgtgccggcaagcaaggtgcgcataccggagcgtatcggcaaaacggaaatcaccaagcaggagcaggacatgctccgcgccgggctgcccgtgcgtgacaagctcatcgagcgcaacgacggtaggaagttcgtcaccaccctgcaagtgaacgtggaacagcgcggtgtggagttcgtgccgggcacaggcaggtcgccacgtaccgcacagacgcaggaagccaaggagaatcccagccaagcacaagcacaagcgcagtcgcaaggtacggaaaatgccgccggtacgaacaaggagcaacgccgcaacacatggaccaacgaggacggcagcatccgctccatcagcaaatggagcaatgtgaactttaccgaccagcagaaagccgactacgtggcgggcagagccgtgaggctggagaacgtaactgacaagcagggcttccacgccacgatgtacatcaagttcaacccggaaaagggacgcccgtaccgctacgataccaatcccgacaacgcgcagcaggtcgccccaagcaacgagagccgcacgcaggtggccgtgaacaacgagggcaagaccaacgaggcgaccaagaacctgaatgagccgttgcagaagggacagaccacccccaaggacgacagccagcagcggcagcaggagaaaccgcagaagagaacgggcaagggcatgaagatgtaa

SEQ ID NO: 1019 - DNA, 12969 bp, unidentified
  source 1..12969: mol_type = unassigned DNA
ttgccgctgctaagggaatccacctcaatctggtgctggtgaagctgctggaactgcatcatctggggtacgatctgcgtcactaccgcgcccagcatcatgcgtttatcaagcagttcaaccttccggcacattttcagtttgatgtggccgccggatgaacttatgttcttataaccctaaaacccgtaatggacggtgcgttatgcctgtccattacgggtttttcgtgttatttcagtttttcgagaatttcatcagcactcatgccttcggcaagcagcttcttcaggacggattctgcttctgcctttttcgcttcttctgctgccttggcatctgccctggccttcttcgcttccagcgttaccacttctttttcggccttcttcagagcagtcttcttctctttcaagtcagcctttaaagtgtcaatgttggcggtgatggatgcgatttccgctgtgagtgcttccttcgcggactgcttttccgcaatctgcgttgcaaaatcagcagtcacagttttgggcttattcttgctaccttttgttctgggcataggacacaaacctctttcctattatgatagctcaattatatcacaagtctgaaaacaaatcagccttgtacacaccatccgccaacattttcttgaagctgttttttacggctgcgacatcctcatgataggtcatgccataccaagtgtcattggtcttcaggacctttacggacatctttccctgctccagcagctcaccgatgaagattgggatcagatactcggctttctgaggattgctcggtacttctttctcgaaaaactccttgaaaccattttccagcacatccaaaaaatcaggagtcaagccccacatattcatggataccagagaattcacatcaacaaccacaccgtctgcctctgctccatctgcagtctttacgatgttcttggtttccacaacctcagtcaagtttccattctcatccatcttgcagataccacgagtcacaccgccgttatcagacagcgtgtttttcagcacaaagccagccatgcaggacttgccgccattcaccagatactcgtgtacagccttgaagccttccttgccatagtaatcatctgcattgatgacgatgaacggagttttaattacgtccttcgctgcaagcacagcctgtccggttccccacggctttgtacggcctgccggaagttctcccggaatatcgttgatatcctggaaagcatagtccacagttacattgtgagcggaacaaatagaggcaatgcgatcaccgatgacctctttgaactccttctcaatatccttacggatgataaataccacatgattgaaaccagctccaatcgcatcatgtatcgagtagtccataatgatatgaccagcatcatccaccggctccaactgttttattcctgttccaaatcggctgccgataccggctgccatgataagtaatgttgtgttcatatctctccttattgtgttcatattgctttaactgagcatccttaacacatacagattcgtaatttctttatgttatactttctttagaaaacttttagaacatattcactcattattagtatttcatagaatttgaccccgatatgtaatatttgtgggcgacataattacacagcaaaaggtgtgctttttgattgtttactcataaaaaccgcaactttttattccgtattaatatcccctgttttattttataagcgctggtaaaaggaagattttttaagctaaatctctgcaaatatgtaagttcaccgatgagtaatatttacgttatggcgtttttctctgatctttagcatgaacggtataatagccggacataccctcattaaaatagctctaatcttattcgatcttgttgttgggacttttaatgccaccaaagctctctgttttgtgacattcaaacattttcgatagaattccggatactcattcttaactttcgctaataccattgcatcatagaaatctgagtgggtgcgccaatctgcaaattcccatgcagtctgaactctatctgtatgtatttgtaaattctcttttataatgtctaacgctttcagtccacactcacatttttttattgaaaacttagtcattgcacttgtaggattatctcgacgataaaaatatgttttcaactttcctgcaaggattcgatttgatttttgaaaagctgcaacattaaaattgaatccttctccaataaacacttcaggtatgaatcttgttgttttcaatatttcccgtttgaacattttacagtagcatcctatcggcaccttataacataaaatcgcttctactgcatcttcaccagtccatattcttacatcatctgcatccatctgcttattgtcaaagcttccaaacatatgtgttgtcaatgcaatatctgcatcgtaagcaacccctaatgccagcatatagcttacatattctggcattatgtaatcgtccccatccacaaaacatatccaccgccccgttgccacatcaagtcctgtatttcttgctgaactcactccttgattttgtttgtggataactttaatccgcgcatctttctccgcataagaatcacatatttttccagattcatccgttgacccatcatcgacaagaatgatttccaaaaatggatattcctgttcacatattgactcaatacacttactcaaaaaagacgatacattatatacaggcacaataacagttactttgtctgtaacatttatcaacttctgttctataaattcacttgtttcttttggcaacatagtctcattcccctttacatttctggatattatcctctgaattctcaagtcttcaattttatgagatcaaaagattatatctaggaattcgccctatgttgcgatctacatctttaacccaaaatagcattgggctatcgaggtttatgacacttacgtttacttcacaacataacttattccataatttgtcataccccccccgattatttttgctttaatcaaaaacatctttactaattgctttgcgctttgctttggatacagctttcttacaatagcattaaaattctttccgttttttatttcaccaaaaaagatttctcttgtgtttggtttaatagatggatgcctgagctgatgattatgttctattgctcgattcaattcaacatccataagttctaactcagactgttctaatagttctttcccctttggggtctgatttagaatcagagaaattcctttcctttgttcttggatatcaagattactcccccaagaatcgccaagcgtaatatcagagacacgcatgatattagcatactggcaatgataacaattctctgtgtaagatattgaattcaaaaaagatatagagtatttatctaatacacctttctgcacaatataacttgtaccttctcttacagcaaagttgtttttgttacggaattgaatatccgacaattttggggtatcaatatcatactgtgccaaaaacatatccaagactttaggtgatggcgagccatgacaaatcaaatcaaccgtatataaactattgtcaagtttttctccaacatagcatttaactgcttctacttggcaaggcaaacctacaaatagaacctttctcccagcaatcaagtattcctttatcttcttataaattccactcggattactcttaacatactttgagcctttgaatttttcaacttctttttctgattcggcaaacataaaaccaaatgttcccttttcaaaagcacaactacacacaataccgcctgttctgacaaaggcacgttctatcgcttgcgctactcctccagaagatgaactcgaccgaactaaagtatctcttgcccatccctgtttccacatgatcggttgagtaaactttacatttctattgttctgacacacttttctgcataagtcacaattcacacattgttcctcatttattatcgcattgtatgaatccaattcatcaacaatcttaattgcatttttggggcaactttccacacaggccatgcaaccagtacaattatctttggtgcatactgttttcactttgtattcacccctttcttgctttgtttcaaaacatcctctattacggtatcaataaagttattcgccttatttctttctccgttcaatatttcatcgacttgcttaaaatccactgctcgattcacaacatcaaaatcctcataattatcaatatgtctttgtgttgtgtttgtctgcctcaaaatactctcaagccgtccgccgaattctttgggataaacacaaataggttccgtatgcaaattcaaagaaaaagccgttgcatgaaaagaatcagttaatacaaattttgcattatcaatcaaactgataaaatcaaatacttctggcacgagcatactttttccaggacgatagaactgatcataccgtgtgcaaaaacgtaccaattttaatcctgtccgtttggaaagttcaactgcatatcggtcaaactctttgctccgattcaaattatagataagtatataatcatcttttatttttctaggtgtctcatatttacgccaaaaatctccagagacacacaatgtcggatcaacaagatgtacactgtttttaatgttgtattgttcatctaaaatgacttttgcttcgctttctcgaaccgaaatcctattatattgttcaagataaggcttggttttattgatttcctctgttgataatttgctttgcccaaagcttgctgaaaaggcaaacttatacttgtcattcggcacaaagcttaaatatagacatggcaaaatcccattattccattttgaattccatacttggtcgcttccagtacaatacgcatctgcatccaagggataactttcaaagtcatcctccgttgtatatgtgttttcactcaaatcaagatactttttcacaaaagactgaaatacgtttttccatctgagaatcgtcgggataatcgcaagtgctttaattggattcccaccactccatttttttactagattttcataccgaacatcttctcttacatagtctatgatcgtaacgtcacagccatgctgctttaatatttcctgagttgccaaagcttgtaatactgaaccatagttctgcaccgcatgaagcgttatgacatcaatttttattttcttttccatataccaaataccaatctcccaaatactgttttactctatcataacaatttatatatttaagtaacttcactccatcacatggattcttgctcaaataaaacgctttcctgcactcaatccatttttttgacatatcaagtacatcaatcttttcctgtgagcaaacattatcttctacaaagtcatgcaaatcgtctactactcgccttgcataatccatagattccagctttttcttatatgtgcggttacaattactttctttagtaaaggtactgtctgtatgcttccgccactgaatcaggctcatattatatgaatataacgaatccgaaaacattcccatccgccaaaacagtgcgtcatgcggaaaatctacctgccaatgttttttacttatttcgacaaactctcttcttatacaatatgtgcagccaggataacgaatattaaacaccttattcgacaacggctgttttataagttttccatcatccttttctggcccacatacccgttttccagaatcataaaaggattcataattcgatgtaagcaccatgatctgaggattttcagccatgattttttccatctgttcaagcttttgcggcatccaaatatcgtcctgatcgcatggaaatacaaggtctcccgatgtactccagattccttccataaagttccgtttccagcctttattttcatgatttacagcgaacttccatgtggtcagattatgtcctgaaataaattgttttattatctgtggtgtattatcggtagagcaatcatcaaaaatcaaaacctcatctgcttttctggtttggttaagaattgaatcaagctgctctgtaatatacgcttccccattatatgtagaaagcacaatcgaaagcttcattttatttcctccgcttatttatcattttaattccaatccccattaaatcacgcaatgtctcattcattagtattcctaacgatgcaatcgttgcaaccatataagctatgcagccgataaccgatggcaatgtgaatccgaaagtcagcaaaaggataagctgtacaaacaagtacatttccgtctttttagaacatttcagatacttgaaatccgttttggaaataaagaaccatacgattgccgacaacaatgttccaaccgcaaatgcttcttttacatgaacgactgcatagcatccgcagttaagtgcaaagccaatagccagaatgattaccagtttgacaaaatagactttttgttttcgctgtactttatacaagttcacataaatgcttcttatcacggtatagaatatctgcgcggaaaagagcaaaaatacaaccgcagccgaatcaatgtatttggtcaaaaagacttccagaatgaattttactggaaatgccgctgccgggataatggttgcaaacaccgccacataattgaacacttttctatgttcttcttcatcactgacgcggcagaaataattatataatgtcgttgtaaccggggttatcgcaagattcaaaaagttctcaacactaactgcaaaggaatattgtgcaaatgccagcgtatccatcaatgcttttacaaaccagcgatccatgctggtgagaaaaattgatgatagatttcctaacgtcagcaaaaatcctgctttgatatttgaaagaaagcttttgaatgaaaacaaagctcctttttgaagcgtatgattctttctgaaatagacatccagtacaatccaaatcaggaaataaagaaccacatatcctgcaatgtaccagaaaacgctatctgtccgaagaacaaaaagcagcaccatattcaacgcaaatgttgaaatggtggtcagattcattgccttaccatagaggtcaaactctcctgttgcctgatacaagaacttgaaataattgctcatattctgtggcagaatagaaattgcaaaaaaggccagaatacgatctctgagtattatcgcaactatcaagactgcgatggtagtaactgtttgaaaaatgcacatcgttgacaaatccgtagaaaactctttgtcaacatcttttcccaaagtcttaccgccatatttcaaatatataccatcaacaaaccccaaatgaaaaagtccaacatacgacacatacagttgaaactcttttattccggcatagctttcgattgacaaatatttgggtaataaaaagtttgttgccaagctaaaggcaacatttaccaaattagcaattaaaactgccacgattcctttttgcaactttttgtccatttatttcaccactgaatatcttttctcctgtttccctttcaattttttccacatcacgcttaaaaacaccggaacaataattcctatctcagtcttatttttttgaaaacaaacaacacacacacatagagaatagccaattccattacataaccaatagtcaccttgttaatatagaacgaatcttccattgcttgaaaaggaaccacatacaaaagacttgcataaacaatagtattgtatacatgttttattgtattatctttgtacaaacgcacttttctataaaacgcattcataattagagacagtattgccggaaacaccacaacgcctatccatcctgcgtcattgtagtatctccgcaatgccgtataaacatttccaagataaatgcctgttggagtatatctgaattccaactgctttctcaatgaagctgttgtcaatcccagttttctcaatcctgttattagacccgttaatgtttcgccaaacggaacatctataacatgactagattcccgaacatattgatcaagtaattgaatggagcctccaatatactgagttatatactcaagaaaattaagcgaactcactcttcctactagctctttcatataatagaaaagcaccattcctattgcaaaaaccataatagcttttttcagcatttttccacttatatgtttgttccatcccactttgcgatgtaaaaacatatagtacagaaaaacagccatcacaacaagctgcataatgtcaacacgatttcctttaataattgacattgccacaaaaaggaatgctggaatcaaatactccgcatttcttctaatccgatgattttcttttgatgcaaagacattattcataaatataaacatatagacaaatccgaatgaatacaccatctttgtcatctgattgacaaccggattcaacgacatatcaccatacgaaataacacgtttatacgccaccattacgccaaacgacttccaatatgaatccgcatatgctgacaaccgaacagcttctttgtaatataaaaccatcgtaagaattccaaatgctatcacaagtacatttttccatcttgcgacttgaatatgctctatttctgtgtctccctggaatgcatactttttatgagaaaatctataaagcattccaacacttacaaaactcaaagcacctatcagaataatcattattgtttttgccgacaaatcaattccccacgcagatacattcatcgacgcggcaaacactgccaatacaaagccagcaatatataaaacatctggggccatcatatctctatcacaaaggacataactgaacatcagtaaaaaaattaatataataagtaaaaaagcaagactttccatctatactgtcctcataatcctttcaattatcctctccattgggtctttttataagcaaatgccaacgtcttatatcccatataagagattgctgccgctattctcgccttttttcttgcttcggcattaaacaaaacatcttttctatacttgagcacttcattccatagcgaccgtcttatagactcatgtttatcgtctttgatttggaagagaatattgcagaccgtgctgaaatatcggcattccgcagcatttttcaactcagggaaatccgcttcaacagctttcatcatattgtggcaatgctctattccatccatctttctcacattaaatgcgatgttttgaatgctgtctgttcgttgaaaataatagtaatctacatttcctatcacagctatttttttgctttgcttgacagcttcgtatgtaacaggtatatcttcatacagttttccaacaggataccttaaatgcttgataagtgatgtcttatacagttttccccatgcgcaaacttcaacgccattttggtatagcagcttttttagacattcttctgccgtcaaacattcatagtttgagagcggttcttcaggttttgattgcagagctttttcctcaaatacattttcaaaccagcttatcccaatatccgcatcacatttggcaactgcctcgtataaatgttccacataataggatgaaacccaatcatcgctatcaataaaactaatgtactcacccttggccaacggaattgccgcatttctggcatcggataagccgccatttttcttatgaataaccacaacacgattgtcagtctctttatacctgtcgcagatagcaccacagttatccggcgatccatcatccaccaatataacttccatattctgatatgtttgtgtcaggatgctatccacacatcttttcaaatacttttcaaccttgtaaaccggcacaattatgctgattaacggctgttcgagttctttcatctacctcaccaattcctcaaataatttttcatgttcttttgcaactctctgtgcgtcaaatttactatgaacatcttttattccctggattacaaggttctgtttaaactttgcattcctatataatcgaatcacagcttcacttgcttctgccgcattatctacttcaaccagcagtccgttttcctcgtttcgaacaatattgggaattgcatccacgcaggtggccacaatcggtttttctgccatcatatattccggcaacacaagaccaaatccctcccaacgacttaacagacacgcaatatcaaaaagttctacataactcatcggatcattgacccagcctgtaatatgtaaactatcctcaaatccattatcttctgcgtattgtctgacctctgcttcttgatttccacttccgacaataacaaaatgtgcattagggacttcatccttgacaagctttgccattcttacaaatacatcaggtgctttttgagggctaatacgaccaaccataccaaccacaaaagcatcttctggtatgtttaagtctgctctcgttacttttccatgtgtaccattttcatacgctttgatatccacaccattaaaaataacctgcaacttttcttctttgcaaatcttcttatctaaagcagattgtttttctgcatctgaaatacagatgattttatcgcagaatggtgcagctattttttcaatcactgtgtacatcattttcttcttttcggaacagcgcatattgaacgcccatccatgtgggttatatacacagcgatttttcaatccaatatccgccacacgagcaatcgcgccagccttactggaatgtgcataaacaatatctggattatatttctttatccgcctccgaacttctctgatggacttcagatcactcatcccgattgctctgttcatttcgatttgctcaaagccatcggccaatctctcatagtctcctttatgaaagtcctgtgagcagaccatgatattttcaaattcttctttatccaaatacttgagaagcattcggatgtaacgatctacgccaccagcagcctggactacatgcaatattctgattttccgcattatgccaccgcctttgcagtggcataatcattcgttaggacgtacagtattagctcatgctgtacccccccccggggagtatttattgccttatcatatttctcgctatattgttttgccatagctttggtattgtacatattcaagacatcttgatatgcccgttctgtaaatccgtctgctccgttctgggcttctttaatagcctttacaaattcctccgtattggaacacacaaaaccattttcgccattatgaatcacatctctattgccaattacgttgctgacaacacaaacttttctcatatacatagactccaacaacgaaattggaagtccctcccatctgcttgggagaagaaatacgtctgcattgactgcatacttaatcgcagttgttctatccacccatcctgaaatttcgatatttttacttttcagttcctcccgtagctcaccatcaccaatccagacaaatctgacatccggcaacaattctgcaatcgtgttgaataatgttggatttttctggtagcaaattcttccgagggtaaaaacggtaaacggatgcgctactttttctgtctggttaacaatctcttgaagttctttcatattgatgccattattcacataagcagcattcttggtaagctttaaggtttcctgatgctcacctacactgcagctaattgtagtacagtttcttttggcacaaactgactcaatcaacttaaaaactctgcgttttgtaggattacaattctccattaaaaagctatatccatgcggcgtatagaacatcggaatttttccatcaaatgcaactcgaccaatcgctcctgctttgctgctgtgcagatgaatcacatctggttttacctctgccgcaattttctttacctcaaagaacgcagcaatatcctttgttggattgattgctcttccaaaattctttacttcaatcagatgaattcttttgtcaaaatagtccttataatttttcggtgtctgctttcttactgcatacgcaatgtacatatcatatttatttaccagttcatttgctaaatctacaatgtaagtaaatacgcctccgcccatagcttcgactatgtacagtattttctttttctccgccataggtttgctttctcccagtacccctttatctactcatctaactttagaacgttttttccaattttcttttaacagcaaacaagcccacggcggatcactcaatggcaatccaccgtaggctcgattcgttctccttgattttttacttgctgctcatttcgtgggtcaaaacagagctgcgccaaaacctcccacctataacttctggattttagcatctccgcagcctgtcagcaaataaatacttttgttgaacgagtcgagccgtcaaaaccctttagttatcgtggtatttcttggttgaccctattatatctctagcccccttcttctcaatagtcggaacaaccttttgacggataccatcatattcaattgttttgtcatactctgcaccgctcacatgatgacctgctctattgtagcaagtcacatcacaaccattctgtgccattcgggtgcataactcttttacaacaatctctatcccgccttcacgcgaaagacgtttctgtccgaaaaccgcaagtctgattttttcttccattacttctctccagccgtcattccatagtttctattcttgtcctaggcttatacacaatcccagcagttcttttccttaaattgtcatgctcgtctttcactattcacctttcctatttcatagcacaacaacaagcctgtatacagattgcagcaacaatctatacgcagg

SEQ ID NO: 1020 - DNA, 8928 bp, unidentified
  source 1..8928: mol_type = unassigned DNA
tgccgcacctcgctcgccgtatcggcacttagaattatgcggtattgcctaaatttcaatttcaaatgctgtgccgcatacgacagcaaaccaatgcttgaaattagtcatattattatacaataaaagccaatccggcacaagagcagtcaacactttaaatatcatcccaatcactaagaggaaattccccaaatacttttttcaacgcttgcaaataaaggcggatttacgcctgagtttgcaggcgtttttatctataggtggcggaattgtcaatagacggagcgggggagtgccctcacccaaagtattgtattgcgtctacctgtcagcagcaatggcagcgctgcaggggatgatgctgtgcgaatttttgcatgatgttcgcttctggtagcgagaataagagatcagcataattagataaatatttttacctaacaatattgacatacaaaacaaatgtgatataatagcctcattgacaattgagtcaatatttttagataaataattacgaggtataaatcatgagctttgaagaactgaaagaagtatttgttgataccctgaactgcgatgcagacaaagttacgatggaagccagcctgaccgaggacctgcaggcggatagcctggacgcggtggagctgaacatggcgtttgaggacaagtttggcatcacgattgccgatgaggacctgggaacgctcaagaccgtgggtgatatcttcaactatctggttgcgcgggcagcctaaagggtattagggatgaatgccattgaaaagctgttcccggtcagccagcaggagcgcagcttccagctgaaagtccgccgcgatgctggtacggctgcgcccggctgggtgcagccgcaatttgttgaatgtaaaaaatgcggccgccgcgccacccgccaggtctggaccaaaagcctgtatgtatgccccaattgcggggtacatctgcccattggagcctattaccggctcagcacgattttggaccacggaacctttaaggaactgaatccagaccttgcccccaacgatgtgctgcattttcccgattatcaggaaaagttggccgctgcttcggtcaaaacgggcctgaaagaagctgccgtcaccgcaaccggcaggatcgggggcgtgcaggcggtggcagctgtgctggacagccgattttttatgggcagcatgagcactgccgtgggggagaaaatcacccgtgcaatcgaatatgctgctgataaacggctgccgctggttattttttctgccagcggtggagcgcggatgcaggagggcattttcagcctgatgcaaatggcaaaaaccagtgccgcgctggaacggttcagccgcagcggcgggctgtatgtcagtgtgctgacccaccccaccaccggcggtgtcacagccagttttgccagcctgggagacatcacgctggccgaaccgggtgcgctgatcgggtttgccgggccgcgtgtgattgaacagaccatcggagaaaagctgcccgatggtttccagcgcagtgagttccagctggaacacggctttgtggatcaggttgtgccgcgcactgaattaaaagaggttttgacgcggattttgcagctccatacacaggggaggaaatgcagatgatcaaagaggttttgcagcagctggaaccgctggacgcgcagattgatgcattgtgtagcagcatcgatgatgccgaaatggcgaatacgactacccatgccgctgagctggcagagctttccgcgcaggaaaacatgcttttgcagcgctgcacatcactgacgccggaggacagagtttttctggcgcgccgccctgaccgcccgcatatcggcgaaatcatcgacaacctgtttaccgacttttttgagcagtgcggtgaccggcaatgcaaggaggacgcggccattttgtgcggtatcgcgcgattccatgggatgcccgttacggttttggggcaccgcaaaggaacgacgctggaagaaaacctgcgctgcaactttggcatgccgggaccggaaggctaccgcaaggcgctgcgcgtgatgaagcaggcggaaaaattcaggcggcccatcatcacatttattgatacccccggtgcttaccccggtaaggatgccgaggagcgcggccagggggaggccatcgcccgcaacctgatggagatgagcggtctgaccgtcccggtactggccatcgttacgggcgaaggctccagcggcggcgcactggggcttggcgttgccaaccatattctgatgctggaaaacgccgtgtattcggtgttgagccccgaaggatttgccagcattttgtggaaagatgcctcccgcagcggcgaagcctgtaccatgatgaaactgacggcgcaggacttgtatacggatggaattgtggaagagatcatcgccgaaccgctgggcggtgcacagcgcgggcggcagctgcttttcagccggttggataccgccattgccgcgcaccttgccgccttgtgcaagatgagtggaaaggcattggccgaccagagatacaaaaaataccgccgtatcggagaaatgaggggagcatgaaaggcttacagctgctggccaccggcggggcactgcccggccgtgtagtgacgaatgaggatttgagccgacaggtggacaccagcgatgaatggatcacgacccgcaccggcatccgccagcggtattactgcaccgaaagtgaggatgccgccacgctggccattgccgccgcccgccaggccctggcgcgtagcgggctggcagcaagcgagattgcctgctgcgttgcggcaacgctttcggctccaacggctacccccagtgttgcctgccgtgtgcaggcggccttggggctgccggagaaccggcccgcttttgatgtaaatgcagcttgttccggttttatttatgctattgctgcggcccacgggctgttgaacaccctgggcggacgctatgcgttggtcatcggctgcgaagcgctgtcccgcatggtggacccgaccgaccgcacaacctgcgtactgtttggggatggcgctggtgcggctattctggaactggccgaagatgtgccgtttgccgtcacgttgggcgcgcgggggagcgaagccatccgtgtcggcggccctgcagcctgcgatacggccccgatcacgatggatggcaaggcggtctttcgttttgcggtggaaaccatgccgcgttgcctgcaaaccgtgttggagcacagccaaaagaccttggctgacctggattgggtcgtctgccatcaggccaatagccgcattattgaccattgtatcaaacacttgcacgcagaaccgtcaaaattttataaaaatatggaccgccatggaaataccagtgctgccagcattcccattgccctgcatgaaatggtggaaaatgatttactgcaccccggccagaccctggcctgcatcggttttggcggcgggctgacctggggcggaatgctgctgacgtatgagggtagaaaatgaagctgctcaatgaaattttaggtacgaaatatcccattatccaaggtggaatggccaatatcgccacgggcaaatttgccgctgcctgctctaacgccggggcgctgggcctgatcggttccggcgggatggatgccgatgccctgagggaaaacatccgccactgccgtgcgctgaccgaccagccttttggtgtcaacatcatgctgatgcacccgcaggcagatgaatttgccaaaatcgtggtggaagaaggcgtaaagatcgtcaccaccggggcagggaatccgggaaagtacatggcaatgtggaaagcagccggcatcacggttatcccggtggtagctgccgcaatcttagccaaacacctggaaccgcttggcattgacgctgtcattgctgaggggacagagagcggcggccatgtgggggaaatgaccacaatggcgctggtgccgcaggtcgttgatgccgtccacgtgccggtcattgccgcgggcggcattgctgacgggcgcggtttggccgcagcgctggcgctgggggcctgcggcgtgcaggtcggcacctgtctgctggccagcaccgagtgccccatccacgaaaactacaaggcagcgctgctgaaagcccgcgacagcgataccattgtgaccgggcggatcggcggcaccccggtgcgtgtgttgaaaaaccgaatgagccgcgagtatgtccggcaggaaaaagccggggccgacaaaatggcgctggaacgctttacgcttggcagtctgcgcaaggctgtgtttgacggcgacaccgaaaacggaagcctgatggccggacaggccgcggggctgctgcatgaagtccgcccggtagaagagatttttgccgcaatggtaagcgaggcaaagacctgcatcacggggttgtacaaggagaccatctgatgaaactagcatttttatacgctgggcagggcagtcagcatgccggtatgggccaggacctttatgaaacctttcctgccttccgcgccgcctttgacgaagctgccgcagcggtggattttgatttgaaagaagtctgctttaccgacgcggcgggcgtactgaaggaaacgcaatacacccagccttgtatgacagcttttgccgccggtctgaccgctgtgctgcgggagcagggtattatgccggactatgcggcgggcctgtccctgggggagtattccgctttggcctgtgcgggggtgttcgatatgcagacggcggtcgctttaacggctttccgtggcaaagcgatggctgctgccgctgccgggcgcacctgtgggatgacagccgttttgggattggatgaaacatccttgcaggcatgttgcagcgcagccgccgaagagggcgttgtacagatctgcaattacaactgtcccggccagctggttatcggcggcgagaaagctgccgtagacaaagctgccgacctggcgcttgccgctggggcgcggcgctgcctgccgctgaacgtcagcggtgcgttccatacgctgctgatgcaccccgccagagatgcgctgcgggaaaagttccaatccatccattttgcgccgatgcagttcccggtgctgttcaactgccttgggcatgaaatggcacagaatgacacggtcgccacgctgctggaaaaacaggtgcagttcggcgtacgttgggaagccaccgtccgtcgtttggcggaactgggggtggataccgccattgagatcggccccggcagggtgttgaccggatttgtgaaaaagacggtgggaaatgctatctcgtgctatccggtggaaactgctgcacagctgcagcagttgctttgcaccatgaaaggagcctgaccatgccgcaaaccgaaaacatgcgccgtgccgctctggttacgggcggcgccaagggcattggtcgtgccgtctgccttgcattggccgaaaacggcatgaacattgcagtcaactacgcaggcagcgcagccgcggccgaggaaacagcggctgcctgccgcgcctttggtgtgcaggccatcacgctgcaagcggatgtgcgcagccccgaagcctgccaaaatctggtggaagataccgctgccgcttttgggcggatcgatgtgctggtcaacaatgcgggcatcaccgcggataaactgctgatgcgcatgaccgaatccgactttgacaatgtgctttttaccaacctgaaggggacgtttttctgcaccaaagcagcttcccgcttgatgatgcgccagcggtatgggcgtatcatcaatatcagcagtgtggtcggcctgcacgggaacgcgggccaggccaactatgccgccagcaaggcggggctgatcggcctaacgaaaagcgttgccaaagagtacgccgcacgcaatattaccgccaatgcggtggcacctggatttattgaaaccgatatgaccgccgctatgccggaatctgcccgcgccgcagccgcagcggccatcccggcaggcagaatcggccgtgctgaagatgttgccgcggcggtggctttcctggctggggaacaggccggttacatcaccgggcaggttctttgtgttgacggcggaatgggaatgtgaggtgcagctatgaagatagaaaagaaacgccgggtcgttatcaccggccttggcacggtaaacccaaccggcaataccgtggcggaaagctgggccgccgtgaaagctggccgctgcgccgttgggccgatcacggcttttgatacaacggattttaaggtgaaactggccgcagaagtcaaagattttgaccctgccgaacgtattgaccggcgcgaagcccgcaaaatggcgcggtttacccagtttgccgtggccgccgctgacgaagccatccgtgacagcggcattgcactggaaaatatcgaccacacacggttcggcgtgatcctgtccagcgggatcggtggtctgcccacgatcgaggaagaacacacccgcggccagcagcggggctttgaaaaggtcagcccctactttgtccccatgtccatcggcaatatggcggcggggcaggtggccatccgctttggcctgcagggtatgtgcagctgccccaccactgcctgcgcaggcggtaccaatgcgattggggatgcgttccaccgtatccgcgatggatacgaggaccgtatgctctgcggcggcagcgaaagctgcatcagcccgttgggggtgggcggcttcgccagcatgaaagccctctgcaccgcagacgacccggcccgggcctcgatcccctttgatgcccggcgcagcggttttgtgatgggcgagggcagcggtgtgctgctgttggaagaactggagaccgctaaagagcgtggcgctaagatttacgccgaggttgtgggctatggcgctaactgcgatgcttaccattttaccgccccggcaccgggcggtgcaggcggcgcgtcctgtatgcggctggcattggctgatggcggagtggagccggaacagattggctacatcaatgcccatggaacttccacgcatctgaatgacagctgtgagaccgcggccatcaagtcggtttttggcagccacgcgtatgagctggccgtatcctcgaccaagtcgatgaccggccacctgctaggcggcgccggcggggtagagggcgtgtttaccgtgctggccctgcacgatgcctttttgcccgctaccgtcaacctgcaggagccggacccggaactggatctcgactatattcccaaccagggccgcgcgttacaggtggattatgccatgagcgatagcctgggcttcggcggccacaacgcctgtgtggtgttcaagcgttgggagggatgaggatgaactatacacccaatgaaccgccccggaccctgacggcggcggaaatcgaaaagatcctgccgcaccgttacccgtttgctctggtggataagattcttgactatacccccggccagtgggcgcgcggaatcaagtgcgtgacccgcacagagtcgtttttccagggacatttccccggccatccggttatgccgggggtattgattctggaagcccttgcccaaaccggcgcggtggccgcgttgagcctgccggaaaaccgtggaaagattgccctgtttggcggggtaaaaaatgcccgtttccgccgccaggttgtgcccggcgatgtgctgactttggaatgtgagctggtagagcagcatggcccggtgggcatcggcaaagccaccgcctgggtggatggtgtgcgcgcggccaacgccgagctgacatttgttatcacggatgcctgagggctggttttgcatggtggattgtgctataataaattcattaacctacagggggattctcgccatgctggatcagacatttgggcaggtatacacaaaattcaagctgcatttttataaacagatcttcaaccgttttgaagaccgtgaagccacgctgacgacggtagaatctttctgcatggaagtcatcatggcactgggggaacccacgattgcgcagttcagccacatgatgaatctttccacccccaacgcagcttataagatcaactccctggtcaaaaaaggctatgtggagcgcatccaatccaccaccgataagcgggaataccgcctgcggccgacccaaaagtacgttgattactataacatcagctattcttacctgcatctggtcatggagcgtgccaaacagcggttcagccccgatgacctggccaagttggaagaaatgctgcagatcgtatccgatgaactgatgccggaaattcagctgccgaaataaaatatacattacgataacaaaatgcgaaccacttcgtacaacgtggttcgcattttgtgtttatatgattattctgttggtaactcttggaccttttgaacagattgatgccagccgtacaggacattacaaaagaacaatctcgtcaaaatcaataatccatatcaaacaggtgggccatcgggacagcgtcttcccgttcagcggtcagctttttcaaacgcagcgggtccgtgttccagcgtgccgacagtggctacctttttaagttccatgcgttttcctccttaaggtgtatcagaaaacaaagaaaatgacggatatttcgcaaacacaagcagaatttaaggctttttaacgcaaaatccggccgtgtttgtagaaatagactacatttttgacttttcagatacaccctaggttgccgtgctttcgccccgccgcaaaactcctaaggcaataccgcataattctaagtgccgatacggcgagcgaggtgcggca

SEQ ID NO: 1021 - DNA, 8349 bp, unidentified
  source 1..8349: mol_type = unassigned DNA
cccgtaccatgttataatagaactaggcaaaaacaagactattataacaacttttttgaaattgggcaacagaaaatcaacttcagtttcttcgaattgagcctacccgacgacgatccagtctataccctgaaaaaagtattggaggaattagatttttcgggcctgctggcctgttattcagataagggaagaaccgggtttaacccaatcatgctgtattctgttgttacctacgcaaacatgcgcggggtaagagctgttgaccgtattgtagacttatgccagagagatcttgcttttatctggctgaccaaagggcagaagccccagcgggatgttttttacgattttaaaggaaaaaagctgacgggagaagccctggatgaactgaattaccagttcatgcgccgcttggagaaggaaggccttatcacactcaaagagctttacattgacggaacaaagcttgaagcgaacgcaaacagatacacgttcgtctggcgtggaagcctcaactatcaccttgcctgcctgctggatgccatcgatgccctttatgccaagtacaacgcattcctgtcggagaatggatatgggacgaaatacgatctcggggatgcccatatgttcgtgatcgaaggaatggacaaagtcaggaaggtcatcgaagaaaacaggaaacggaaactgacaaagcataaaaagatctccaataacaccctcattgagatcgaccactgttctccccttgagatcctgaagctgcagaaaaacctgatgtggattgcgcaaggggaagggattgaattcgttttcggaaaagggaaacataagccggggattcagaaactctatgaggaactggaagaatgcggcagccgcctgatggggtataaggaatgcttcgagaacatgggaaaagaccggaacagctattccaagacggacctggaagcaacattcatgcggatgaaagaggatcatatgctcaacgggcagctaaagccggcatacaatgtccagatcgcagtagagaattactttatagtccacggatatgtgagtaatgaccggacagactatcatacgctgatccccgttttgaaaaagcaccagaatgcgtttggagacaccctggaggcggtgacggccgacagcggctactgcagtgaaaagaacctgctgtatctcaaagagaacgggatccgaagctatatcaagcttccggatcatgagaagcggaaaacccgggcttataaggaagatatcgggaagtattacaacatgacatacgccgtctttgaggatgaacgctattacatctgccatgatggaagagagctgcgtcatatccggacggaaagcaaagagcaggagggttatacccagacggtagaggtatatggctgtgcggactgcatggggtgtgagcataaatccaaatgtctttataaatacaatgctgggaagaatccagaccggaataaagtcatgaagatcaacgaacgctgggaagaactgcgggaagaatccaatgcaaatatccagagtgaggaagggattttgaaacggcagatccgttccatccagacagaaggacactttggagatatcaaggaaaacgaaagcttccgtcggttcaactaccggtcagaggagaaagtttataaagagttcatgctgtatgcgatcggacgcaacatcatgaaataccatcggttcttacatcatgaaatcgaaacgtacgaagggaaaaaggagcagaaagcagcttagccgaagatgtgcttcaaaaaatccagacaagggggttttgcgccctaaaatagaagctgcaaaaggaggagacaatcccatagagaattccggcttaaaaaaagcccggattctatgggaatgtctcctcactagctgtcagaggtaaaaaatcggtattaaccgacagcccctttaatccttttaataatgaaaagatacgttcgacagtctctttttttatagaaaatttatattttttacattatttttagagcatttcacttaaccgggaagtttcccgtatttcattggatttcgagtcgaaaaatccttgctaataaatattctctatgttataataaatgctgcgggcaatgacaaaaaattaacaataccgttaaagcccggtaaactcgcactttttaatgaatatggaggagaaaacatggcaaaaaaaatcgttttggcgggtgcatgccgtacagccatcggtactatgggcggaagcttaagcacaactccggcagctgagctgggtgctattgttattaaggaagctttaaacagagcgggagttgctcccgaagcagttgatcaggtatatatgggatgtgtaatccaggctggccttggtcagaatgtggcacgtcaggcatctatcaaagctggtttacctattgaggttccggcagttaccatgaacgttgtttgtggttccggtttgaactgtgtgaaccaggctgcacagatgattctcgcaggcgatgcggatatcgttattgcaggcggtatggaaaatatgtctatggctccttatgcgattcctcagggacgttatggatacagaatgggtaacgccacaatggtggataccatggttaatgatgctctcaccgatgcttttaatcagtatcatatgggtatcactgctgaaaacattgcagagcagtggggacagacaagagagcagctggacgagtttgcagcatggagccagcagaaggctgttgcagctcaggaagcaggaaaattcgatgcagaaatcgttcctgtggaagtgaagaagaaaaaagaaaccatcattgtcaataaggatgaaggccctcgtccgggaactacggcagaaggcattgcaaagcttcgtcctgcattcaaaaaagatggtattgtaaccgcagcgaatgcttccggaatcaatgacggcgctgctgcagttatcgttatgagtgaagaaaaagcgaaagaacttggtgttacacctatggctacatgggtagccggcgcactggctggcgtggatcctactatcatgggtatcggacctgttgctgcaaccaagaaggttatggctaagacaggaatgaatattgatgatttcgatctgattgaggcaaatgaggcgtttgccgcacagtctctggcagttggacatgatcttggcattgataatgacaagctgaatgtaaacggcggagctatcgcactgggacatcctgtaggagcatccggatgccgtattctggttactctgcttcatgagatggtcagaagagatgcgaagaagggtcttgcgactctgtgcatcggcggcggaatgggctgtgcaaccatcgttgaaagagattaatatagcattttaaaagggaatgattagtggactttttgtctgctaatcattcgttatgcagtaaaggtttctgaatattgttgattaaccgccgcaatggcgggagaatccgtctgagggcggaaataagaaagggagagtggcatggaatatattgtttatgagcagaagggtgcttatgcggttattactatcagccgtgaaaaggcgctgaacgcactgaattcacaggttctggatgaactggacaagactcttgatggagtgaacctggacgaagtgagatgtctgattcttaccggagcaggaacaaagtcttttgttgccggagcggacatcggagaaatgagtacattgacaaaggtcgaaggagaagctttcggcaagaagggaaatgatgttttccgtaaactggaaaccttccccattcccgttatcgctgctgtaaacggttttgccctgggcggcggctgtgagatttccatgagctgtgatatcagaatctgttctgataatgcagtattcggacagcctgaggttggcctgggaatcactcccggattcggcggaacacagagactggcccgtctggttggaccgggaatggctaagcagatgatttacaccgcaagaaatatcaaggctgacgaggctctgagaattggtcttgttaatgcggtttatactcaggaagagctgatgggagccgctgagaagatggctgccggaattgcaaagaatgcgcctattgctgtgagaaactgcaagaaagctatcaatgatggcctggatgccgatatggatgaggcgattgtaatcgaggagaagctgtttggcgattgcttcgagagttatgatcagaaagagggaatggctgctttcctggagaagaggaaagtggagaagtttcttaataaataaggaattgtaatccgtcactccgccgggtacaggggctgttgctccttgtaccccggctcaattataaaacacaaggaggctatacaacatgaaggttggtattattggtgcaggtacaatgggatccggtattgcgcaggcttttgcccagacagaaggatacgaagtatttttgtgcgacattaatgaagaatttgctgctaacggcaagaacagaattgcaaaggctctggagaagagagttgcaaaaggaaaaatggagcaggctgcggctgacgcaatcctcgctaaaatcactaccggtgtaaagaccatctgtacagactgtgatctggttgtggaagcagctctggaagttatggatatcaagaaacagacctttaaggaactgcaggatatctgcaagaaggattgtatcttcgctaccaacacttcttctctttccatcactgaaatcggcgcaggccttgacagacccgttatcggtatgcatttcttcaatcccgctcctgttatgaagctggttgaggttatcgcaggactgaatacacctgactgcgttgttgaaaaaatcaaagaggtttccgcagctatcggaaaaactcctgtacaggtaaatgaagcagcaggcttcgttgttaacagaatccttgttcccatgattaacgaagcaatcggtatttatgcagaaggcgttgcttccgtagaagatatcgataccgctatgaagctgggcgctaaccatcccatgggacctctggctctgggcgatatgattggcctggatatcgttctggctatcatggaggttctggaatctgaaacaggtgacccgaagtaccgtcctcacacactgcttaagaagatggttcgtggcggacagcttggacagaagaccggcaagggcttctatgattacagcaagtaaacagcccgcggttttcgcgattaataaagataaaacggaggagtaattaatcatggattttactttaagcaaagagcatgaaatggcaagaactcttttcagagaatttgcagaaaaagaagtaaagcctcttgcacaggaggttgatgaaacagaggagttccccagggaaaccgttgaaaaaatggctaagcttggcttctttggaatcccggttccgaaggaatacggcggacagggatgcgatcctttaacctatgctatgtgtgtggaagaactgtctaaggtctgcggcaccacaggcgttattgtatccgcacatacctctctttgctgtgaccctatcatgacctatggtacggaagagcagaagcagaaatatctggttccccttgcaaagggcgagaagctgggcgcattcggtctgaccgagcccggagccggtaccgatgcacagggacagcagacaaaggcttatctggatggagatgaatgggttcttaacggatccaagattttcatcaccaatggtaaagaagcggatgtttatgtaattttcgctgttaccagtgttgtagaagataaaagaggcagaaagaaaaaaatgatttctgcatttatcgtggaaaaaggaactcccggcttcacctttggtaccaaagagaagaagatgggtatccgcggttcttccacatatgagctgatcttcaccgactgcagaatccccaaggataatctgcttggcgcggaaggcaagggctttggtattgccatgcatactctggacggcggacgtatcggtatcgctgctcaggctcttggtcttgcggaaggagctcttgagcgtaccgttgaatacgtaaaagaaagaaaacagttcggcagagcaatcggcgctttccagaacacacagttccagcttgcagatatggataccaaggtagaatgtgctcagctgctggtttacaaggctgctatggcaaaagctacccagaaggtttattccgtggaagctgccaaggctaaactgtatgcggcagaggttgccatggaagttacaaccaaggcagttcagctgcacggcggttatggttatacaagagagtacgatgttgagcgcatgatgcgtgatgccaagattaccgagatctatgaaggaacaagcgaagttcagagaatggtaatctccggtgcactgttgaaataacaccgctgaggttaagagaatataagaaaacaaggagaggaatacaatgaaaattgttgtttgtattaagcaggtacctgatacaaagggcggcgttaaattcaatcccgatggtacgctggacagaggtgctatgcttacaatcatgaaccctgatgataaggcaggtctggaagctgcactgagactgaaggacgagtacggtgcagaagttaccgtaatcacaatgggtcttcccaaggcagaagaggttctgcgcgaagctatggcgatgggcgcagataacggtattctcgtaactgacagagtactgggcggcgctgatacatgggcaacctcccagacaattgccggagctatccgcaatctggaatatgatctgatcatcacaggccgtcaggctatcgatggtgataccgcacaggtaggacctcagatttccgaacatctgggaatcccggttgtctcctatgcacagaaaatcaaagtggaaggcgacagcgtaatcgttgagcgtcagttcgatgacagatatcatgtactgaaagcgaaaatgccctgcctgatcacagctctgggcgagctgaatgagccccgttacatgactcccggcggaattttcgatgcttacaagaaagaaatcaccgtatggggaagagcaaatctggttgatgtggacgattccaatctgggtctgaagggatcacccacacagattgccaaggcttccgataaagtaagaaagggcgcaggacagaaggtagttctggatactccggaagaatctgcatctttcattgttgaaaagttacaggaaaaacacgttatttaataataaacagaaaagtgtggtgaataaggatgaatttagaagaatataaaggagtatttgtctttgcacagcaggttgataacgtagtgagcggaatcgcatttgaactgattggcaaaggtaaagatctggcaaaagatttaggaactgaagtgactgcagtactggttggttctgatgtgaagggtcttgctgacgaactggctgcttatggagctgataaggtaatcgttgttgacgatcctgaattgaaagaatacagaacagagccctatgcacatgcactggcatctgtaatcgagaagtataaacctgaaattttcctggttggagctactgcaatcggccgtgacctgggccctcgtgtctccgcgagaatccatacaggtctgaccgcagactgtacacagctggatatcggtgatttcccgttaaatcctatccccggacaggagcagaagcacaatcagctgctgatgacccgtcccgcattcggcggcaatacgattgcaactatcgcatgcccgaatttccgtcctcagatggctactgtacgccccggcgttatgcagaaggctcctaaggtggaaggtgctaaggctgtagtggaagagttcaatcccggattcactccgaacaacaaatatgtggaaatcatggaagttgttaaatccgttgctgatacagcagatatcatggatgcaaagattctggtatccggcggacgtggagtatgcagccctgagaacttcaaaattcttcaggatctggcagatgcagtaggtggaaccgtaagctgttcccgtgcagttgttgatgcaggctggaagcctaaggatcttcaggttggacagaccggtaagactgttcgccctaatgtatattttgcaatcggtatttccggagctatccagcatctggctggtatggaagaatccgatctcatcatcgctatcaataaggatgaaacagctcctatctttgacgtagctgactacggcatcgtaggtgacctgaacaagattgttcctgtccttaccgaaaaaatcaaagaagcgaaagctgcaaaataa

SEQ ID NO: 1022 - DNA, 5528 bp, unidentified
  source 1..5528: mol_type = unassigned DNA
atgggaaccgttttcaataaaaaggagcttttggtcctcttgcaggattttcactgccttacggggctgcgctccgccgtttttgattcgtatggaatcgaagtgcttgcctatccgccggaactgccagcttattgccgcttgatccgcagtgtgcctgatggcaagaccggctgttacctgtgtgaccaggcggcttgccgcaaggcaacgcggcaaaaacagacgatcatctacccctgccatgcgggattgatcgaagtgatcacgccggtccaaatcgatggtgctgttgtgggctttttgctgttgagccacattgtacagggggccgatgagcagagcgagtggagctatgcgcaaaaatgctgctcggcttacgcaattgataaaacggcactgcaaaaagcctataataccttgccgcgcacgccctatccggtgctgaaatcagcagcggatctgctggctttggcggcggctgcattgtaccaaaaagggctgacgcggctggcagcgggcagtgcgcaggaaaagctgagccactacctggcggaacatctggatgagacattgacaaacgaaacgatctgccgtgatctttcgttaagccgtaccgggctgtactatctttcccggcagctctatggctgcggcatcaacgagcagatcacgcacctgcgcatccaaaaggcaatgaagcttctttgcgatacgaatctgtccaatgcacagatctgccagcagatcggattcctggatgacaattacttttatcgtgttttccgtaaacaaaccggtctgacaccacgccagtaccgtgattctatcttagcagatacagcaaagactgagtagagacgattgttttcaatactggattattgttcaaacaattctgagggaagcggcaatattgaattgtggccggtgacgtgctataataaacccacatacggtaagccggcacggcgcaattttgactgctgccttacggaaaattcgcagctgcggagtataaactgctatgaaaaaatataagatcgcggtggccgggaccggctatgtggggctttcgattgccacgctgctttcccagcaccatcatgtgacggcggtggatatcctgccggaaaaggtcgcattgatcaacgcgcgcaaatcgccgatccgggatgattacatcgagaaatatctggctgagaaggagctagatctgaccgctacgctggacgcaaaggcagcctacgccgatgcggactttgtggtcattgctgcacccaccaactacgacaaccaaacccagcactttgacacctctgcagtggaggcagtcatccgtcttgtcgcggaggtcaatccaaatgccgtcatggtcatcaaatcgacgattcccgtgggctacacggtgtcggtgcgggaaaggctcggcagccggaacatcctgttcagcccggaatttctgcgggagtccaaggccctgtatgacaacctctacccgtcccgcatcatcgtcggcaccgaccccgaagatgcgcaccttgttgcagccgcccacgagtttgcggcgctgctgcaggagggggccatcaaggagaacattgatacgctcttcatgggctttaccgaggccgaggccgtcaagctgttcgccaacacctatctggcgctgcgcgttgcctatttcaatgagctggatacctacgcggagagcaagggcctgaacacgaagcagatcattgacggcgtatgtcttgacccgcgcatcggcagccattacaataaccccagcttcggctacggcggctactgcctgcccaaggacacgaagcagctgctggcaaactacgccgatgtgccggaaaatcttatcgaggccattgtggagtccaaccgtacccgcaaggacttcatcgctgaccgcgtgttgaagctggccgggtactacggctacgatcaggaaaatgagtttgacgaaagccgcgaaaggcccgtcacgatcggcgtctaccgcctgacgatgaagagcaacagcgacaacttccgccaaagctcgattcagggcgtcatgaagcgcatcaaggccaagggcgcacaggtcatcatctatgagcctacgctggaggacggtaagaccttcttcggttcggcagtggtcaacgatctggacaaattcaagcggcagagtcgggccattctggccaaccgctacgatgcctgcctcgacgatgtgcaggacaaggtctacacaagagatctattcggcagagactgaaacgcctttctgccgctttttgacagtggagtaaggctctccatgccattaccgcacaatatccctgtgacttttaaagagaggaacatctgttatatgaaatatgattatctggtagtcggctccggtctgtacggtgccatcttcgcccatgaggccaaggtccacggcaaatccgtgctggtcgtggataagcgccccaacattgcgggcaacatttataccgagaacatcgagggtatcaacgtccataagtatggtgcgcacatcttccacaccaacaacaaaaaggtctggaactatatcacccggtttgccgagttcaaccgctttacaaactctcccgttgccaactataagggtgagctgtattcgctgcccttcaacatgtatacctttaataaaatgtggggcgttgtaacaccggaggaggcagccgccaaaattgaggagcagcgccgtgagatcacccacgagccgcagaacctcgaggagcaggccatctcccttgtaggccgcgacatttatgaaaaactcatcaagggctacaccgaaaagcagtggggccgcgactgcaaggacctgcctgcttttatcatcaagcgcctgcctgtgcggctgacctttgacaacaactatttcaacgcgctgtatcagggcattcccatcggcggctacaccaagatgatcgccaatcttctggacggcatcgaggtgcggctgaacaccgattacctcgaaaacaaggccgcgctggacgcactggctgacaaaatcgtctacaccggcccgattgacgcttattttgactacaaactcggcacgctggagtaccgctctgtccggtttgagaatgagctgctcgacaagcccagcttccagggcaacgccgccgtcaactatacggaccgcgagacgccatggacccgcatcatcgagcacaaatggttcgagttcggcaaggacgagaacggcaacgacctgcccaaaacgatcatcagccgcgagtattcctctgagtggaagcccggtgacgagccgtattaccccgtcaacgatgctaaaaacggcgcactgtatgccgagtacaagaagctggccgacgccgagccgaaggtcatcttcggcggacgcctgggtgagtacaagtattacgacatggatcaggttatcgccgccgttctggaccgctgcgaaagcgagctgcactaaagtacagccaagcgaaggcacaaaatccaaaaggcagcaaagcagaccccaaaagctaaaatcggggtttactttgctgcccttttttatttgctcaatccgctggcaccgcttgccacaacgccgccgtccataagaatgtctgctccggtcagaaagcccagccgctcatccagaagaagcgcaaacaaagcggcgatttcttcaggctttccgttgcgcttgagggcggagtattttttgaatacatccgcctgcccgctttccagtgcgcccatcggcgtgtcaaagttgccgggggtcacgcttaagcagcgcacatttttcccgccaaagcgtgcggcatcggtcttggcaaaccaaattacaaaatgcttgctgatggcgtaggccagacccgggcgggcgtccttaggggcaatgcctgcccgcgccaccagctttttgatgaatttttcacggtcggtgcgcgccagcttgtacgcacccttgggcatgacaaactgcggggcaaggtaggcgctcatgctggaggtgtcgatcacacagccgcccggtgccatgacctcataaaaggcatcgttgatattcaccgtgcccagcgcattgccgcgaagaattttctctgcatcgcccatgtgagggctgagacccgcaatgtgcaataccgcttttacttcgccgcattcggcggcgtgtttggccagcgcaaagcagctttcacggtcggaaacatcacagctgaacgcctcagcctcgccgcctgcactgcgcagatcgttgactgccttttccagcttggacgccgtgcgccccaccaaaatcgtgtaatatccttcttcacagacgagcttcgccgtggcaagccccatgccgctgccgccgcctgtgataacacaaaccttcttcataataggcacccccttttctttgtgtcagtgcagggaatccagtgcgtggagatagcactcccactgctggtcattcatttgcataagcttgcagatagattcatacagcttcttcatgcgatttttccctcctgcttgagccatacagcgagatcatgcagtgtttccttgtagggacgcggggcaaagccaagctcgtttttcgctttggagcagtcaaaatggttgttgcgctccagattgtaaacggcaaactcggtcagcacagcaggcttaccggtcttggcggcgcgggcctccatctgcttggcggcaaaatgcgcaaaagacagcggcagataaaacaggcagccgcggcagccggtatcagccttgagcatctcacacagctccttcagcgaaacctcgtcattggaaaggatgtagcactctcccttgcgcccacggtcagcggcggcaatcgtgccggcggccagatcgcgcacatcgacaaggttgaacgagccctgcataccgatgggcatctcaccgttcaaaatctggatcagcgtgcgggtcgtctgcccgatggcggggtcgtttgggccaagaataccgctgggatgcaccacgcaggcattcagcccgtccgcggcggcgtccagtaccttctgggtcgccattgccttgctgcggctgtaccagccgaccacgcgatcatcatcgtagggaacaaagctgtatacctcatggatgctctcgcccttaggcagctcggggatggcgccggtgctggaaacatagacgaactttttgcactccgggtgatttttggcggcattcagcatattttcggtgccgcccacattgacggcgatgagtttttcactgtaattcgggttgatcgtcaccatgctcgcgcagtggatgcagacagtctggacgcccggttccacggcaaagaatttctcgcagtcctcggcactgcagaggtcaccctcaaaaatttcgacggccttcggcataaattttacagcggggtcgcccttcagcacaaaagcgcgcacggcatcaccgcgatccaaaagctgtgcgcagacattagtgcccataaatccggcagcaccggtgacaagatagatggttttcat

SEQ ID NO: 1023 - DNA, 13378 bp, unidentified
  source 1..13378: mol_type = unassigned DNA
atggaagaagcattaattcaatataggaacgtagaaatccatcaacaggaactctgtgtgctgagcgatgtaaatctggaattgcgcaaaggagagttcgtctatctgatcgggaaggtaggttcgggaaaaacgagcctgctcaaaacactgtatggcgaactggacgtgatcgacggtgaagcggaagtattgggctataatatgcgttcaatcaaacgcaagcatatccctcagctgagaagaaagctgggaatcgtatttcaggactttcagctgctgacggatcgtaccgtatacaacaacctggaatttgtacttcgtgccaccggctggaagaacaagcgggaaattcaggaaaggatagaggaagtgctcgatttggtgggaatgtctaacaaaggctacaaactccccaatgaactttccggtggcgaacagcagcgcatcgtaatagcacgtgccgtactcaattctccggctattattctggcggacgaaccgaccggaaatctggatgtggagacaggtaagtccattgttgaattgttgcacaacatctgtgaatcgggttcttccgtggtgatgacgacgcacaatctgcaattgctgaaagaatatcccggcagcgtatatcgttgctccgagcatcgcataacggatgtgaccgacgaatacatgcccaggcagagaacaatagaaatagatttaaatatagataactaaaacagtaacgaaaatgaaagttttaaagtttggaggaacttccgtaggttctgctcagcgcatgaaggaagtagccaaattgattaccgatggtgaacagaagattgttgtcctttcagctatgtcaggtacaacaaacacattggtggaaatttcggactatctgtataagaagaatccggagggtgccaacgagattatcaataagctggaatcaaaatataaacagcacgttgatgaactttatgcaactcaggaatataaacagaaagggctggaagtcatcaagtctcactttgactacatccgctcctatactaaagaccttttcactttgttcgaagagaaagtggttttggcacagggagagcttatttctacggctatggtgaacttctacctgcaggaatgtggtgtgaagtccgtgttgctcccggctttggaattcatgcgtactgacaagaacgcggagccggaccccgtatatattaaggagaaactgcagacacaactggaactttatccggatatggagatttacatcacacaaggttttatctgccgcaatgcttacggtgagatcgataacctgcagcgtggtggcagcgattacaccgcttctttgatcggtgctgccgtgaatgcttctgaaatccagatatggacagatatcgacggtatgcacaacaacgacccgcgcattgttgacaagacagctccggttcgccagttgcattttgaagaagctgccgagttggcttacttcggtgcaaaaatcctgcatccgacttgcatccagcctgctaaatatgccaacatccctgtacgtctgttgaatacaatggacccggatgcgcccggaacgttgatttccaatgacacggagaaaggcaagatcaaagctgtagctgctaagaataacattacggctatcaagatcaagtcaagccgtatgttgctggctcacggtttcctgcgtaaagtcttcgaaatttttgaaagctaccagacttccatcgacatgatctgtacttctgaggtaggtgtatctgttacgatagacaacaccaagcacctgaatgagattctggacgacctgaaaaaatacggtacggtcactgtagacaaagatatgtgtattatctgtgtagtaggcgacttggaatgggagaatgtaggttttgaagcaaaagcacttgatgcgatgcgtgatataccggtacgaatgatttcattcggaggaagtaactacaacatctctttccttatccgggaatgtgataagaagatagcgttacagtcgctgagtgacatgcttttcaacaacaaataattccacaaataatactgagcgcttttaccgatactgataaaagcgctctttttaactaactaaacaagtttcttgaatgatgaaaggaatatttccaatcgataaattccgtactttgcagacacctttctattattatgatacgaaagtgctgcgtgatacattgtcggctattaaccaagaggttgccaaatatcctagctattccgtacactatgctgtcaaggcaaatgccaatccgaaagtaatgaccattatccgtgaaagcggaatgggagccgactgcgtgagcggtggagaaatacgtgccgctatccgtgccgggtttccggccaataaggttgtttttgccggagtcggtaaagcagactgggagatcaacctcggactggagtatggcatcttctgtttcaatgtagagtctattcccgaactggaagtcatcaatgaactggctgcggcacagaataagattgctaatgtcgctttccgcatcaatccggatgtaggagcacatacgcatgctaatatcactaccggtctggctgaaaacaaattcggtatcagtatgcaggatatggacaaggtgatcgatgtcgccttggagatgaagaacgtgaaattcatcggcctgcacttccatatcggttctcagatattggatatgggcgattttatcgcgctctgcaaccgtgtgaatgaattgcaggataaactggaagcgcgtcatattctggtagaacacatcaatgtcggcggtggcttgggtattgactacggacatccgaaccgtcagtccattcccgatttcaagagctactttgctacctatgccggacaactgaaactgcgcccttatcagacactgcacttcgaactgggacgtgcggtggtaggacaatgcggttctctgatatccaaagtactgtatgtaaagcagggaaccaagaagaaattcgccatcctcgatgcaggtatgacagacttgattcgtccggctttgtatcaggcttaccacaagatggaaaacattacttcggaagaccccgtagaggcatatgatgtagtaggccccatctgtgaatcatcagacgttttcggtaaagcgattgatttgaataaggtaaagcgcggagacttgattgcacttcgttctgcaggggcttacggcgagattatggcatccggatataactgccgtgaactgccgaaaggatacacttctgacgaattggtgtaaataaaatgtgaatgtagtttaaaaatacagggaggatggaacaattttaactgaaatcttgttatttttgtaatgagttcaaaagaaaactacattaacaacttaataaaaatatacgattatgatttcagaaaaattacagaaagcaatcaatgagcagatcactgcggaaatgtggtcttctaacctgtatttagcaatgtctttctattttgagaaagaaggtttcagtggatttgcacattggatgaagaagcagtctcatgaagaactggaacatgcttacgcaatggccgattatatcattaaacgtggtggaatggccaaagtcgacaagatcgatgtggttcctaacggctggggtactccgctggaagtgtttgagcatgtttacaaacatgaatgccatgtatcggaaatggtagacaagctggtagatgtggctgctgctgaaaaagataaagctactcaggatttcttgtggggatttgttcgcgaacaagtagaagaagaagctaccgcacagggaattgtggataagatcaagaaagccggtgatactggtattttctttgttgattcacagctgggacaacgttgatggcaatctgaaaaatagaaaataagataggagaagctgtttggatttatattcagacagcttcttttttttaacttactttgctcatatttaaaaatctgttatctttgcccactgcaatgagttattctgcacacaaaggatcattcatttgctacagtctaatttggagtatatgatcagatttttatggctcctgatgatgtttagctgtttggcagccgcatcttttggacaagcaactacttcctctatgagcggaagagttgaggacgaacaaaacgaaccgttaccgggtactactgtaattgcaatacacgaaccgtccggaacacgctatggtacagtgactaacctgcagggaacttaccatttggaaggtatgcgcaccggcgggccatatcggattgaattttcgtatgtcggctatcggacagctatttttaccggcatatctctgaaacttgccgaaacctatgtctgtgatgccaaattgaaagaatctgccgaactggatgaagtattcgttataggcacggcttctaaatttgccggagaaaaaaccggagcatctacccatattacatcaaaagatatttctcgtctccctaatatttctcgtggtctgacggccatcaccaagatgtctccttacgctactaaaaatggctttggggggcgtgaccaacgtatgaacaactacacgattgacggagcgaacttcaattacagtgcgggactggatggtgctgttttgcccggaggcggaaatccgatttcaattgatgcgctggaagagatacaggtgagtatcgctccttttgatatacgtcagagcaattttgtcggaggttcggtaaacgcggtgacaaagagcggaacaaatcggtttcgtggttccgcctatatgtacacaaagaatgaatatctgcgtgggaacaaggtagacggttatgacctcggcgaccgggaggaagagcggcgtaatgtatatggatttactttcggcggaccggttataaagaataagctattcttttttgtgaatggagaatatgaatatagtccgcagcccatccataaatggaaactgtccgatgacggtaaggacgatagccagaatatgatttcacgtgtgacggcggaagacatgagccgtttttcgcaggatctgaagaacttgtatggatatgataccggttcgtggacagattttgccggacgtacggatgtgtatcgtgtcatggcacgtatggactggaacataactgacaaacaccgtttcatgctacgttataactataccggacagaaaaaagataataatctggtaggatcggcgttgagcattaatggcggaccggtcagccgctattcgatgtctttccgtaattccacctggcagcaattggataatgtgaattcgctgactgcagagttgaatagccgtttgagtgctgctttgacccatcagcttttggtgagtctgacttttaatgatggaaacaaaagagaatgtaagggcgattttcctacggtcgatatcatgaaacccgatgaaacggggacaaaccgtgcatttatgaatgcaggatacgagcagcatgcgtggaaaaacggaatccgtgaaaaggtttggagcattacagataacttttccgttcattggggaaaccatagtctgacattaggggcaagttttgaatcgcagaacgtttcaaatagctatatgcgctacggagcagggtattaccgttacaacagttacgaggacttcgtgaataaggcggctcctgtagcctttgctctctgttattctttaacgggagacgcagaagctccggcttccgttcattatgatcagttttcgctgtatgcgcaagatcaatataacgtgaatgaacggcttaaactgctttatggtatccgcatggatattccgctttatgtcaacaagcgatatgagaatccttccatcacctcttacgaattttatggtacgaagctgagtaccgcttactggccgaaggcgactccgctgttttcgccgcgtattggcttcaattacgatttatcaggtgatcagacactgaaacttcgaggaggaacgggaatctttaccggacgcttcccattaattttcctgtcgaagatgcaggaaggaagcggtatgctgaagacgaccgtctcggtacttcagaatacaaacgatcctcgtgagaaagagctgttggcggctttggcaggcggtattcgtaatcctcagcagatcttgtcggagattgcccctcagtatccggattgtttccccacagaaccgggagcagtaaatgagatcataacgattgaccgccactttaagactccgcaggtatggacaacttctctggcactggactatcgtttgccatttcctttccggtccgatttgacgttggaggctatgtatatcaaggatatcaatgccattctgcaacagaacgtgaacatgattgctctggatgactccaagatgtcccgcctgtccggtgctgacgatcgctatatttatccgggaaataaggacaaccgcatcaatgcggatatcacccgtgccatgctgatgacgaatacaagcaaaggacatagctatacgctgaacgccactatgaatatggagccggtccgaaatctgaatctgatggtatcctatacttatacccgttcccgcacgttgtcgaataacgcgagcaaccagatcgaaaatgcgtggcaacaggaaccttccgtgcagggagccaactatctgtccatgcacaatgcttcttatctggactccccccaccgtgtcattgcatctgcatcctataccatcgaatacgcccgaaactttgccaccggcatttctctgttttataccgggcagtataatggttcttatacctatctgattgatggagacctgaataacgacggctctcaatatgacctgatgtatataccggctacccgtgatgaactgaattttaccgacttgaagaaaacagacggaaccgtgctgtttccggcggctgagcagagagaggctttctgggcttttgtggagcaagatccgtatctgagaaaacgaaagggaaaatatgcggagacaaacggagcgtttcgaccttggtatcaccgttttgatttgcgtgtggtacaggactttaaggtgaaggcgggaaagactacaaatacccttcaactgagtgtggatataatgaatatcggaaatttgctgaatgatgcctggggagtacccaaaggttctactatcaacaaaccgctgcaatataagggcttgaatgaaaagaatgaaccgatatataccatgggtacattgacagaagacggagagacaatattgccttaccgtagttttgctcccgttcgttcctctgtcaattgttggcagttgcaatttggaatccgttacatctttaattgaaaggataatctttagatgaataatgaaaatagaaaaataatcttcctgtttcctttactgatctatttaatttcagcactggtcggttgtacctcttcccaagagcggcgtatactggttgttcattcttatgaagaaacgtacactgcttatcccgagtttaatcgtctgatagctaaacaattcaagaaagaaggagtcaatgctgatattcggacgctctatctggattgtgaatcctataaggaagagacggaactgaagcgaatgagatatttgcttgattctgtatccggagactggcgaccggaagtgattctggtgaatgaagatcaggcgacttactctcttctgaagtgtggtgatccgctagtgaaagaggtgccggtggtctttgccggagtcaattatccgaattgggagttgttgaagcaatatcccaatgcgacgggctttcatgataagatcggctttgttcaaaatgctgaaatggccagaaaactctttggggatagtgtccgtctgtttacacttctggattctacttttctggatgtgcagataagaaaggacgcgaggaagcaattggcaggacatagagtaacaggtttcatggattatcccgacattccttctgtggaacagtatcggctggtaagggaagagggatatattcgttttctttccatttctatacgtagcaaccgggacaagtctgaagccaatctgatgtgggcgttgaataagaactatcgggggcaatgctatattcagttgaagcgggattttacgaccatcaatattggggccatctgtgtgagtcccagtctgactgtgatcaatgagggttttgaatgtggagagaaactgcttggaggatatctgacttcgttgccggttcaggtagaagaggaggtaagagctgctgtacatatattgaatggagcttcatcgtcggatatgccggtgactgagagcaagaaggaatacctggttgactggaatgtgatgaaacagttggggataaagaaggagaagattcctgctaattataagattgtcaatattccctttagtaaggaatatccatatttttatatttcttccatcgtgtctttggctggattgttgtttgccattgttacctgtttgttgtggctctatcttcgtgagcagaaaaggaaaaagcaggcactttatgcattggcagacgaaaaggaaactctggcattggctattgagggaggaaccacttacgcatggaaattggaagacgagttctttgtctttgaagatgccttttggagatcacaaggtatgtctccccgcaaattgccttttacggacttggggaagtttgtacaccccggccattgggacagtgtaaagcttagccggagaaacctgaaagaagcaagtaaaaagatagttcagctacgctgcgattttagcggaagaggatatcagtggtgggagtttcgctatacgactaatctgctggaaggagggggatacaagaccgccggacttttgctcaacatacaagagatgaaggatcgggaagaagaactggacgctgcccgtttgctggcagaaaaggcggaactgaaacaatcctttctggcgaatatgagccatgagatacgtacaccgctaaattcaatcgtaggtttttccaatattctggctagcgatgaagaattaagttcggaagataaacaggagtatattgacaccattaataagaatagcgatttgctgctcaaactggttaatgacattctggaactttcccgcatcgagtccggatatatgtctttctgctataagaaatgtatagtgaaggaactgcttaatgacgtctatatgactcaccaagtgttgattgcaccccgtcttgattttcagaaagaggaagaagatatatgtctggaaattgatgttgacagagagcggctgatacaggtccttacgaactttctgaataatgcgaccaagtttacggaaagtggatttatcaaaatcggctactactatatggaggaagaagaggcagtgcacatttatgtagaagataccggcagaggcattccccgtgaagaacagcagatgattttcagccgcttctacaagcagaatgaattttcgcagggagccggactgggactgtctatttgcaaagtgattgtggaaaagctgggtggcaagataacccttcaatcggaagcgggcaaaggaagccgattcacggtcattataccttgccgggtcatatcatgacgtatcgcgtaaaatgagtcgtaccgacgtataataaatatgtaatattcaaaacatagctctccggaaatgggcagagctatttctttttccctttctccatagttcccagatagatttccagtgaacgggtagaaatctgtatttcacggaaagatactcctaaagaagcgatcaacagaatcaaagccagcccgaacacatacgccgacagtaattgcagtccgatgtagatgaggaacatgctgactacacagaaaaaaagacttgcaatgcccagcccctgcatcgttcgtgtcaggtttaagcgttttcttaaattctcgatttgtgctaccgtgatatccgtaggattttccatgtaacggtcccgcaactgtcgtaccaattgtgcatacgataaaaaacggttggtataagccagtaaaatcagcgaaacagccgagaaaagcagggcaggagtagtgagagtcaattcttccatcttgaaaacaaattagtaagtattaggtattaaagtattaagtatcaagtattaggtattatgctatgcagataaacgatcggcagctacggtaatacctaatacttaatacctgatacttattatttaagcactccgagttctttgccgactttgatgaaggcagcgatacatttgtcgaggtgtgctttctcgtgtccggcggagatctgtacgcggatacgagcctgttctttcggaacgaccggataatagaatccagtcacataaatcccttcttcctgcatgcgtgcagcataaatctgcgacagtttggcatcatacaacataacggcgcagattgcactctgtgtcggtttgatgtcgaatccggcggctgtcatctggtcgcggaagtagtttacattctctacaagcttgtcatgcagcgcattgctttctttcagcatcttgaatacttcgagacttgcaccgatgatacccggagccaatgagttggagaacaggtaaggacggctgcgctgacgcagtaagtcgataatctccttgcgaccggtagtgaatccgcccaatgcacctccgaaagctttgcccagtgtgcctgtatagatgtccacacgtccgtgagttttgtacagttcgctgacgccgtggcctgtagcgccaaccacaccggcagagtgcgattcgtctaccataaccagcgcatcgtacttctcggcaagatcacaaatctgatccatcggcgctacgttgccgtccatagaaaatacaccgtcggtgacaacgatacggaaacgttgcgcctgagcctcttgcaggcatctttccaggtccttcatatccgcattggcataacgataacgtttcgccttgcaaagacgtacaccgtcgatgatagaagcgtggttcagagaatcggagataatggcatcctcttcgctgaaaagcggttcgaatacacccccgttggcatcgaagcaagctgcgtacagaatcgtatcttctgtctggaaataatccgagatggcagcttccagttccttatgtatatcttgcgttccgcagatgaagcggacagatgacataccatatccgcggcggtccatcatttcctgagaagctttgatcaggcgggggtggttggacagtcccagatagttgttggcgcagaagttcagcacttctttgccttttacagtgatggcagcttgctgcgcactttcgataagtcgttcttctttgtaaagtccggcttccttaatttcagccagtgtctggctgagatattcctgcattttaccgtacatagtgtttgagtgattaagttatactgcaaaggacacgatttttcttggaataaacaatatctttttgatttaaatctgaaaaaaaagtgcttactttgcgcactatttagcttaacacttttatttaaaaggaaaaatgaaacacattttgattattggagccaccggacaaatagggtccgagttgacgatggagttgcgcaggcgttatggaaacacaaacgtagtagcgggttatattcagggcgcagagcccaaaggcgagttaaaggagtcgggaccgtcggctgttgtcgatgtaacgaatggtgaaatgattgaatcggtggtgaaagaacaccacatagatacaatatataatttggctgcactgctttcggtggtagccgagtccaagccgaagctggcctggaagattggtattgacggattgtggaatgttttggaagtggcgcgtgagcagggatgtgcggtatttacccccagttctatcggatcgttcggtgcaagcacgcctcatacactgacaccacaggataccgttcagcgtcctcgcaccatgtatggtgtcaccaaggtgacgacagagctgctgagtgactactattttaacaaatacggtgtcgatacccgtgctgtccgtttcccgggcatcatttcgaatgtgacccctccgggaggaggaactaccgattatgccgtagatatttattattcggcagtgaaaggagaaaaatttgtgtgcccgatcaaagaaggcactttaatggatatgatgtatatgccggacgcgctgaacgcagcaatcatgctgatggaagcagatccgaccaggctgatacaccgcaacgctttcaatatcgcctctatgagtttcgaccctgagacgatataccatgccatcaagaagcatgtgcctgcgttcgaaatggtctatgacatagatcctttgaaacagcgcatagccgacagctggcccgatagtctggacgatacctgcgcccgtgaggagtggggatggaagccggcttacgatttggagagcatgacggtggatatgcttgaaaagctaagagagaaactgaaaaaatgaaaaaacttattgcgggggtactggtgctcagtgttctgggttcctgtggaaacaagaaaacgagcatcgacccctttgcatctatcacacatgaggtggattctatccggcataaagccgattcaatccatcaggaggagttgccggaagaacctaaaccgacagaagcggacgaatctttcgacgatttcatctacaattttgcttccgatgatgctttgcagcgtcagcgtgtgaaattcccgttgccctattacaagggagacgagaagaccaatatcgaagagcgcaactggaagcatgatgacttatttaccaaacagcattattatacgctcctgtttgataaggaagaagatatggatctggtgggggatacctcgctgacctccgttcaggtagaatggatattcgtgaaaacccgaatggtgaaaaagtattattttgagcgtatcaagggggcatggattttagaggctatcaatctgcgtcctattgagcggaatgagaatgaggactttgtggagttcttcagccattttgctgccgacagcctttttcagagccaacgtgtgcaggaccctttggcttttgtcacctcagatccggatgatgacttctctattctggagacctctctggatttgaaccagtggttcgccttcaaaccggcactgcctgcagaccgtctctcgaatatcaattacggacagcggaatgatgataactcgccgacaaagattctcgcattgaaaggaattggaaacggcttctctaatattctctacttcaagcggaaggcaggcgaatggcagctgtataagtttgaagataccagtatttag

SEQ ID NO: 1024 - DNA, 19125 bp, unidentified
  source 1..19125: mol_type = unassigned DNA
  misc_difference 22: note = a, c, g, or t
  misc_difference 23: note = a, c, g, or t
  misc_difference 24: note = a, c, g, or t
  misc_difference 25: note = a, c, g, or t
  misc_difference 26: note = a, c, g, or t
  misc_difference 27: note = a, c, g, or t
  misc_difference 28: note = a, c, g, or t
  misc_difference 29: note = a, c, g, or t
  misc_difference 30: note = a, c, g, or t
  misc_difference 31: note = a, c, g, or t
  misc_difference 32: note = a, c, g, or t
  misc_difference 33: note = a, c, g, or t
  misc_difference 34: note = a, c, g, or t
  misc_difference 35: note = a, c, g, or t
  misc_difference 36: note = a, c, g, or t
  misc_difference 37: note = a, c, g, or t
  misc_difference 38: note = a, c, g, or t
  misc_difference 39: note = a, c, g, or t
  misc_difference 40: note = a, c, g, or t
  misc_difference 41: note = a, c, g, or t
  misc_difference 42: note = a, c, g, or t
  misc_difference 43: note = a, c, g, or t
  misc_difference 44: note = a, c, g, or t
  misc_difference 45: note = a, c, g, or t
  misc_difference 46: note = a, c, g, or t
  misc_difference 47: note = a, c, g, or t
  misc_difference 48: note = a, c, g, or t
  misc_difference 49: note = a, c, g, or t
  misc_difference 50: note = a, c, g, or t
  misc_difference 51: note = a, c, g, or t
  misc_difference 52: note = a, c, g, or t
  misc_difference 53: note = a, c, g, or t
  misc_difference 54: note = a, c, g, or t
  misc_difference 55: note = a, c, g, or t
  misc_difference 56: note = a, c, g, or t
  misc_difference 57: note = a, c, g, or t
  misc_difference 58: note = a, c, g, or t
  misc_difference 59: note = a, c, g, or t
  misc_difference 60: note = a, c, g, or t
  misc_difference 61: note = a, c, g, or t
  misc_difference 62: note = a, c, g, or t
  misc_difference 63: note = a, c, g, or t
  misc_difference 64: note = a, c, g, or t
  misc_difference 65: note = a, c, g, or t
  misc_difference 66: note = a, c, g, or t
  misc_difference 67: note = a, c, g, or t
  misc_difference 68: note = a, c, g, or t
  misc_difference 69: note = a, c, g, or t
  misc_difference 70: note = a, c, g, or t
  misc_difference 71: note = a, c, g, or t
  misc_difference 72: note = a, c, g, or t
  misc_difference 73: note = a, c, g, or t
  misc_difference 74: note = a, c, g, or t
  misc_difference 75: note = a, c, g, or t
  misc_difference 76: note = a, c, g, or t
  misc_difference 77: note = a, c, g, or t
  misc_difference 78: note = a, c, g, or t
  misc_difference 79: note = a, c, g, or t
  misc_difference 80: note = a, c, g, or t
  misc_difference 81: note = a, c, g, or t
  misc_difference 82: note = a, c, g, or t
  misc_difference 83: note = a, c, g, or t
  misc_difference 84: note = a, c, g, or t
  misc_difference 85: note = a, c, g, or t
  misc_difference 86: note = a, c, g, or t
  misc_difference 87: note = a, c, g, or t
  misc_difference 88: note = a, c, g, or t
  misc_difference 89: note = a, c, g, or t
  misc_difference 90: note = a, c, g, or t
  misc_difference 91: note = a, c, g, or t
  misc_difference 92: note = a, c, g, or t
  misc_difference 93: note = a, c, g, or t
  misc_difference 94: note = a, c, g, or t
  misc_difference 95: note = a, c, g, or t
  misc_difference 96: note = a, c, g, or t
  misc_difference 97: note = a, c, g, or t
  misc_difference 98: note = a, c, g, or t
  misc_difference 99: note = a, c, g, or t
  misc_difference 100: note = a, c, g, or t
  misc_difference 101: note = a, c, g, or t
  misc_difference 102: note = a, c, g, or t
  misc_difference 103: note = a, c, g, or t
  misc_difference 104: note = a, c, g, or t
  misc_difference 105: note = a, c, g, or t
  misc_difference 106: note = a, c, g, or t
  misc_difference 107: note = a, c, g, or t
  misc_difference 108: note = a, c, g, or t
  misc_difference 109: note = a, c, g, or t
  misc_difference 110: note = a, c, g, or t
  misc_difference 111: note = a, c, g, or t
  misc_difference 112: note = a, c, g, or t
  misc_difference 113: note = a, c, g, or t
  misc_difference 114: note = a, c, g, or t
  misc_difference 115: note = a, c, g, or t
  misc_difference 116: note = a, c, g, or t
  misc_difference 117: note = a, c, g, or t
  misc_difference 118: note = a, c, g, or t
  misc_difference 119: note = a, c, g, or t
  misc_difference 120: note = a, c, g, or t
  misc_difference 121: note = a, c, g, or t
atgaggaagagtacaccggagnnnnnnnnnnnnnnnnnnnnnnnnnnnnnnnnnnnnnnnnnnnnnnnnnnnnnnnnnnnnnnnnnnnnnnnnnnnnnnnnnnnnnnnnnnnnnnnnnnnnaagaagacggtgaggagtactacgccgatgaggaagagtacaccggagaagaagacggtgaggagtactacgccgatgaggaagagtacaccggagaagaagatggtgaggagtactacgccgatgaggaagggtacaccggagaagaagacggcgaagagtactatgccgatgaggaagagtacaccggagaagaagacggtgaggagtactatgccgatgacgtggagtacatcgaagagagtgacgatgaagagtattatgccgacgaggattacgaggaagagccggctcccacgggcaggagaaagaccgggggcaaaaagcagggcggaatcgctgtaatctggacaaaattcctgaacctgagtaccatggaccggatcatggcagctaccggagtggcggtactgattctggctatcgtgaccggaagtgtctatgccagtgcccgggcagtggatggacaggtatcggagttcgtcagcgtgggaacacagctggacggcatccagatgatcggtgagcagggacttctggcagtggcagacgcacagatggcaaagatcgcggcagccaatgcagtagaagaggatacagaagaacagaaagaatatgaagaggcagagtacaccaacggcggtacggtagaactggagctggtctctgtacagaaggatctgaagatcaaattcaacaataaaaagaccggcaagctgatctccaatgtacccttcagcgtaaccatcacagatccaaacggcaagaccgagacctggaccgatgacgatatggacggtattatctataaaaagggtattacgccggggaattattccgtagcggtaaacgcactgacggatgataaatacaaggactatgttctgccgacagcagcacagaaagtagaagtaaagaaagacatcgcctataaaaaggtcgatgtctccaatgagatcaagaaagaatctgagatcaatgctgcaaaagaggatacacagatcaaggatactactgtagagtccacactgcaggatactgtgcagtgggtggcaagtaccgcgactgccaatacttataaagaagtatccaaggataccattaccgatccggagaccgtaacggtggcttacagcggtaagttcctgcggatggcagaagtgtctcctacagcagaaccaacagcggaaccgacagcagaacctacaacagagcccacagcagaacctacaaaagaaccgacagtatccccgactgcagagcccacagcgactccgacagtacccccgacggcaacagcaaccccgacagcggcccctacggcaaccccgacagcggcccctacggcaaccccgacagtggcccctacggcaactcctacagcgactcctacggcaacccctacggcaactccggcggcgacaattactctggataagacggcagtgacgacttatccgaaggcaacggatacagttaccgcaaaagtcagcggaagtggaaccgtaagtgcggcttccagcgataccggtatagcaactgtggctgtaagcggcaagaccattactatcaccggcgtgaaagcgggaagtgctacggtaacggtaacgtatacagaaggcagcaacaaggtggaagccaagtgcacagtaacagtaaaggcttccaatgcaagagaagataaaaccaccaagctgaaagacaagagcggtgtacagctgtatgtgcaggatggtgacagctatcgtgaagcagtctatgcggattactttactgcctctaagttctttatcaaaggtgatgtgaaatacaccggatggcagacactggacggaaagctttatttctttacagcggatggcaacaaggttaccggagaacaggtcattcagggcgcaaaatacaattttgccagtgacggatctctggtagttggttccggcaccatgggaatcgatgtgtccaagtggaatgggaaaattgactggaacgccgtgaagaattccggtgtcagctacgtgatcatccgtgtgggttatcgcggttcctctcagggagcactgatcgatgaccctaccttcaagaccaacatcaagggagctacggcagcaggactgaaagtgggtgtatacttctttacccaggcagtggatgaggtcgaggcagtacaggaagcctccatggtactggaccgtatcagcggttacaagatttcctatccggtattcctggatgtggaaggaagcggcggaagaggtgataagatcgattccgctaccagaacggcagtatgtaaggcattctgcaataccattcagaatgcaggatacaccgcaggtgtgtatgccaacaagacctggctcagccagaagatggatgcaagtgcactgagtggctacaagatctggctggcccagtatgcagcagcacccacctacaccggacgctatgatctgtggcaatacaaatccacaggaaaagtcagcggcatcagcggcaatgtggatctgaacctcagctacctgggatattaacatcagcaatgaccagccggtgagactgcttgcaggcggaaccggctggccattagctgatgaaacacacatgagcatgtaggacgatagtccggaatgcgaatgggtgtcacggatccgagagcacgaagtgcggaggagccgtgttaatacccggcgctaagaatggcgatagcccggaatgcgaatgtgtgtcacggatccgagagcacgaagtgcggaggagccgtgttaatacccggcgctaagaatggcgatagcccggaatgcgaatgtgtgtcacggatccgagagcacgaagtgcggaggagccgtgttgatatcctgctcgttttatggtaaaatatccctatctataacaaaaaatgtgcgctgtgcgcagaacggagaaaaaatgagaacttatctggtaacaggaggggccggttttatcggttccaactatattcattacatgtttaaaaaatacgataatgaaatccgtatcatcaacgtggatgcactgacctatgcaggcaatcttgagaatctcaaggacgtggagaagcgtgagaactacacctttgtcaaggctaatatctgtgacaaggatgccatcagcaaaattttcgcagagaatgatatcgaccgtgtggtacattttgcggcagaaagccatgtagacagaagtatccgcaacccggagatcttcgtacagaccaatgtcctgggtactgcagtgatgctgaactgcgccaaggcagcctgggagcttcccgatggcagcttcaaagaaggcaagaagttcctgcatgtatctacagatgaggtctacggatctcttcccgatgatgacaatgcattcttctatgagaccactccgtatgatccccacagcccttactccgcaagtaaggcaagctcggacatgctggtgaaggcatatatggatacctatcatttccctgccaacattaccaactgctccaacaattacggtcctttccagttccctgagaagctgatccctctgattatcaataatgcattgcatggcaaaaagcttccggtctacggtgacggtaagaacgtccgtgactggctgtatgtggaagaccatgctaaggctatcgatatggtacaggaacagggaagactgttcgaaacctacaatgtgggcggacataatgagaagcagaatatcgagatcatccacattatcattgagactctgcaggagatgcttccggattccgatccccgcaaggcacatattaacaacgacctgatcacttacgtggaggatcgtaagggacatgacagaagatatgccattgcaccggacaagatcaaggcagagatcggctggtatcccgagaccatgttcaaggaaggcatccgcaagaccatcgcctggtacttcgagcatgaagactggatgaataatgtgaccagcggtgattaccagaagtactacaatgagatgtacgaagaaaagtaaagaatacctgttaaatgggaacgatgaacgtcgttcccattcggtgtgttaaaaaacaagtaaaaagaagcccgaaaagggcggatcggaggacgaaatgaaaggaattatactggcgggaggttccggaaccagactgtatcccctgacaaaagcgatttccaagcagatcatgccggtgtacgataaacccatgatctattatcccctgtcaacactgatgctggcagatatcagagaggtattgatcatctccaccccaagagaccttccggtatttcaggaattgctgggagacggcagccagctgggcatgcacctggaatatgcggtgcaggatcagccccgcgggctggcagatgcctttatcatcggtgcggatttcatcggtaatgacagagtggcactggtactgggagataatattttctacggacagagcttttccgcagtattgcgcagagtagctgccagagaaaagggcgcaactattttcggctattatgtgcgtgatcccagagaatacggtgtagtggaatttgatgagaacggcaaggcactttccatcgaggagaagccggagcatcccaagagcaattatgcggttcccggactgtatttctatgacaatgctgtagtggagatcgcaaagaatgtaaagccctctgcaagaggagagattgagatcaccagcatcaacaacgagtacctgaacagaggcagtttacaggtagagacactgggaagaggctttgcatggctggataccggcaatcatgatgcccttctggatgcggcagattttgtggcggctttccagaagagacagggtctgtacatttcctgtattgaagagatcgctttcaagcgaggattcattgacaaagagcagctgcttgctctggcagagccgctgcttaagacgaactacggaaaatatctggtagaggtagcaaatggactctaagctgcggaaaatggcgattctggcctccatggcggtgatcctgctggtggcactgctggtcatgtatgtcaacagggagcagtttacggcagcttccggaccgccggcatccggcactcagaatgccggagcgggtgacagtgcatctccggcggaaaatggcgatcaggcagaagagacggtctcaccggatggtcagatcggcaatgatctgaaggcatttttaaaagataatacgttttttgatcaggaagtaaatccaattctggaagctgcaaaggataacagcaaccgtctatctctggtagccacctccatagaaaaggatctgcggatccagatcgtggacaacgaaggaagtccggtgaccggggagagcttctacgtacgactggacggtttgggagattacaaggatctggatcaggacggtatcatttacattggagatctggattccggagactattatattgagctccttcccattgagggatataaggttccggtcagtgagacaagagttcacgtcaaggataaagtggagtttctggccattgacgatatttccctgttgatcaagacggaggatgaagtggatgcagaagccgaggacagcgccgtggcaggtgctctggcagatgcggacaagacagagatccagaagctgcagaccacgtccggtaacgcaaaggtcggtatcgatgtctccaaatggaacaaggagatcgactgggataaggtggaaaacgcaggagtgcagtttgccattatccgtgccggataccgcggttcggtaaccggaagcctggtggaagatcccatgttcgtgacgaacatgaagggtgcacaggccgcaggaattccggtgggcgtatactttttcacccaggctgtagatgagaaggaagctgtggaagaggcttccgcggtgatcgaactgatccgggattaccggctgaactatccggtatttatcgataccgaaggtgcgggcggtaacggccgtgcggacagtctggatgcggagaccagaacactggtatgtgaagcgttctgcaggaccatagaaaatgccggatacacggcgggtgtctatgccagccgtaactggtacaacaataatctgcagacagcaagactggaaaactatcatatctggctggcagagtatcgcagtgttccgttatatcagggatattataagacctggcagtatacctccaagggaaaagtggacggcatcgaaggtcgtgtggacatgaatatcacctacgaatagtcaataaaaatagagagtgaggacgaaataaatgggtaaaataacagtagaaacctgtgaaattgaaggattaaagatcattactcctacggtattcggagataccagaggatattttatggagacttacaattataacgatttcaaggctgcgggaattcctgaggtgttcgtacaggacaatcagtccgcttccaagaagggtgtattgcgtggactgcatttccagaaacattttcctcaggacaagctggtgcgcgtgatccgcggagaagtctatgacgtggcagtggatctgcgggaaggttccaggactttcggccagtggtacggagtgcttttgtctgaagagaacaagaagcagttctttatcccgaagaattttgcacatggttttctggtactgtcggattatgcggaattctgctataaatgtacggatttctatcatcccgatgatgagggcggtatcgcttacaacacaccggatatcggtgtgaaatggccgattccagaaggcatggaactgacgctttccgagaaggataccaagtggggcacattggaagagtacgtgaaggaaaaagagaatgaaggtaagtaaaaaagcgggcattgccctgtttgtgacaacggcagtgatcatggcagtacttattgtattccataagaatccgggacctgcggcggatccgggacaggaactggccaagaagatcatttcctgtgtggtgatcgcggcggcatgcgttgcttttattcactggtatgataaattcaccggactgccggtggaactgttccagaaccgtcatctgatctggaaactggccaaaaatgatttcaaaaaaagatatgcgggatcttatctgggtgcggtatgggctatggcacagccggtggtcacggtggctatgtattacattgtttttgataagatcatgggtaatacgagtactcccctgcgggagggtgtggaagtaccctttgtattgttcctgacggctgggcttgtaccctggttctattttagtgaggcattaaacaatggaaccaatgcgctgctggaatataactatctggtgaaaaaagtagtatttaagatcagtatcctgcctatcatcaagattattgcagccacctttattcatgtattttttgtgtgtctgctgttgattgtggcagcaatttacgggtattatcctaccatatatacgatacagatcgtatactatagcttctgcctgttcatttttgtactggcactcagctatacgacttgtgcagtagtagtatttttccgggatctgtctcagatcatcagtatcggattgcagatcggcatgtgggccactcctattttgtggaatctggattccctgtccggcaattggatcacgattctgaagctgaatccgctggtgtatattgtaaacggttatcgaagtgctatttatgagaaggaatggtttttccaggatttcttttccaccatgtatttctggatcgtaacggtagtactgttcgggttgggagccgttattttcaaacgattgaaggtacatttcgcagacgtgctataatacgaatgattgttacgatttcgagagttcgaagaacggagaaatcgtattataaaaaacagagcatagcaaaacttttatagatgaagaaccttgtggggaggagctgcattacaaaactgttgtggggaaaacagaaagggtgaaagtaattgaagggtgctcgtgaaaaatttagaaaattttggttatggaagccgggacagatcctgctggccgtgggatgctgcggactgctgctgttgacgctgattccattgtttcgtctgacagtctatgcggttccgtattatgatgattacaatttcggaagatttgccagagctgccatggagcaggaacagtcaaaatgggctgccatctccggtgcactggattgctccagaacgcagtggtatgcgtggcagggaacctattcttctattttctttatggcattgatgccggcaatctggggagaacagtattatttcctcggtccagtgttcatcctgctgctattgctggcgggtaccatgacatttacccatgtgatcctgcggaaagtactgggcatggaaaagtggaccggcctggcagcacaggcagtgattacagtggcagtctttatgtttatttattccgcacagagtggcttctactggtataacggcggagttcattacgtgggaatgcacggctttggattgttgatgttgtctgtggcaatctgcctggagagagcagaaggaagaactgctgccgggctgctatttacggcctcggtactgctttccatgatcacggccggaagcaattttgtcacggcattgcagggactcttatcgctgttgacgattctgtttataagtgtggtagtggaacaccggaaaaagggactgtggctgttgcctgctacgctggtatacattataggatttgggctgaatgtagcggcaccgggcaattccgtgcgggcccgcagctatgtcggctggggatacagtcccctggagtccattggcagatcttttctggaaggagtaaaacatcttccagagtttacgggatctattgttcttatggtaatggtgatgctgttacccctgatctggcaggcacttaaggagacgaagtatcgtttccggtatccgggagtcgtacttctgtggtccttctgcctgtatgccaccggttacaccccaagcctgtattccctcggacatgccggattgtccagaactctgaatgcggtgaagatcacatatttattgctgttgttcctgaacgaaatatactggtgtggctggctgcagcaaagactgcagaagaaggcatcaggcagcgcggcaagatggctggcgaactggaacggagccgcagtgtggtggttttatgcgattatgggtctggaatttatcatgatctttcaggtgtcacccaatcaggcaggacattattcggcttatggggcctattactatgtgcataccggagaagcgtataatttccatcaggaatatctggaacgggtggataagctattgggagatgaggatgatgtacagttgcaaccttatcactacaagccctggtttttgtgcatgggagacctctcggaggatgaaaataacgaggccaaccgttctctggccatatggtatgacaaagacagtgtaacgctgataagcgaggattaaaattgatgcaggaaaagaaaaagctggccattgaagtcgataatgtccagaagatctataaactatatgataagccctcagatcggatgaaggaggctttcggcttcggaaaaaagacgaagcataagcttcactatgccctgaagggtgtggacatgaagatctatcagggagaaacggtgggtattatcggtaccaacggttccggtaaatccacgatcctgaagatcatcaccggtgtattgaatcccacttcgggaagagtgctggtaaatggccgtatttccgctctgctggagctgggtgccggattcaatatggaatataacggcattgaaaatgtgtatctgaacgggacgatgatgggattttccgagaaggagatcgaggcaaagcttccggagatcttaagttttgcggatatcggagattacgtatatcagccggtgaagacttattccagcggtatgttcgtccggctggcctttgcggtggccatcaatatcgagccggagatcctgatcgtggatgaggctctgagtgttggtgacgtatttttccaggcaaaatgttatcataaattcgaagaattcaagaagatgggcaagaccattgtgttcgtcagtcatgatctgagcagtatcagcaaatattgtgaccgtgtatatctgctgaatcagggaaatatcctgggcgaaggcagtcccaaggctatgatcgacacctacaagagggtattggtgggacagtatgacggcccggagagtgtgggagaagagactgccagtctgctggatgatgaagacctgcagagagcagctgcccaaaaagcagatgagaaggggaccgatgcttcccaggcttccatggaggccaaggggcagaatcccaatgccctggaatacggtacgaagcaggcacagattgaggaattttacattacggatgacagaggggttcccaccaatgcgatcctgaagggcagtatgtttaccatccatatgcgggttcgttttatggatcatattccggcccccatttttgcattttctgtaaaaaacgtcatcggtgtggagatcaccggtacaaataccatgattgaaaaggcttttctggacagcgtggagccgggagaggtgaaaaatgtgacttttacccagaagatgaacttacaggggggtgagtatctgctgtctctgggagtgaccggctacaatcaggataccttcgaggtatatcacagactgtatgatgccttgaatattacggtggtatcggacaagaacaccgtaggatattatgatatggattccgaaacaaaagtatgggatgcggaggagaagtaaggaatgacagagaccatcgggaagatcacactgaatctggataaatatcccggcgaggattattattgcgacggcagtgtggaggacgagatcttagacattgtaaaaaaatacagtacggtggaatatgacaggatcattgcggagcgaaagagctggccgatcctgtatcatttgtctgctctccgggaaaatatcgtggatttccttcccatacagaaaacagagaaagtgctggaagtgggcagtggatgcggagccatcacgggtgcactggcaagaaaagccggggaagtgacctgtgtggatctctcgaagaagcgcagcctgatcaacgcctaccgccacagcgaatgtgaaaatgtgacgatccatgtgggcaatttcacgaatgtggaaccggaacttcccgcagtctatgactatatctgtctgatcggtgtttttgagtacggacaggcttacataggcggcaagacgccttacgaggatttccttaagatcctgcagaagcatctggcaccggacggcaggatcgtgattgccattgagaacaaatacggattgaaatattttgccggatgcaaggaagatcatctgggcagctggttttccggcattgaaaattatccggagggcggtgtggtacgcacgttttcccggaaaaagctggagcgcattttcgatgcctgcggtgtgggagaacgcagtttttattatccgtatcccgattataaatttatgaccacagtctattccgatgcttatcttccaggacgtggagagctgtccaacaatctgcggaattttgaccgggacagaatgctgttgttcgatgagaagagtgcttttgacggaattgtggaggaaggattgttttccgttttttccaattcctatatggcggtgatcggagcacctctggatctgaaatatgccagatattccaatgaccgtgcggaaagcttccggatccgcaccgagatcctgcgggacaaggaaggctgtaagacggtccgaaaatatccgctgacaaaagaagcggaagcccatgtgcgtcatatgccggaggcttatgaaaaattgaaggaacggtatgcgggaagcagtctggatgtcaatgtctgccatctgggagaagagaacggcataccttatgcggaatttgagttcgtgccgggcagaccgctgtcggaactgatggacgaatgcctggacagacaggatgtgaagggatttcacaacctgtttgcagaatatctggagagagtgggctacggggaggatgtgccggtggcggactttgatctgatctttgccaatattctggtggatggtgaccactggacactgattgattatgaatggacttttgaccgtcccatagagaccagagctctggccttccgggctgtatactgttatgtactggaagatgaaagacgtaatgcactggaactggatcgtattctggatcgtctgggcatcacggaaaacgaagccagacagtacagagagcaggagatggaatttcagaaatatgtgaccggacagaaattgtccatgggtgagatccgcaatctcttaggcggcgaaatttataagcccacggaatggatcggacggttccgtcagacggagggagaactcagggtacagatctatgaggacaagggacagggattttccgaagaaaattcctatttcccggagaacgtctatgcagaggaaaaacaggcggaatttacggtgaatttcgatggaaatgtccattatttacggctggatccggccatgtgcgcctgcgtgtgtaaaatccgggagcttaccatgaacggacagccggttcctgtgcaggacaaaaagatcgttaccaccaatggaaaaatcataaagtccgcagacggtgcggagcatcccagcgtggtatttcccacggaggatccgaatctgacgatccgggtggatgcattggacagaaaggcagagaacatcctgactgtgaaaatggagatcgtgcagattccccttgctgtggcaagtgacatggcgggagcggtgaaaaaaattttctaaggagacaggaaacttgagcattcggacgtcagtaaagcagatgcttgtcagacaacaggataaaaagtatgaagcagaactggcaaagctgcgggtgacctacgcgcaatgggctgcggagcaggaaaaaaagattgcggaaacagtggtcacagagatcggggaaagagccggtcttgcggaattcgtgatctacaggcagcagaaaggacagctggcggaaaatgctgtggagcggatcaatgcgtattttgtgaagcatccggaggcagagatcgtctatggagatgaagatctgctgtcagagaacggagagcgtgtgatcccctggttcaagccttgctgggctccggatacctaccgggctttcttctatgtgggaagcgtcgtggcagtgcggagcagactgttgcagaaactgggggagcccggggctgtgacagaaggagagagcaccggcagggaaatagtattttcgaaagcggaagagatccgtcccctgatggaccggctgtttctggcggccggtggatttgagagaggctgtcataccattggacatctggaagaagtgctgtttcacggcacttttggtactgcgggaatcggactgcagggaccggcagaaaccagccgggagaaagcggaagatgagcagaacccctgggaagagtaccggacggcagcggaatccgcaaaactgtccgtggaactggcggccaaagcggcagaggaagccagagaactgttcgccagagagcttagggtctctgtgatcattccttccaaagataatccttccgtactgggaaaatgtctgcggtcgctgacgcaacgcccggagggcagtgtcccggtggaaatcctgctgatagataacggaagtaacgaggaaaacaggaaaaaaacagaacagctggtggaagaaatccggacagccggaacaccgatccggtatgtatatgagcctgcggagttcaatttttccaccatgtgtaatcgtggcgcagaactggcagatggcaagctgctgctgttcttaaatgatgatattgaattatgtgagaatgactggctggataaaatggtgtccagagccttgcagccttatgtgggcagtgtgggattgaaactttattatccggattccgtgaagatccagcatgacggcattgtcaatctgccggtgggaccggtgcataagctacagtttatggaggatgacagaagctactattttggacggaaccgttttacacaggattgtgtggccgtgacgggagcctgtctcctgatccggacagaggtgttccgggaggccggaggattccgggaagtgttgcgggtagcctataatgatgtggaactgggcttccggcttctggaaatgggatactacaatgtggtgtggaacgaccgctttgcatatcaccatgaatctctcagccggggaagcgatgaaagtcctgagaaaatgcagcgtctggtacaggagagagaactgctctaccagatgcatccacagttccggggagaggatcctttttacccgaaggggctgaaccgggagggactggacagccgtgtggttccggcatatctgacagatcggaatgttttacaggagcctttctggaaaaggggacttcctggcggagaggaattacagaagatccgcagggataactgcctgatggccagagtagagacagcgggaccggagcggatccagggatacagtgtaattctgggagacgataatgcctgctatgaaaaacatctgttgctgattccctgtggggaaacagaaggacagggtgtgtggtccatgcagttgatgcctgcctaccgacaggaactggaggaaaatctcccggatcagaaaaatgtggcattgggcggcttttgtgtcctcagagaaggagaacaactgccgacgggaaactatacgatcgctgttcttgtggtgaatcgtgtcagcaagctgaaactttggaatactacgggaaaatatctgaccgtagagcttccggcagcaaaagaataaaacagatgcatgatccgctaaaatgcggtgaaagcatcacggaggagacatatgtcagagagcaacaccgagatcaattataaggaagcctacgagagagagcatgaaaaatgtgcggatctggcggacaagatcgtagtactggaatcggagaaggaagatctgcagttcaaactggaccgaatcaagaaaaataaattctggaaggctacaggacctgccagaagtgtgatccattttgcccagagacagaaggaacggctgtctcattgcggtggtcccaaagatattctgcggaagatccgtaacaagagtcaccagaagagcctgatggaatcctacggtaccggaagctttcccgatgcggagcagaggaagaaagaggaagaaacggtattcccctatatgccgaagatcagtattctcgtgccgttgtggaataacaagagagagttccagatacagatgctggactgtgtcatgaaccagacctatcagaactgggaactgtgtctggcggacggttccgatgcggaacatgcttacatcgaagaactctgcaaggagtacgcagcgaaatcaaatggccgtattgtatataagcacctggaccataacggaggtatttcctacaacaccaatgagtgttacaagctggccaccggagactatatcggactgttcgatcaggatgacattctgcatccttccgtattgtatgcctatgtcaaggaaatcaatgaacagggtgcggattatctgtactgtgatgagaccaccttccaggaggacaatattaataaaatgctgaccatgcattttaagccggattatgcaccggataatctgcgggccaacaattatatctgtcatttcagcgtcttttccagaaaacttctggaaggcgaggaactgttccgtacggcttttgacggtgcgcaggaccacgatatgatcctgcgtctgacggacagagcacaaaagatcgtacatgtgcccagactgatgtattactggagaagccatgcgggcagtaccgccgccagtattgacgcaaagccctatgccatcgaggcggcaaagggtgccgtggcggatcatctgaaaaagcatggattcaaacattttcagatcaccagtaccagagcctgtgccacaattttccggatccgctatcagattctgggagatccgaagatctccatcgtgatcgccaacaaggatcacgtggaagatctgaagagatgtattacttctattcagaagaacagcacctggagcaactacgagatcatcgtggtggagaacaacagcaccacaccggaaatccgggattactattcccagctgctgggattgtccggcaatgattcctacgcagagagatgcaagctgcataccgtctgcggtcatgacggcgggattctgcacagcgaggacggccggatctctgtggtgacctatcatggtgactttaattattctgctgtaaataatctgggagtatcctatgccaccggagattatatccttttgctgaacaatgatacggaagtgatcactgccaactggatggaagagatgctgatgtatgcacagcgggaagatgtgggtgccgtaggtgcaaagctgtattatgcggacaagacgatccagcatgccggtgtagtcatcggactgggggcacatcgcaccgcaggacatacccattatcgtattccggtacagaacctcggctacatgggacgcctgtgttatacccagaatgccacggcagtgaccggagcatgtctgttggtgaaaaagagtctgtatgagcaggtgggaggactggacgagagctttgtgatctctctgaatgacgtggatttctgcctgaaactgcgcaaactgggactgctgaatgtatggaccccttttgcggaactgtatcattatgaatctatttccagaggtctggatgatcagggagagaaggcggagcgttacaacaaagaatccgagcatttccgtgaaaaatggaaggcagagctggaagcgggagatccctattacaacccgaatttctctctggatcgcagtgactacgcgctgagagatccggttagcggacgttaaattgctcttttcagtaaaggtaatctatggtaaaataatggcggagagcgtttactgaagaaagataaagatagcgataaaacaggaggataggaaaatgagttatatggacgaactgaatttctggttgaatgatgattattttgaccagaagaccaaggatgaacttctggcaatccgcaacaacgaggcagaagtggaagatcgtttttacaaggaactggaattcggtaccggcggtttacgtggcgtgatcggtgcaggaaccaaccgcatgaacgtatataccgttcgtaaggcaactcagggtcttgctaattatatcattaagcgcggcacccagagcaagggtgtggctatcgcatttgactcccgccgcatgtctcccgagttttccgatgaggcagcaagatgtctggcagccaatggcatcaaggcatacatttttgaatctttaagacctaccccggaactgtcctttgcccttcgtacgctgggatgtaccgcaggtatcgtagtgactgcaagccacaaccctcctgagtacaacggctacaaagtatactgggaggacggcgcacaggtaaccgctcctatcgataaggacatcatcaccgaagtacaggccatcaaggattatcataccgtgaagaccatgagcagagaagatgcggaaaaagcaggcctctatcaggtgatcggtaaagagatcgatgacaagtacatggctgagctgaagaagcagatcattcatcccgatgttattcaggaaatggctgatgacatcaagatcgtatatactccgttatgcggtaccggtaacaagccggtaagacgtatcctgtccgagctgggatttaagcacgtctatgtagttcccgaacaggagaatccggatccaaacttcaccacactggattacccgaaccctgaggatcccaaggcatttacatacgcactgcgtctggccaaggagaaggatgcggacatcgttctggcaaccgatcccgatgcagaccgtctgggtgtgtatgccaaggataccaagaccggcgagtatgtggcatttaccggtaacatgtccggtatgctgatcgcagaatatatcctgagagagaagactgctaccggcgctatgcccgagaatcccgcactggtaaccaccatcgttaccaccaatatgaccaagcccatcaccgaagcttatggtgtaaagctgatcgaagtactgaccggcttcaagttcatcggtgagcagatcaagttcttcgagcagaccggcagcaacaattatgtattcggtctggaagagagctacggctgtctggcaggtactcatgcaagagataaggatgcagttgtagcagttatgtgtctgtgtgaagtggcggcttactgcaagaagcacaacatgactctgtgggatatgatggtatccatgtatgaaaaatacggttacttcaaggagacccagtacaccattaccatgaagggtatcgacggtgcaagacagatcgccgagatcatggataagcttcgtaagaatccgcccaaggcattcggtgacctgaaagtggagaaattccgtgactatctgaacgatgtagtcatcgacatggagagcggcaagaagaccactaccggacttcccaagtctaatgtcctgtattttgagcttcccgacaatgcatggtgctgcgcccgtccttccggaaccgagcccaagatcaagttctacatgggtgttaaaggtaacagcatagaggatgcacaggccaaggtagagaagctgaccgaggatgtaaaggctgtactgtaaccaccatgagcaaatagcatgatgtcggggtcaaaagcccccgactttgatgcctacggattgttccgtgcta

SEQ ID NO: 1025 - DNA, 36761 bp, unidentified
  source 1..36761: mol_type = unassigned DNA
  misc_difference 21005: note = a, c, g, or t
  misc_difference 21006: note = a, c, g, or t
  misc_difference 21007: note = a, c, g, or t
  misc_difference 21008: note = a, c, g, or t
  misc_difference 21009: note = a, c, g, or t
  misc_difference 21010: note = a, c, g, or t
  misc_difference 21011: note = a, c, g, or t
  misc_difference 21012: note = a, c, g, or t
  misc_difference 21013: note = a, c, g, or t
  misc_difference 21014: note = a, c, g, or t
  misc_difference 21015: note = a, c, g, or t
  misc_difference 21016: note = a, c, g, or t
  misc_difference 21017: note = a, c, g, or t
  misc_difference 21018: note = a, c, g, or t
  misc_difference 21019: note = a, c, g, or t
  misc_difference 21020: note = a, c, g, or t
  misc_difference 21021: note = a, c, g, or t
  misc_difference 21022: note = a, c, g, or t
  misc_difference 21023: note = a, c, g, or t
  misc_difference 21024: note = a, c, g, or t
  misc_difference 21025: note = a, c, g, or t
  misc_difference 21026: note = a, c, g, or t
  misc_difference 21027: note = a, c, g, or t
  misc_difference 21028: note = a, c, g, or t
  misc_difference 21029: note = a, c, g, or t
  misc_difference 21030: note = a, c, g, or t
  misc_difference 21031: note = a, c, g, or t
  misc_difference 21032: note = a, c, g, or t
  misc_difference 21033: note = a, c, g, or t
  misc_difference 21034: note = a, c, g, or t
  misc_difference 21035: note = a, c, g, or t
aattgcgataaatctcgcgggcatcgcgctcgagataaccgtcacatatctgctcggttggtttctcggcggcgaatatgtcgaaaagcggctcaagggcagcaaggcgggcgacaaggtcctcgctctcggcgacggaaagaagctctcggcgctctttttggtgcgcctgctgcccgtgttcccgattgactttgtcagccttttcctcggcgcaacgaagctgccgtattggaaatacgcgctgatatcgctcggcggaataatgccgcgcgtcatacttttcactattctcggcgacggcatatatgactatatcccgatggataagatagtgcttgtcatcgtctgctgcatccccgccgtgataatctggtgggtgataaaattcttccgcaacaaaaagaaaaactcatctgccggttgagccgaatccgccctcgccgcgctccgtctcgtcaaggctgtcgacttcgacgggctgagccagaatgacaggcgcgagcacgagctgagctattctctcgccgggctgtatagtataatcctcactcgaagtgttaatgagtcccacgcatatctcgccgcggtagtcgctgtcgatgactccgactccgttcgagagcgaaataccgtgctttataccgagtccgctgcgcgcatagacgaatgcagcggtctcgttgttttctatggcgattgctatgccggtcggtataaccgtgcgctcgcctgctttgagaacgacttcgttttccgtgcaggcgcaaagatccagtccggcgctgccggaggtcgcacgcttcggtattattgcgccggggcgcacttttttcatcttgagagtgagcatattttatctcctttattcaactccgcgatagagaagtccgcgcgtaaattcgccctgcggggcgtctcccctgcggtagctttcaagtactttttcacattcttcttttgtttcggtcgtgaaccacagcagcgagaagtcggcaaactcaaactgctcgcgcttgtcgctctcgactatcggcacgctgttgagcaaggtcgaggcaaacggtgtgcactcgacggggaatgtcacgcccatcctgtcggtcaaagacccgtgcttgcggcatttgtcgcaggtcgtgccgttcttgaccgggcagtttctcgtctgcatcagcgacagacgcccgtaagcgaacacgccgcgcggcagttttccgccgagcgaggcgcactgggcaattttcagctcggtgctgagtatggcatccgtgaagccgaggcgcgcaaactcgtcgagcgagaatgtattgaatatatttgtgcctggcagagcgcagagcttcatgcccgcttttttggctatcgccgcgccgtcgagagagcagactgcggcaagggatattccgtttttgcgcgccttgacgagcgaattgtaaaccgcatcgtcgccgccgaatatcgcggcgggaacttcgactgcgggctgtatctttttgtctttgagatacttcacagtctcctcgccgacgcccatcggcagtatcacgcggcgcacatacgagagatcggacggtatctgcgaaatacttctgactctgattacatagccgcggttttgagaacggcggcgtctgattgaaatttcctgcggataaaacggaatttcagagcgctcggcaatcctttcttctagcatcgcgagagcctttctgcgaagcgaatttatctcggacgcgctcaaaaatatgtcgtctccaatatcaattccgacttctccggcataaaactgagtcgagccgcatttgcgcagtctggtttcaatttcttcgctcccgaccgctctgttctgcgctttctgcacggcgctttcagactccgcaaagacgctcttgcctgcggctttgaccgcgaggtatgccttttcgccgacctgcgccgacaggtgcatatcggctcttatcagcggctgttcgccgtcgtagagtgcggcaagcggagagagaacatcctttgcggcggtgacatcctctttgcgacgcacgccgaacatatcgcgcccgagagccccgttatagtagcctgaggtgaacccggagcgggagaatatcgcgccgagcgtgtgctcgtattcggcggcgctttcgcccgcgagactctttttgcaggcagtcactgcggcggcaacatattccggccgcttcatgcgtccctctattttgaacgagagaacgcccatctgcacgagctccggcagatattctatcaaagacatatctttaaggctcaggtcgtgtcccgtgccgccgtcggcggcaaacggaagcctgcacggctgggcgcataagcccctgttgcccgagcgcgagccgagcaccgcgctgagttggcactgacccgaaagacacatgcacagcgcgccgtggacgaacatctcgagctctatcggcgactgcgcggctattttttctatctcttttttagagagctccctcggcagcaccgcgcggcaaaagcccatgtccgcgagcatttttattccgtcgagggtctgcacggaagtctgtgtcgaggcgtgcagaggcatatcgggagccgctttgcgaataagcgaagtgagcccgatatcctgtaaaataagtgcgtctgctttgatatcgcaggcgcacctgacggcgttcatcgccgtttccatctcatcgtcacgcacaagggtgttgagcgtgatatataccttgaccccgcgcgcgtggcagtatttgaccgcctgcgcgagttcttcattgctgaaatttgcggcgttgcggcgcgcgttcaactcccgtccgccgaggtatacggcgtcggctccgcagcgcacagctgcggtcagcgaatcaaacgagccagcaggcgcaagtatctccggcttattcatcttttgacccgtgcttctttttgtatgcggcgagctcttttgcaagcctgtccgcctcgcgtacggctatctcgcggtcggtcttggcgcgcgccgaatcctcgagatactcctgtatcttcgagcgcagattttccgccgaaacgacggcctttttctccgaatcagcaaattcaagcgccgcgagcacggcagcctgagttaccgaaatgcgaggattctgcttgagaatcgtggatattttctcatcgacttcgtcgccgagttcgatcatatacttgctgtcctcatccgaaccgatgatatattccgccccgcaaatggtcagtttgactttgtttttctccataaccatggtcctttcttcgtcgctttgcatacttctgattttattatacaatagaagcttcggagaataaagaactttttgaaatttttgcgtcaaaaaagccccgccgattatggcggggctttgtacggggctttttatcagtcctcgttctcttccttgatcttttcgactatctcgtcggggatcgcttcgccgtggcggacgacgaggatgcagagggtcgagaggataaaggctatcgggcaatagtagaacagggacatatatgtgccggtaagcatacggacgataccgtagattatcggggtagctatctgtgcggagaaggttgcggtgtagtaatagccggtgaatgtgccgaccttgtcgataccgcctatttcaagcacgaggggcagggtgttgacggtgatgaacatattcgccgcgccgcccacgacaagagctacccagatgagcgctccgctgagtgcgttgatgtgaagtatctcggtgagcagatatgcgccgaatgcgacgatgaatatggcaagtccgccgagtatggtctttttgcggccgaacttcttgccgagccagcccgcggggatggcggcgactgcggaagcggcggcaaaggcggtagtcatgatggttgcctgagcggcggtcttatgaagaatctcatccgcaaacagagcgaagaaggtggagatagcgttcgtgccgcagaagaggaagaacagacccatgagcatgaagataaggcttcttctctcgccggaggtgagcttctctttctttctcgcttctttttctgcctttgcggcttccttttcagccttgcgtcttgcctctgcgtcggctgcctggttcatctcgccctgaaccttaatacggctgtcgggctccttgacgaagaagaggatgatgagcataccgattatcataacggcggcgccgagcaggaaaacgtaggggaaggtgttgagctcgttgaactcaggagacttcgaggagattcccgtggatgcgcagtagatagcggtgacgatagtgccggcgaacaggccgagcgcgccgccgatgccgcccatgaggttgatgacggcgttgccttcggagcggatgtcactgggggtcaggtcgggcatgagcgcgacaacgggagctctccagagcgacatgacgaagacgaagagaatgatgaagagcatcgtcagcggaagcgaaccgacttttatcgcgactatcgggattatcgcaaagagaatagccgagataggcgcgccgaagataacatacggacggcgcttgccgaaacgggaatgagtgttgtcggaaagcttgccgaaggtcggctggaagatgacgccgaaaatattatcaaacgtcatgatgataccgatgaacagcgggacaagcgttatgccgccggcggcggttgtaacatcctcgccgtttgccgcggcgaactcggcgagagccgggaacgcggcgttgagctttgccgaccacgaggttatcgtggcgctgttattgagcaggtggttgagtatcttggttatgtagggatcgtagattgcccatgcgatagacgacgcaaggaaaccgaatcccgtgagtatcgtgtgcggatagtgcagcttgccgttgggcttagcacagaaatactgcttcgctttttccatgtttggttataacctccttaaatgccgcgcggccggttcgtcatgtgcgcggtcttaaacagtgtaattgtaacatatctgttctgatttgcaaatagttttttaaacttattgcataaaaatatatttttatctatttatttcaggaagccgctgactatgacctcttcagcttcctcttctgtcagtccaaaagtcatgagcttcaggagctggtcgttgtttatgcgcccgatagccgcctcgtggactatctgcgcgtcggcgtcgttggcggttatctccgggatggagcgtatcttcgccttgtccatgattatcgagtcgcactggacatgggcgcggcactccgtgttgccgaccgctctgggatagaacacctgctcggagtgatccctcgcgacggagcgggagactatctgcgcgctcgaatttttgccgtttaagttcacggtcatgttcgaacgggctttctggctgccgtgggtgagcaggcgctcggtgatgactatcttggcgttcgcgtcgagagccgcctcggtctcgcgcagagtagagtcgacgcccgcgagctgtatcatctccatctcgcagtaagagccctcctccatggtgacttcggtcacggggttgagtattctctcgcctgtgccctcgccttcgccgtagtgcttctcgacatattttacttttgcatttttgccgatgaagaaacggtggatgccgtcgtgctcggtcttttcaccgccgcagttgtgtatgccgcaacccgcgactatcaacacatccgcgccctcgccgacataaaaatcgttatataccttgtcgtttattccggtctcggtgatgataactgggatatgcacctcttcgccctttgtgaacggctttatatatatgtctatgcccgggtttccttttttgggctctattgttatattttcgctcgactgtctcgcgatgccctgaccgttctttctgatgttgaacgcgcccgtcggcattgaatccatgtccgctattgtgtgcagcagcgacatatcgacttttttgagcagatccggcatatcattcaccgtcctttctgttgaagtcgcagctctcgtcaagctcgccgagcagctgcgggagaatctcttcctttgtgccgcgcgtgcgaatcttgcccttttcgacgactatcatctcgtcggcgagctgcattatgcgctcctgatgcgaaattactatcactgtttcatatctgttcttgcacatcgagcggaagctctcgacaagcattgcgaagctccacaggtcaattcctgcctccggctcgtcgaatatcgcaaggtctacatttctcgccatgagcgtggcaatttcaacacgcttgacttcaccgcccgagagcgacgcgtcaacctcgcggttgagatattcacgcgagcagagccctacgctcgtcagatatgcgcagcaggcgtcctcgggcagctcgctgccgtgggcgaggctcagaagcctgcgcaccgtgagccctttgaaacgcggaggctgctgaaaagcgtagccgatgccgagcttcgcgcgctcggtgatgctcatatgagttatatccgttccgttatagattatctgtcccgcggtcggctgctcgatgcccataatgagctttgcgagcgtggattttccgccgccgttcggtcctgttatgacaacgaacttgccgtcgtcaaatgtgaggctgatattgtcgattatctcaagctcgtcgtccgcactgccgaccgagaaggagacatttttcagttcaagcatattctgcttcctttcgcttatttatatgcaggttgattatacagattttttattgatatgacaagatattttgcgccgatatttgcatatgatgtgccggtaatttaagctttggcgttattttatgagttttttgtaaacaaagtctgattttatttgaatttttataagaaagctgatagaatgaagaggtaatgctaccggacaaggaggtatcggtttgtcagataaagaaaacctgcagccgctcgaagagaacgaggctgccgaaaaggaagaaaaaaactttgagtatgacagaacgctttgcagcctttgccagaagaaggcgcgcgaagagggcagctattactgcgaggactgccgtaccaagatgatgaagacgaagataaagggcggttccgtagttgccgcggtgctctgcgtgatagtttcgctgttcgcgctgatgctcctgggcgcaaacgccacgcagatggtcggtctgcttgaggcagactccctcttgaaccagggctatgtcaacgccgcgctcaacaaggtgtcccaggcgagcgaggcaaacgcctctctcaacggcagcgactttatctcgaatctgtcgaagaccctcggcaatcagacgatattcaccctcggctacggcgagaccgcgatgaccgcgaagatctatgcaaaaggctacaccgagatagacgcgggcggatatgttgtgaacactctcggcgaggacgcagtgaaatccgacctgaggctgctcggtatgcgcaagttcgtcaaggcatacaacggctacaacaccacgcaggagaaggcatattcgattctccagaactatgccaacgccgaagcgaaggatatcccctacgacgatcttatcaagaagcttgacgctctcaagggtcaggacggaattgaggatcagtatatcgaatactacaagtgctatatcgcgatgatggcggacaagagcatcgacacccagcttgagttcctcctgaagatggaaaaggaatatcccgcgggtctcatgatctacggtccgacaattgcggattactactatcgctcgggcgactatgcgaagtccgttgaatacgccgacaagatgattgcaaataaccgcaactactcctccgcctatgagcagaaggtcatggctctgctcgcacagggcgacgccgacggcgccgagaaggtctgcgaccagctcgataccgccgagaatgcggcaggagtcgcaagcggcgattacacttcgtacagcctgcgcgccaacctctattggtacaccggcaaatacgacgcagcgataaagatatgcgaagagggcatcgaggcatccggcggcgattcggatatctaccgcaacgaggctatcgcctatatgctcaagggcgactacaagaaggctaacgagtgcggaaagaacgcatatcagttctccatgaactacggcgacctgacgctcgatataatcaacaccgcggctcttgcagcgggacttgcaaaggacgatgatacctacaagacgcttcaggattatctcaagacctacaactacgagataagcacggtcgtcacggactgccttgcaggcaaaaagaccgtcgaacaggtcttcatcactgacggaggtgtcatctcatgatttcaactgttatctatttcatcggaaaggtgctcacctttcccggcgcatatataaaggctttctttgagcatcttatcgcaagagcgttcagtatccccgttgaggatacaaagtatctcagattcaccgacggctgcggccatgtcgagcatgacgcgatcggcagcaaggcgaagattttcttctattgcctcctgcccggtctgttcaccgcgataatcggcacgcccatgctctatatgggctttgcgggtctgttcttcttcaaggtccctaccgattcgagcacgatgctcatgtttattgtctattgcatcctgttctatctcggcttctcgctgtgcgcgaaccagtatccgcttatggaggatgcaatcggtctgtggcacgcgctctacggcaaggacggagcgaacctgtttgtgaagatcgttctcttcatcccgaccgttcttattatagcgggcgcgttcctcgagagatacgcattgaatattcttctcatggcaggcactgttgccttcgccgcactgacagcataacaaaataaataagctgcctccgcacaggtcactctctgcgggggcgctttgcaatcggagaaacttttatggaatataaattcaaactttgcgtcatttgcacgggcgattcgggcacggcggaaaatctcgcctactcgctcataacctgcggcggcgtgcgtcttgtaatctgctcagaaaatgcggatatcaaaaaattcccgacggcggagaacagcaggatagattttgcaccctgctccgttgagtcagtcaattccgtcctcgcttcgcccgatgccccgctcgtcatgttcgcagatgccgggactactttttcgcccggatttgtcgagctgctcgaagataaggcggttgttttcaatgcggcggctgaagaaaataatgcaccgcgcaagctctatcgcgacggattctcagtccacgaggcgttctcgcctgcagtcggcgtgaattttgtcatgcgctcggaagttataagcgagcacggaataaagcttttatccgcaagcccggcgggctttgccgcgtttgccgtgcagtatgccgcatatgatagtttcgagcccatacacgaagtgcttctctacggcacgaagccgatagattggaacgccgaaagttttgatatcattgcaaagagtgtttcaatcaaaggcgggttctccgctctgacgcttctgctctcggcttactgcgggcttgacaagacaggaaaagaaaccgaattcgatgcgttttcaactgcggcaaagccgttctttgaaaacgaagcttacagcgcatatgccctcgcggctttcggcattgattccgctatgttaaaagagggctgccgcgccggagagttcgcctcggcgggcacgaacgccatgtacaaagaagtgactctgcctatcctcgccgacgacattgtgcgcgatttttacggcggcaagctcagcttcggcacgctgcgccgctgcattgccgcgtggctctatttcaagctctaccgcatgggcggagcggcgaagaagctcggctgtaaagtctgctcaaaactcgccgggggtgacctgaatgtctgattttccattcagagccacgatactcattcccgtctacaatgtcgaaaaatatctcgacggctgcataaactcgctcaaagagcagactgagccgttcgggaatatggagatactcctgataaacgacggaagccgggacggcagcgcggatatctgccgccgctgggctgacgaatatgagaatatccatttctactcaaaagagaacgagggactttcaaaaacaagaaacttcggtctgcgccatgcgcagggcaagtatatcttcttcctcgactccgacgacactttagctcccgatacggtcaagagcgttgttgactatttcgacacggtctatgacgaggtggatttagtcacctaccgcatcacgcagtatttcaaaaatgcgccgccggtctatcatttcagataccgcacgctgacccacacgggcgtgtacgatttagacgaccccaaaaacagattcatcacgcagacgaacgtcaatatctgcgtcaagaataataaaaataacggcattttcttcgacgagtcgccgaatttcaggcacgaggacgagaaatactgctgcgatatcctgcgccgcaagatgaaaataggcttttgccaaaagggcgaatacagatataatcgtggcaacgagaacagcattgtttcaaccgttttctcgccctattatatatttgaaacctccatggctttctacgaggaattgttcaactcgttcggcggcagggttccgccgtatttccagggaatagttttcaacgacctgcgctggaagctcaaggaggacaagctcctgccctatcactattcgcccgaggagttcgcgcgcgcgaacaggcgcatcgatgcgctgctcaaacaaatggacaaggacactataatattgcacccgtccgtcaatgaatatcatatccactactggctctcgcgcaagccgaattgccatccgacggtaatagcagatgacggcaagctcagcattgcggcggacggaagaaagattttttcggcgtcttcgttcccgctgatgatgagaaaaatatttgtcgaaaacggaaaggcgagactgctctcgtttgtaaaatcccccgtgttctcgcatctcgggcgcggcgagtggaaagtaatagcttctgtagacggcgaaaaacgcgagcttgaaacttttacctccgttttcagcgcgcaggattccgcagtcaatgttgtcgattttccggcgttcttctgcgaattcccggcagacggcaggcacgagataaagttctttataagcatacgcggcaaagaatatccgacgaatcttctcgccgagccgaccgctgtgttcagccgtaaaatacgcatgtatgtccgaaacggcgtgatgttcactctgaatggcaggacactcgtcagcagaagcgttgacgaaaatgagaagtaccgtgccgagcgcgagcagagcaagaatttcaagggcaatgtcaaaaagctgcgcaatgccgccattgaataccgcagagcgcacaaagttgagctctactatgaccttcacacggtagatttcgacaacggctattaccagttcaagaatgacataaagcacagcgacggcgttgaacgctactatatctacagccgcgaatacaagaatatcgacgagctgttcacaaaagatgaacaggagcatctcgtgaaattcggctcggagaagcacaaactgctctatctctcggcacgagtgatattcacggcgttctacggcgtgacccccgtttcgccgttcggctcggcggcgggcgaagtgccctatgccgatctgctcgatttcaaaactatctatctccagcatggagtgctccacgcctccctgcgctcgcagaattcggtcgaacgttgccgcgcggataaaatcgttatttccgctccgtttgaaaagcagaattacatgacgaactatcactacccggaggacaatctcatcccgaccggtatggcgcgatatgaccatatagacagaaacaaaaaagcgaaaaacaggattctttttgccccgtcgtggcgcaaatacctgactcaggagataaactcctcgaagtgggagctgatagactcaaagctcaaaggctccgactatttcaggaatttctcacgttttcttgagagcgaggaactgcatgagctactcgaaaagacggacacctatctcgatgtcaagctccacccgataatcgcggacgccgaaggactgtttgatatcaagagtccgcgcgtcgtcatggcgggcgcgcatgttgacattgaggactacaagatgttcataacggacttctcgtctttcgtgttcgactttgcttatctctgccgcccggtgctctattttgtgccggactacgggcagttcaaggcgggcatgaaccactaccgcgagctggatttaccgtttgaaaaggcattcggtccgctcgtcctcgacccggacggcgcggtggaggaaataaaaaaagccgcgaaaaacggctttgatccggaaccgatatacgccgagcgcatgagaaacttctactatccgctcgaaaactgcgccgaggcactctacaacgaagtgagctcgtgggattgtctgtaagagagggatgatcaggaatggataagcttatcagtgttgcgatacctgtttataactgagagacgacactgcgcaaatgcgttgacagcattcttgcacagacatacgaaaatattgaggtcatccttgtcaatgacggctctaccgaccgttcggaggatatctgccgcagctatgagcagattgacccgagagtaaaggtcatcagcaaagaaaacggcggactctcttcggcgcgcaatgccggaatagacaaaagctgcggggagtacatattttttatcgacagcgacgactggatagacagcgacacgcttgaagtattgctgaacgccgccctgcaaaaggacacggatgtcacaggctgctgcgtgtattttaacttcccgaacggtgttgaaaacagcataacttccgatgaaatctatattcaggacacacgggcgctcataaaatggatgctcgcgggcagcatttatgccaatgccgcatggggcaagctgttcaagagaagtatttttgaaaaattgagatttgacgagagctgcgatttctgcgaggacgacgagttcagcttccgcatggcgcatatagcaaagggatatctccgcatagctgatgcaaaatatcattattttcagaattccggcggcatggtactctccggcacttacatttccgatacgcctataaatgtcatgtcaaagatagaatccgacccgatagtggcgggtgacccggagctttcaaggcttgcgcacaaaaagaagatagcggctctgcatacgctgtatgtaaaatatatgcgcgcaggagacaggcgcaacgccgcgtgcatcgctcatatgatgcgtgagctggtatcaaagcacggctactgcggaatatcaaagcagatgcaggcgcgtgtcatgctcatgcgtgcatacccgctcgcgagattcgtcgagctttcctcgatatggcctcagaggcaagaaatacagcaaaaaatctgcataaaaggcaatcggacgcagcaaaaatactgcgtccgatttttatttaatttttatcttgcggcagtccgcttattttatatacccgataataaaatgcgaactcttcttgacgaagttgtcgaatcctgacagctcgcgcggatcggggcggctgttactgtagttatacactctgacgccgccgttttccatgctctcgaccgccacagtgtgcagcggcgacagaagcgggcgcttcgtccagaacgagattatcgccgagccggctttcgggaactcgcgtttaaagcgctcatagtccgttatgccgtgctcggacataccgcgcttttggaaatagtgcctgagcatatacggattcgagccgaacagtcccataagcaccgagccttttgggtatatctcgagcgcaagatccgccatgttcgttttcacgccgtgcaggcgcatatagttatagaccgcgattatctcacagccgttatacgacatcggaaaaagcccgtaacgaagccggctgaccatgccgagagcctgaccgtttatgaatctgtcgggtatcggcatatttttattgaatttatagttcggtttttcaagcataattaaacctccgtcatgagacgcgacacgtcgggcttggatatccacatatcctcccacttctgcccggcgatgacctcgaggcgcttcttctcttcatcgtcgatgtcaatttcgccctgctcatgcttttgcttgataagagcttttatctgctcatggtcgcgctttgtcatggtgtagcgccagacggtgatgagggttattatcgcgaatattgtcggcaggattgagaagttcaggcgcagtccccagatagtgcgcgcgggctgcattgacggcgcggttatcttcgggttatagccgaacgcatctatagacgcgccgacgatatacgccatgaagctgtttatcatcttgcggaatagcgtatagaatgtcgatatcgtgccctcgcggcgctcgcccgttatcatctcgtcaacatcggtgacgtcgggctggatattgacaatgaagaaatcggggcctgagaatccgaagttgtagcatatcgaagatatgacgataattatcgttgaaataatcgacggcgtgttcggcgttataaatgaagtgatgaacagaccgacgaccataagcggaccgagaatttttccgcacgactgcttgccgaacttcttgatgagcatatagtttatgggcgtgcccatgaattcagagatacccgagactatagtcatggatatgaacaggctgtatttatcggcgacgctgaccatgaaatactggtcggtgatgctgtagaatccgcggcacatcataaagcagaggcttataagaaaatactgcctgaacgcgcggtttttgaaaacctttacatactggctgacaatgaattttatgtttatcggcatcttcggcatatccttcgaggacggctcgctcgtatggaaatagcaatagacgagcggccacgcgaagaacacggcgaggataaaaccgatgagcatatatttgttcgtatccgcgtgcgagggattcggcagactgccgagcgccgttccgacatcgaactcgctcaatatgagcgcggtgagtatgaacgaagtcacctgtccgacggagttcatcagatattcaataaataagaactgtgttcgctgaaaataattcggcgcgaccatcggcagcattgaagtatgcggcacgctcgctatggtgaatgcggtgctgtagagcagcgttcccgcgatgtaccagagcattatattgcgcgtgttgccggtatccgatattccgaatgaggtccacttcatgatataagctatcatgaacgggatgaccgctattagcagatatctcctgtggcgtcctgactttgcgcgggtgtggtcgctgatgatacccattatcgggtcggttattgcgtcccacattccgccgatgagcgaaatgaaacccgcctgcttggtgctcagcccctcgacataggtcagatactgctgatgatacatgctgatcggatagcccgctccgccgagcatgatgtttcccgaagtatagcccacggcaggcttgagggtatctttcaaatcgccctcgattcccgcaatgtctttgaaccattcggaaaaagttcttctttcttttttcattgttgtctcccctttcggccatataagggaatcgcgatataacaacagccacagctgaaagttacttgaaaagcttcgtgtgcctgagcgccgaatagagcggcagcccgagcacgaggcagactgcgagttcgcctgctccgacttccagagcggatatggcgaatgctgtgagcttgccgccctcgaccggggtcagcatcactatctcaagtccgactatgacggcgttgaatataaccggcataagcgacgagagcaccgggagcttttttatctgcacatttctgagcatacgcccggtcactgcgccgagaagagtcgccgccgagccgaagagcacatcccatatgcccatcgggctcgaaatattgcctataatacagcctatcgtcagccccggtatcgcagcgggggtgagagtcgagagcacggtcagggcttcggagagcctgaactgcaccgggccgtaagcgagtgagaatgcggcgctgagatatgtcgccgccgcatagagcgcagcaatgaccgcgctctccgtcaggaatcggacggaaagttttttgtttttcatttttctgctcctttttgctgccatgcagcgcctttagttttgttcagcatcgggcacaatgcctgtcgggaaggtctcgaaccgacgattaatttatatcaaagatatttggcgagatcttccatgctgtcgaccacgacgctcgctttaatatccgaattttcgtattcctctctcgtagtcacgccgctgagcacaagcacgctcggtatgccgtggctggcgcctatcgcgatatccgtcgccaggcggtcgccgataaaagcaatctcatcgcgcgagcaggagagcatatgggttatataatctacagttgcggtcatgggcttgcccataacaagcgggcgtttgcctgtcgatgcggcgaaaagctcgatcatcgagcccgtatcgggcatgaagccgtccgcagtcgggcagttgagatcggggtgggtcgctatatactccgcgccgtttgcgatatacttcgcagcgtcccaaagcttctgataggtcagcgtagtatcaaagccgagcacgactatatcggggtctttttcaacaagattgatgcccgcagctttgaaatcgccggtcagtcgctcgttgccgagaagatagacgctcttgccggggcgatgtcgcttgaggaagtctatagtgacatgggacgagattatgacgcgcttttcgtcaacgggaaagcccatcttagcgagcttatccctgcacgaggcgacattgttcgacgagttgttcgtgaagaaatagaagtctctcccgctctcgcggacttttttcaaaaatccgtctgcgccgggaatgatgtttccgtcgagatagaatgttccgtccatgtcgacaatgaaatattttgtcttttcaaagatgcttttttctgccaaggtttccacacactttctctcaaagtcctgttttcgggacataatatttataattatatcatagtacacccgtgttttacaatatgtctttttagtgtctttttcggctgtcacaagccgttttccgacacaacataaaaatgtgtggcttattactttataaaaatttgacttttctttaaaatttcagtaaaagttttatatttactatagacttttttcttcagatattttaaaattatattgtataatgcgtcggctcaaaaccgatggggacggaggataaagatatgccaaaccagaatctcgaatttggaaacaggctcaagacattcagaacgctcaacggtttgactcagggggaagtcgccgaggtgctcaagctcgaccgttcgacctacacctactacgaaaaaggccgcgtgccgaatctcgacacgctcaacaagctctcgaaaattttcaacgtatccgttgccgagcttatcggcgaacgcgacgacggcgcgcttgatgttatcaaaaacgcaagccgcgagctccacgttgagagcatctttttaagacccgatgaaaaacagctgatactcaaccttcgcctttgctcccctgtggagaggcagaaaatttttgacaaggtcaatcagtatatcgaaagaaaatccaaataaggacatttgatggacaaattcaagctcgaaaacctcggctcgggcataaccgcagtcatttcgaaggaacacggcttcgggaccgacgctcttctgctcgccgacttcgcggcagtgaaagaatccaaccgctgctgcgacatgggcagcggctgcgggataatcccattgctgtggctcaaaaagaatatgagcagacccgttgccgccattgaaataagcgagcagggatgcgaacagatgtacaaggctgccgggataaattctctcggcggccatcttgaggtatataacaaagatttacgaaatgtgcgcgaatttcttcccgcgggtgaatttgatgttgtgacaatgaatccgccctacaaagccgagggcgcgggaatagtcagcgcggatgaaacggcggcgcgggcgcggcacgggctgtgctgctcgctcgacgatatgtgctcagccgccgcgtggcttttgaaattcggcggaaaattctgcgtgtgtctgcgcccggagcggctctgcgagctgatgtgcaaaatgagcgccgcaggcattgagcctaaaaggctcagaaccgtttcaaagcgcaacggatgcgccccgtggctcgttctcgtcgagggaaagcacggcgggaagccgggcatgacggtcgagccccagctcaatatatatgacggggacgaatattcggaatacatgaaaacgctctactcggactacgagcgcgagcgtgaaaataacgaccctgaaaggaacaagactgataaatgagcgctgtactttatgttgtcggcacgccgataggcaatctgggcgacctctctccccgcgcaatagatgcgtttgaaaactgcgatttcatcgccgcggaggacaccagagtgacgctgaagcttctcaactcgttcgggataaagaagccgatgataagctatcacgagcacaacagattcgagatgagcccgagaatagtcgcgcggctgatgaacggcgagagctgcgtgctcgtcacggacgccggtatgcccgcgatatccgaccccggcgaggacttggtgcgcatgtgccacgagcacgggataaaagtcgaatccgtacccggaccgactgcgttcgcaacggcgatggcgatatccggcatgccctccggaagattcacttttgagggtttcctgagcgtcaacaaggcgagccgcaccgagcacatacagagcatagttaaagagccgcgcacgatgatattctacgaagctccgcacaagataggcgcaacgctccgcgacctcgccgccgcactcggcgacagggaaattgcaatcgtccgcgagataaccaaaattcacgaagaggttatccgcacgacgctctgcgccgccgccgagaaatatgcggacggcggactcaagggcgagatagtactcatcatcgcgggcgcaaagcccgaggaaaaagagcagatggccgtcgagcaggcagtcgaagaagcgaaaaaattcatagcatcaggcgactccgcctcggaggccgcgaagaaggcggcgaagctcagcgggcacaagaagggcgacatatataaacttttgcagggagagaaagacaatggctgaagcactcagacaatactggtatcttggaatcgcgctcatagcggctgttattttaactctctgggtaatcaaaaaggcggcgcaggcatcgagtcgggcgcacgccgaacgcgaagcgcagatgaaaaagctcgaatacgaatcgggcgtgcttaaagagttctccgagctcagcgaagagaagctccgcaatgccgacagcaagcgcgctttcgacggcgtggcgatgaacatacagcgatatctcgaaaagcagagcaacatgaatgcggcgttctcggcactctctgacagtcagaagcagatatacgcgctctattatctcatagacgattctaagaaaggactcagcgagtttttcaaatgcaactccgctcccctgaccccggcggcgcgcgaggcggtcgattcgctgttccccgcagacgccgcaaaggcttttgacagcgagtaccgcgcatatgaccccgacgacgaggacacttcgctcatccccgcagagatagagaagaacgacgccgaatatgctgaggcgatgcaggattttgatttttataaagcggcagtcgaaataataatcgaaaatcttaaaaacttttgctgatttacgacttatttttaccctcatgtaaagtataatagttttgtgatgtccgcgacgcggataataattatattataaacacaggaggaaacagcatggaattcaaaggcagcagaactcaggcaaatctcatggcggctttcgccggagaatcacaggcacggaacaaatacacatactatgcatcaaaggcgaagaaggacggctacgagcagatagccgcgattttcaccgagactgcggacaacgaaaaggagcacgcgaagatctggttcaaggagctgcacgacggcgcagtgccctcgactatagacaatctgcgcgatgcggcggcaggcgaaaactacgagtggaccgagatgtacaaagagttcgccgaggtcgcccgcgaagagggcttcgaccgcatagcttcgctctttgagatggtcggcaagattgagaaagagcacgaggagcgctataatacactgctcaaaaatctcgaagagggcatcgtttttgaacgcagcgaagaggtcgtatgggtctgccgcaactgcggacacatccatgtcggcaaatccgcgccgaaagtatgccccacctgcgcccacccgcagtcgtattttgaaatcaagaagacaaattattgatagttcagcgaagctctgtccgttatcaaacgggcagagttttttattttttgtccgttcagagcggtcgaaattaataatacaaaaattataggctttatttggtcattttttacaaaaaatttacatcaaatactatggctgcttgaataaagtagtcaaaaaccgcttgaaaaaatctataatcgagnnnnnnnnnnnnnnnnnnnnnnnnnnnnnnnatttatttaataatacatcttttgaggaaagtgagaatcttaaatgcttaatgagaatatcccgatgtaccttttccatcagggtacaaacgcaaaagcatatgagtatctcggctcacaccgcgacgaagaggatgagaattttacctattttcgcgtatgggctccgcacgccgtcgccgtttttgtcgcctgcgacagaaacaactggacgggagagggctttgagctcagccgcataaacgaacagggtctctgggagggacacttcgagggcttcaaggaatttgacgcctacaagtatctcatcatcgcgcaggacggccgcaagctgatgaaatgcgacccctacgcattccacgccgagacgcgccccggaaccgcctcgaagatatatgagctcggctcattcgagtggacggacggcgcatggatgaaaaaacgccgcaggaagaatatatatgcctccccgatgaatatatatgagctgcacgtcggttcgtggcagcgatatgccgacggcaacacactcccttaccgcgagctcgcggacaggctcgtgccctatgttgtcgacatgggttacacgcacgtggagctgctgccgataatggagcacccgttcgacggctcgtggggatatcaggtcaccggatactttgcgccgacctcacgctacggcacgccggacgacttcatgtattttgttaataaatgccacgaaaacggcataggagttatattggactgggttccggcgcattttccgaaagacgaattcggtctctacgaatttgacggcgaggcatgctacgaatacgccgacccgaacaaaggcgaacacaagcaatggggcacgcgagtttttgactacggcaggacggaagtgcagagcttcctgatgtcgagcgcgctgttctggctcgaggtctaccacgttgacggactgagagtcgacgccgttgcgtccatgctctatctcgactacgggcgcgaggacggcgaatggagtccgaacacctacggcggacgagagaatctcgaagccgtggcatttataaaaaagctcaacgagactatattcggagagcacggcgacatcatgatgatcgccgaggagagcacctcatggccgatggtgtcgaagcccgtctatctcggcggtctcggcttcaacttcaaatggaacatgggctggatgaacgactgcctgcgctatttctcgctcgacggtctgttcaggaagttcaatcacgactgcctgaccttctcgttcttctatgctttttccgagaatttcgtgctgcctatctcgcatgacgaagtggttcacggcaaatgctcactgataagcaagatgcccggtacatacgaagaaaaattcgcgggagtccgttcgttccttgcgtatatgatggcgcacccgggcaagaagctgctcttcatgggtcaggagttcggtcagttcatcgagtggaactacaagcaggagctcgactggctgctgctcgactacgatatgcacagaaagctcaaggagttttcgcgcacgctcaaccgcttctataagcgcaaccccgcgatgtgggagatcgactacagctgggagggcttcagctggatatccagcgacgacagcgcaaactccgtcatcgccttccgccgcatggacaaaaagggcgatgagctgatagccgtctgcaacttcacccccgtcacgcgcgaaaactaccgcatcggagtgccggacaagggcacttaccgcatagtcctcaacacggacagcgtcgagttcggcggcagcggaacaaagatgcagaaaacctacacgtcaaaaccgatcccgatgcactcgttcgggcagagcatttcgctcacgcttccgggtctgtcggtcgtttatctgaaaaaacaaggcaagaaagctgataacaaggaggaataaacatggccagaaaaacagaatgtatcgctatgctgctcgcaggcggtcagggcagcaggctcggtattctgaccaagaacatggcaaaacccgccgttccctacggcggcaagtacaggataatcgattttccgctgtcgaactgcgtcaactccggcatatacaccgtcggcgtgctcacgcagtatcagccgcttgagctcaacgactatatcggcaacggtcagccgtgggatctcgacagagagaacggcggcgtgcatatcctttccccctatcagcagatagagggcaccgagtggtacaagaacaccgcgaacgccatatatcagaacatcaacttcatcgaccgctattcgcccgaatatgttcttattctctccggcgaccacatctataaaatggactactccaagatgctcgcctatcacaaagagaagaacgccgactgcaccatcgcttccctcgaagttccgtgggaggaggcttcgcgcttcggtctgatgttcgtcaacgacgacggctcgatatccgagtttgaagagaaaccgaagcatccgcgcagcaacaaggcctccatgggcgtatacatattcacctggagcaagcttcgccgctatctgctcgaggacgaggcgaaccccgcctccggcaacgacttcggccacgatcttatacccgcgatgcacgaagcaggcgagcgtctttttgcctatcagttcgacggctactggaaggatgtcggcacgatagacagcctatgggaggcaaacctcgacctgctcaaccccaaggtcgatctcgatctgagcgacccgtcgtggaagatatattcccgcacccccaccgccccgccgcactatgtctcgcccgacgcaacggttcagaactccatggtgaccgagggctgcgagatttccggcgatgttgacttctccgttatcttcgcggatgtcacgatagaaaagggcgcggtaataagagactcgataatcatgcccggtacggttataaagtccggcgcggtggttcaatatgcaattgtcgcggagaacgcggtgattgaagagaacgccgttgtcggtgagcgtcccgaggctatggaagatctcgacaaatggggcgtcgccgttataggcaagggcgtcacggtcaaaaagggcatgaagattgagcccaaggccatgtatgacggagaaaaggaggacgttcgcaaatgagagccaacaatgttctcggcataatctatgccagcacctatgaccagtcgcttcccgagcttacaaatatgcgcacgatgggctctgtcccgttcggcggaagatacaggctcatagatttcccgctttcaaatatggtcaactccggcatctccaaggtcggcgttataaccaagagcaactaccgctcgctgatggatcacctcggcacaggtaagccgtgggatctttcccgcaagcgcgagggtatgttcattctgccgccgttcaactccgcagaggattccggcggactgtttgcaaacagaattgacgcgcttatcggctgtacgtcgttcatatcgagctctactaacgaatatgtcctgctctgtgactgcaacacgatttgcaatattgatctcaacctgctctttgacgcgcacgagcagagcggtgcggatatcaccgcggcatactgccacggcaccgttcccgcgctgagcaacaccatgacattcgacctcgactccgacggacgcataaaagaaatcgcaatttcttcgacaggcggcgctgagggcaactattcgctcaatgtgttcctgctcaagaagtcactgctcgaaagacttatctcccaggcggcgagcatgcactacaccgacttcgagcgcgatctcatccaggcgaatgtcggcgcgctgaaaatctgcggctataaaaccgagggctttgttgtaactctcgactccctcaagagcttctacgatgccaacatggctctgctcgacctcggcaaccgctccgagctgttctgcagagagcgcccggtctatacaaaggtacgcgacgaggttccggcgatttacggactcggcgcagatgtcaaaaacagcctcattgccgacggctgcaagatagagggcaaggttgaaaacagcattctcttccgcggcgtcaccatcggcaaggatgcggtcgtcaaaaactccatcgtcatgcagggcgcgtatgtcggctccggcgcgacgctcaacagcgtgataatggataagatatctataatcaaacccgacaaatcactctgcggcaccgacaccttcccggtatatgtcggcaagggcatagtggtctgatcgaaaggggactgaaaaatgaaagtcttatatgctgcaagtgaagctcttcccttcatggcgagcggtgggctcggcgacgttgccggctctctgcccaaggcactgcgcaagcgccttgtcggctgccgtgttgtcatgccgctctacagcggaataaagcaggaactgcgcgaccagatgcagttcatcacacatatcaccgtcccagtctcgtggcgcaggcagtactgcggcatcttcgaggcgaagatagacggcgttatattctattttatcgacaacgagtattatttcaagcgtgacggcatctacggtcactatgacgacgcggagcgttttgcgttcttctcccgcgcggtacttgagataatcccgcacatcgacttcaagcccgacatcatccatacgaatgactggcagacggctctcgtccctgtctactactcgacgatgtacgcaaaccgcgagggctatgagggcataaagaacatattcaccatccacaacatccagtatcagggcgtttacggcaaagagatactcagcgacgtgttcggtctcggcgaacagcatgagcagctgctcgatttcggcggcacgctcaacctgatgaagggtgctatcgaatgcgccgatgtcgtgaccacggtcagcccgacctacgcagaggagatactcgacccctggttcagccacggactcgatccgattctgcgcgagcgccagtataagctccacggcatcctcaacggcatagatacggatatatataaccccgagaccgacaaggcgattgcaaagaacttctccgcaaaagaccccgcaggcaagaaagaggacaaggcggatctccagcgcgagttctccctgcccgtgcgcgacgatgtgccgataatcggcatggtatcgcgccttgtgtcgcacaagggtctcgacctcgtcaaagccgtcctcgacgagctgctgagcactaccgatgttcagcttgttgtgctcggcacaggcgactgggaatatgagaacttcttccgcgagatcgaagcgcgttacccgggaaaagtcgggctgcgcatagcattcatccccgacctcgcgcgcaagatatatgccggatgcgacatgttcctcatgccgtcgaagagcgagccgtgcggtctttcgcagatgctcgcgctcagatatggcactctcccgatagtccgcgaaaccggcggactcaaggacagcatcaccgactccggcgacggcgagggcaatggcttcactttcaagagctacaacgcccacgatatgctcggcgcgatccgcagatcgctcggcgcgtattcggataagaaatattgggcttcgctcgttgaacgcgcgctcgaatgcgacaacagctggggacgctcggcgagagaatatatgcgtctttacagagagaccataggcaagtaacaaaaattcaagcggaggaccgcagtgaccgccgaagcgacggcacaccgtcggtcctcgtttttttacggtgaaaagatatggttataaaatcaaacatgattgaccgccagctgcgcccgatcggcgaggctatccgcttcgtctggccgagcttcagcgagcggaagttcaaattctgcaacttcattctgaaaaatttcgggcgcggcgcggatgttacgccgtggaagataaagtgcgagcagataaagattccccgcgcggacgggagtgagcttcggctatgcgtatattcaccgagaaagcgcgagggcgaaatgcctgggctgctgtggattcacggcggcggctacgccatgggcatacccgagcaggatcacggcttcgtgcgctcgtttgtcggcgcaacaggctgcgtcatggtcgtgccggactacaaaaaatcgctctatgccccctttcccgctgcgctcgaggactgctacctcgcactgctctggctcaaggagaacggtaaaaaatacgggatgcggcgtgacaagatatttgtcggcggcaacagcgcgggcggcggaatgaccgcggcgctcacgctctacgcccgcgacaggggtgaagtgaacatagcattccagatgccgctctatccgatgctcgatgaccgaccgaccgagacttcaaaaaacaacgacgcgcccgtctggaacacgaagtcgaacatagccgcgtgggagctctatttgggcggcgactacggcacggacagagtctcgaaatacgccgcgcctgcgcgcgagacggacttttccggcctgccgccgacgctcacgttcattggcagcatagacccgtttcttgcggagacaaagagctatgtcgaggcgctgcgcgcggcgggtgttcccgttgagttcaggatattcgagggcggattccacagcttcgatatatattattttgcaaacatcgccaaggaggcgaacaaattcatacgcgacggttttaaatttgcggcggagaactactgcgcgccgcagcctgaggataaataaaccgtggacagcgtgtcgataaacctatttcggtggtttcgcaaaaagcaaagcctcccttgtgtaaagggaggtggcgcgaagcgccgaagggattgttctgaataagttgaattttttcaaaaatgctgagtattttgaactttgattacaacaacccctcagtcacggcttagccgtgacagctccccttacacaggggagccttgagtccgttcaatgacagacttttcgataaataaaccgtggacagcggcatatgccgctgtccacggtttttcatattcggttatctgttccaaagggcttcaaattcatcctcgctgtatccgcgcaggatatagtaatactccgttttgcacctgaactccgggcgcgcccttgagcgttatacgctcctcccgcccgtcggagtattcgacggtgaacataaagctccagcccttccagccggaatatttgaagaagctcttataaagcgtcatgctgccgagcttctccgcaagctcgcggcactggctgtcggtgagcacgatttcatccggcggcgcttgcgtcactgtggatttcgcggtgatttttgcaacattttcggcgtcgaggcttaccgtatgcacgcgggcagcgaacacggccgaggcaacgacaagaatgagcataatcgccgctaaaactgttttgcggtgctttttcatatgctgctcctttctctgtgtcccgtggattacccttctccgattaaattctaacatatttattttttttgcaacttatttgtaaaaacaacgccgcagggaaaaacctctgcggcgttgaaaatcaattttttatctcttcaggctcagctcagacgagctcgatgatgcacatctctgctgcgtctcctctgcggggacctgttttgattatgcgggtataaccgccgttaacgtccttatatttgggggcgatatcctcaaagagcttctttgcaacatcttctttagtgatgtatgccatgactttgcgcttcgagtgaagtgagttgtccttagctatggtgatcatcttctcggccatagcgcgaacttccttagcccttgtaacggtggtctcgatcctgccgttctcgaagagatatgtgaccatacctctgagcatagaaatacggtgatccgtagttctgccaagttttctggttccgggcatttaattcacactcctttaccgtagtgagtcttattcctcttccttgctgaggctcaggcccatggatttgagctttgcgataacctcgtcaagggattttcttccgaggttgcggactttcatcatgtcctcctcggtcttgctgatcagatcttcaacagtgttaatgccggctctcttcaagcaattgaaggaacgcacagacaggtcaagctcctcaatagtcatctcgaggactttctccttggcattgtcgctcttgacaaccataatctctgtatcgtacgcctcatcggagaggtcgccgaagagagagagatgctcgttgaggatcttggctccaagggaaacggcttccatcgcgtggatagtgccgtcggtccacacctcaagcgtgagcttgtcgaggtcggtaacatgacctacgcgggtgttttcgactgtgtagttgacctttaacacgggtgaatagatcgagtcaatggcgataacgcctatagtgggcgggaacttctccttattgcgctcggccgaataatagcctctgcccttgtcgcagacgagctccatgtggacgttcgcgctgctgtcaagagtggcaatatgaagatccgggttgaggatctcaacctcagaatccgtctgaatgctgcctgcggtgatctcgcactcgccggaagcgtctatatagacagtcttcggaccatcgccgtggatcttgagtatgacatccttgaggttgaggacgatctccgtaacgtcttccttgacgccgggaatcgttgaaaactcgtgcaggataccatcgatcttaacggagattatagcatagcccggaagcgaagagagcaggacgcggcgcagggagttaccgagggtcgttccgtaacctctctcaaggggttctacgataaacttgccgtaggttccgtcgggcgtaatgccttctgtttcgatcttgggcttctcgattccgatcattcaaaaccctcctttttataaaacgcggcaaggccgctgaaagagtattgctcaaaaacaagccgtttaagcttaagcggcattatttcgagtacaactcgacgataagatgctcttcgacgggaaccatgatctggtctctctcgggaagggcgatgaccttagcggtgagcttatcagcgtcagcctcgagccatgcgggcacgggacgagcggaattggtctcaagaacagccttgatcttgtcgctctctctgctcttctccttgatcgaaacaacatcgccggccttaagaaggtatgacgggacgtcaactttcttgccgtttactttataatggccgtggacaacgagctgtcttgcttcggctctggagttagcccagccgagaagataaactacattgtcaagtctgctctcgcagatacgaagaaggttttcaccggtgacacccttcttgcgctcagccatgaggaaatacttgtggaactggccttcctgaataccatagtaacgcttagcctgctgctttgctctgagctgcaaaccgtattcagaggtcttcttgcggctctggccatgctgaccgggggcataagaacggcgctcaaaagcgcacttgttgctgtagcagcgctcacccttgaggtagagcttcttgccctcgcggcggcacatcttgcagaccgcacctgtatatcttgccatgtgttacacctcctaaaatattggttacacgcgccttctcttgggcgggcggcagccgttgtggggaatgggagtcgtgtcctttatcagggtgacttcaagacccgccgtctgcagcgctcttatagcggcttctctgccggctccggggcccttaacataaacctcaaccgtcttcataccgtgctccatagcagccttggcagctgtctctgcagcagtctgagcagcaaagggagtagattttcttgagcctctgaagcccatttcgccggcacttgcccaggaaacagcgttgccctgagtgtcggttatagtgacgatggtgttgttaaaggtggattggatatggactgcaccgcgctcaatattcttgcgctccttgcgcttacgggtgcctgttgcttttttgccggaaactttggtagccatattatccctccttgattacttcttcttgttagcaatggtcttcttcggacccttgcgtgtacgggcattggtcttggaacgctggcctctaaccggcagacccttgcggtggcggacaccgcgatagcagccgatctcgacgagtctcttgatatcgaaagcggtctcacggcgaaggtcaccctcgaccttgcagtgatgatctatatactcacgaagcttagagacgtcatcctcggacaggtccttgactcttatatcgggattaactcctgttgcggcgataatatcgcttgcggttttgcgaccgataccgtagatgtaggtcagagcgatctcgactcttttctctctaggcaggtcaacacctgaaatacgcgccatttgtcagttgcacctccattgaatggtttgcgtcattagccctgacgctgcttgtgcttgggattttcacagatgaccattacttttcccttgcgcttgatgatcttacacttttcacacatttttttgacagaaggtctgactttcattagaataccctccttttacttggaacgccatgttatgcggcccttcgtcaggtcgtatggcgacatttcgaccgtgaccttatctcccggaagaatgcggatgtagttcatcctgagcttaccggagatatgagccaatatctggtggccgttttccagctcgactgtgaaagtcgcgttgggcagagcctctactaccgtaccttcaatctcgatcatatcctgctttgacatatactaacctccctacaatgatgcagtctcatcctcaagccttctgagcgcgcggcgcaggcggctgtcaaacgccatatcctcctgcgtcagacgcatcggcgtcggctcgatgtgcttaggattcttgattttgggtctgaggagcttgcgctccttaccgtcgcagacctcgacgccgcgctgcgtgacagcggtgactgcaagcagtctgcccttgtcgcgtccggccgtggatcttacgacgcagcctcgttgaaagctcatcatcaatcctccgcttaaagctgagtcattatcttcggcccgtcagccgtgatggcaacggtgtgttcgaaatgagctgagagtttgccgtctttggttctgacagtccatccgtcgggttgagtacggatagccgcagagccctgatttatcatcggttcgatggcaatagtcatgccgggcagcaggcgaacgcctcttcctggcgtgccgaaattcggtacgctgggatcctcatggagatttgcacccacgccgtgccccgtatattcgcgaacgacggagaagccgcgctcctcgcagtagctcgcaatagcgaagcctatatcgccgagtctgccgcctgcgacagcctttttgatgccttcatagaggctctctctggtcacgtcgcacagccgcttcgcctcgggggaaatgtccccgcaggcgaaagtggcagcgttgtcgccggtatagccgtttatcgaagcgccgaggtcaatgctgactatatcgccgcttttgataacacgtctgtggctgggtattccgtgaatgatctcatcgtttatggaaatgcatgccgtagcggggaacccgttgtaattaaggaacgtaggcgtggcccctgcttttagaatatattcgtgtgcgatcttatcgatctgagcggtagtaacgcccggctcgacagcctcgcccgccacttttaatgctcctgcagatattctgcaagcctctctcatcagcgagagctcgtgacttgttttgagcactatcatgcttatcctccgtttttgccgttagttgcggcagggcttaatcaaggaagcccttgtagtgacgcatcatcatctggctctcgagctgcttgacagtttcaagagcaacaccgacaaggattattatcgacgtaccgccgagcgaaacgttcataccgtcagcataaaccgttgtctttgtaaggatcagcgttgtaagctgcgagaacacgatcgggaagatagcgacgacactcagcaggagagctccgagaagtgtgattctcgaaatgatccttgcaatgtagtccgatgtgggtctgccggtacgaataccggggatcataccgccgttcttggcgatgttctgagacatctcaataggattgtactggatgctcgaatagaaataggcaaaagcgattatcagtatgaagtagataatgccgtaagcccagtgagtcgaggtgaacaccttgaagaaaccggtccagaacttgctgtctgcaagctttgcagacggaatgaacatctggatggtgggcgggatggaaagaatggagcccgcgaagatgatgggcataacaccggacatattgacctttatcggaatatgggtgttctggccgccgtacatcttgcggccgacgacgcgcttggcgtactggacgggaatgcgtctctcagcgttgtccatccacacgatgaatgcgaccatcagaataaggatgacgcagacgaagggtgaaaggaagtagtagacgccgcctcttgaccagtagctgccggtgcccgagccgccgaagagctgggtgatcagagcggggattctcgaaacgatacctgcgaaaaggattatcgagataccgttgccgatgcccttgtcgttgatctgctcaccgagccacatgataagcgcggtacctgccgtgaagcaaaggatgatgacgatggcctggaagaccattgcaaagcctgtgtaggcgctgccgtcagcagcctttgaaaggtatccggcgcttctgatatagaagtagtatgctacgctctggatgataccgagaacaacagtaacatatcttgtgatggaagcaatcttcttctgaccgtcctcttcctttgccagtctctccagaggaggaatagcgacgcagaggagctgcatgatgatcgacgagttgatgtacggggtgatcgacagagcgaacagagtaccgtagttgaacgcgtcaccggtcatcattatcagatagttcaggaaggtgctgccgtcctgaacaagattgccgccctcaatgaggatgtttgtgaacggaaccggaatagcggagccgactctgaagataagaacaatcagagcggtgaagagaatcttctttctgagctccgggatcttccatgcgttggcaaaagtcttgaacattttcagattacctctgcctttccgcccgcagcctcaatcttagccttggcggaagcagaaaaagcattagcctgaactgttagcttcttcgtaagttcgccctgtcctaagactttgacgccgtcgagagtcttcttgacaagaccggactcgacgagggcttctatagttacggtagcgccgtcctcgaacttgtcgttgatagctgctacgttaacagttgcgatctctttcgcaaaaatgttgacaaaacctcttttggggattcttctctgaaggggcatctggccgccttcgaaaccgatgtgcgcgttgcttccgcttcttgccttctggcccttgtggcctttaccggcggtcttaccctgacctgaagcagcgcctctgcctatacgcttacgctctttgacagaaccgggtgcaggtgaaagctcatgcaatttcatcattcagcacctccttgctcgacttcacttgtctcgacaaggtgggcaagctttctgatcttgccgcgggtggcagcgttgtcaggctgaactgactcgtcgccgatcttgtggagaccgagtgcataggcggtggcaatctgaggtttagtacttccgataaggctcttgacgagctttacgttaatatctgccattgttgtccaccctccttaacctaaaatttctttttccgacttgcctcttatagccgcaacttcatcgacgttgcgaagctgtgcaagaccgtcaagtgttgctctgacgacgttacaggggttgttggatctgagagccttagcacggatatccttgatgccgacagtctcaacgactgcacggacaggaccgccggcgataacgccggtaccgggtgctgcgggcttgagcaggacgacgcctgcgccgaacttacctataacctcgtggggaatggttgttcccttaagtgaaaccttcatcaggttcttcttcgcatcttcgatacccttgcggatggcgtccggaacttcgccggacttgccgagaccgaagccgacgattccgttgccgtcaccgacgactacgagagcggcgaacttgaatatacggccgcccttaacggttttcgatacgcggttgatagtgacaactctttcagtgagttcatatgccgatgcatcaatcttagccaaaagtatcctccctttccttagaagttgaggccgccctcacgggcgccttcggccagttcctgaacacggccgtgataaacgtagccgccgcggtcgaaaacaacatcggttattcccttttcggctgctctctttgccagtgtgatgcccaccttgcgggctgcggatttatttccgccgtaatcctcaaaatccttctcaacagtagaggctgaaacaagggtcttgcctgaaacatcgtctatgatctgagcatagatgtgctgcagggagcggaatacattaaggcgggggcattctgcagttccggagatcttagcacgcactctggtgtggcgcttctgtcttgctttcttgctgtccggtctgttaaccataacttttcactccttaacctaaacttacttaccgcccttgccggccttgccttccttgcggcggatatgctcatcaacatacttgatgcccttgcccttgtacggctcggggggacgcttctcgcgaacttccgctgcaaactggccgaccttctgcttgtcgggaccggagataacgatcttgttgggcgcgggaacctcgatggtgataccgtcgatctcggccactctgacctgatgcgagaaaccgatattgagaacaagctccttgccctctttagcggcacggtaacctacgccgttgatttcaagctccttcttgtagccctcgctgacgccggtcaccatgttggcgacgagtgtgcgggtaagaccgtgaagggacttgttgagcttggtgtcgtcggggcgcttgacgtgaacggtcgcgccttcgacttcgacagccatattgctgtgcacggttctggtaagctcgcctttggcacccttaacggtgacagtgctgccgtccacctgcacagtaacccctgcggggattgcgatgggtttgtttcctatgcgtgacatttacagcacctccttaccagataaatgcaaggacttcgccgccgacattggctttgcgtgcatccttgtccgtcataatgcccttgcttgttgagaggatagcgatgccgagacccttcatgactctgggcatatcctcgcagttggtatatatacgcagaccgggctttgaaactctgcgcagaccggttataacctgtgacttgttggggccgtacttgagagcgatctcgatgacgccctgcttgccgtcgtcctcaaccttgaatcccttgatgtaaccctcatcaagaagaatttgagcaatcgccttcttcatattggatgcg

SEQ ID NO: 1026 - DNA, 28146 bp, unidentified
  source 1..28146: mol_type = unassigned DNA
gtgccaaaacgggacaagccggaaagctctcccgagtggacgcttcagaggtcgtgtgcgccaaggcacaacgcacataggatgcccccggagagccgcaacaagccctccgggggcatttttggttttcggtatctgttccgccgggaaaaagtgtggtatactgaaaccgacaactcggaatttgtggagataagtatgatagtacctgtaaatgaaacaaatcttcttcaagccgcaaccatccattcaatatcctggaaggaatcgcatcgtgcattttgtactcctgatttcatagaaacacacacgccagatcggcaacgggagtatttgaggaacaagatgaacaacggaacaaagctctatatgcttgtagaagaaaaaccaataggggttgtttctgtaacaaagggtttaatagaggatctttatattcttccagatatgcaaaacatgggttatggaacgaaattattgctatacgcagtaggccaatgtacggatacccctacgctgtggattcttgagaataatataaatgctgagagactctatcgtcgaataggctttaaggagacagggagaaagaacgcaataacaaataagcttgatgagattgagttcgcattgacataaattccagtttgccgggcagacaggcatctgaaaaaccacacaaaaacgagggagcagccatggtgctttatttttcgggaaccggaaacagccggtatctggcgcggtgcattgccgaagggctgggcaagaccgagctgaccggggcagagcgcatctgatttgtgatggactgcagcagcgagatcgacaatgcagcaggacgtgtgaaggaaagcggaaaacagatgaagtttttatacttgcatgggctaggacaaaaaccagacagttgggacagagtaataaaagaaacgaaggtctcagacagcagcgtcagcttgagtctggcagagatgctggagggcaaagcggccacctatggggagctgtatgctgcattctcaggaaggtgcgacaaggaaaataatgagatcgttttgtgcgggctttccttgggtgcggttctggcacttaattatgcgatagaccacccggacaaagtaaaggcactggtgctaattgcagcacaatatgaaatgcctgaaaagctattgaagttccagaatctgctgtttcacgttatgccgaatgcaatgttcgagcaatttggcttcaaaaaagcagacgtgattcgcttgtgcggcacgatggcggaattggatctcagggattcattatataaggtgtcctgtccggcattgatcgtttgtggagaaaaggacaacgcaaacaaaaaagcctcaaaggaacttgccagttatttgagcgatgcccacttccatgagcttttgaaaacaggtcatgaagcaaacatagagtctccagaggaattggcaatggtgctgcagaggttttatgataatattatcggatagtctacgatctacaccctgaaggatcgctgtctgaaatacagtacacttagaatagtgttttctccattctgccggttgaatggcgtttgaagttaaagaggatcttgctgatcatataataacgatctgcatttggctcttctgtaacacagtcacagaagctgcagacccatggcgatgatccacatataggagcaggtcttggggatcatcagcaggcccactttaggcttggtcttactgaaaagggtcacaggcaggtagcagccaaaggaaataaggatggctgccaccatccgggtcatatggtagtcgccagtattgccggagatggcgtacaggatgatgacgccgaggccggtaaaggcaaacactgcgttgcgcaggacggacagggtggggttgccctcatcggtacaccagttgttctggggcagcaggcagatcaggatgcgcaggatggcagacagccagatcaggacttccacagctacgggagcctgaagctgagggaaggtggccttccagacatacagcaggatgatatagaataccgtcatggtgatggaagagacctgcagcccgatgccgagctgctttttgattcggtcgctgctgcctcgcacggcccggatgatccggggcaccagatggaaggcgtcaccgccgcagagggtcagggtcaggacgccatataggataaaaaggctgcggccctgagccatcgtgaaaaagaggatgcctgcgatgagatcaaagatcagataggcggcatcgaacaccgcctccatccgatcgggcattttgggttggtaggctttatgattcatgatgtgtcattccttttattttgaggcattcttctgcgttgtcgcatatcttctggaatgcctgtttacaagctgcgatctgaggctctgagagtccctgaaacatatctctggcaaactgccgctgagcctcaagcccttcggcgatgatcggctgagccgacgcggacagatagacatcgatatgctttttgttcccgtcggcgacctttttttcgatcagtccccgctcctccagcactttcagtgaggtggagacatgagatttggtggaattgcgcacccgtacaatatctgcggcggtatggtactgaggattatggtataaaaacatcaggatatcatactccatctgccggagctgatatttctgacatacggatgacatcagcagctcatagtagcaggtaatggctttgtgatgatcccaaaagttcatagatacctcctgtgatatattgttctatttagaacgattgcattatatgctatccccgccgctttgtcaagaggaaatttctgccgacgatgttcttgaccggaaaataggactcattgccctgcggagccttttctgccacgtcaacacagtgaacaaagagtaaaaaacagcgaccccggagagcggtgggaatcactctccggggtcgctgttgtcaggacagggtctcttttgtatgcagacgtcggaaggcgtcctcttttacaagctcaatgaccaccgcagtcagagggataaagaagatgatgccgatgatgccaaaaagctttccgccaatcatggcggccacaagggtgtaaaacggagaaagccccacggactttcccaccacgcggggatagatgaactggttctcgataaactgcacggcaaggtagacgatgaggcagcgcaccgccagcacaggatccaccagaagcacaaggaacacgctgaccacacaggagatcagtgcccccacataggggatgatggcacagatggcggtgagcatccccaccagactgccgtaggggatccggaaaaccgaaaatgcaagggtcatgaggacaccgaggatcacggcctcactgcattgtcccgtcagaaagtttgcgaaggactgacggaacagccgacagaatttcagcagcccggcggcgtggctgggcttcagataggcgcataccagtgtgcgggcgtggtggcagagactctcggccccgagggacatatagatggagatgatcagggcaaaagatgcagtcaccacgatgttcacggtggcagataccgccccgaccgcattgaccagcacggtgtcgatgctgttggtgatcctgtgcagcagctgctcccagtcgatgccctccagccagtgcatcaaccagtccatgttggtgtcctgtgcgctgagataggcggtccagcgggggatattggactcgatctgcagatagaggctgtgaaacgactgcacaagctccgggatcagcagggtgagcgccagcaccagcacaagaacaacgccgagcagggtgatgaaaaagctgagaagatggatggcgctgcccgagggctgctttttggccctgcggaacaggcttctcagccgcttttccagtccggccataggcacgctgagaaaaagcgccagaatgccgccggccagaatgggcaggatcagatcgacaagttcggcggcaaaggccagaacggcagaaagccgcagcagtgcgacaaaaagcgttacccccacaacggtcacgagcagatattgttttgtttttggttccatgacgacattcctttcccggagcctgtagctgcaaattgcaaaagcccctcagcggactcctttatcgtattgtaatgggaaggaacaggcttgtcaagacgccgggaaggggagtggcggcccgcagcgatggccctgcctgtcggccttggctgtgcgcccatctatcccggcatcatccatgcaacgccgagccactttggggcagatcggtcgcaggcgatcattggagtccagatggcaagcgcatacgtcggaaattgtctgatgccaccgctgtttggcgtgattgcaaaccataccacgatcgcactcttcccctattatctgctggtgattctgattctgatgggctatatgcacgaaatgctgcaaaaagagaccggacgggtacgataaaacaaagacagctcaatgccgctgctgtatccgctcagcatgatgtttttggatgtggctctgccctgtgggaaacggcctgcaagagacggcagtttgataaaatgcgtccctaggaagaaaaacgatggagattgtatgaaagatgataaaagtattatcttttcgtgaattttagcactctacgcttgacactgctaataaatggtgctataactatggcgtgctcaggaggaagggcaaaagagagagccgcgaggtgatcgagcagctccccggaaagcttttccgaatgaacaacataaagattttttacccgacccgaacgccgggattggaggaatgatttatgtttatgcctgctgttttccatgagaatctgttcgatgatctctttgatccgttctggaacgatggcgcgctggagcgtgcgatgaaccgtgaagagcgtgaaaccttcggcaagcgcggtgcaaacatgatgaagaccgatgtcaagcagaccgagaacggctacgatgtggctgttgacctgccgggctgcaagaaggaagacgttcaaatggaactgaacgacggctatctgactattcaggcagtgcgcagccactcgaatgacgagaaggacaacaatggccgctacatccgccgcgagacattctccggcacctgtgcccgcagcttctatgtgggcgacgccgtgaagaaggaggacatccacgcaaagttcgaggatggcgtcctgcacgtcgagctgcctgctcctcagcagacgaaggctttgcctgagaacccgaatctgattgcgatcgagtaaaacgctggtcgtgtgcgccaaggcacaacgcacataagatgcccccggagagctgtaacaagccctccgggggcttttttgtggggcggaaacatggtacaataggaaagaacgagagagaagagggtgcgatgaaacaagaaaaagcctattatcacctgcccggtttgtttgagttttatgagctgtaccgggagtttctgcccctgtaccgggggcatcgggaatacttctatgactggtgcagcattggctccatctacggggcaccggccgactgcatctggggcgggggacgcaccggctttggcgggcacgaccccaaagaggtccttgcgctgatgcaggagtatggcatctcggcccggctgaccttcagcaactccctcctccgggaggagcatctttcggaccggaaatgcaatgcgctctgcgccctctttgcacagagcggcggggtggagaatggcgtcatcctccattcggagctgctgctggaatacctgaggacgcactacccgcagctttacctcgtctcctccacgaccaaggtgctgacggatttccgacagctccgggacgagacagtccgagaggaatttcgctatgtggtgccggatttccgactgaacaaggcctttgcacagctggacagcctgacgcagccccagaaggacaaggtggagtttctctgcaacgagtgctgctgggtcggatgccgggaccggaagcgctgctacgagaatgtcagccgcaaaaatctcggcgaggactgccctgatcatatctgcactgccccgggcgcgggggagggctaccgtttctcgaaggcgatggagaaccccagcttcatcggcgtggaggacatccggaggaccttccttccgatgggattttccaacttcaagatcgagggacgggggcttggcagcgccttggtgctggaatttctgctctattatatggtaaggccggagtaccagctgcacgtccgggaagccatctatctggacagtatgctcgacctattctgagcggcccggcctccgtttcgaaagcatcttgacaaagatgggcggagttgtaataatagagagacagttatatacaacaaactgccaaaaggagaaaacaattatggaagcattggaatgcatcaagacccggcgcagcgtccgccgctttaccgaagagcctgttaccccggagcaggtggccgaagtggtggccgctgccgcttatgcccccagctggaaaaatacccagatcgcccgctatattctcgtggaagatgcgcagaagcgtgagaaaatcgccagcgattgtgtgctggatttcacctataacgccaacacgctttcccatgcccccgcactggttgcgctgacgatggtgacgggacgctctggttttgagcgggacggcagctattccagcccgctcgaaggccactggcagtcctttgacgccggtattgccgcacagaccttctgccttgccgcgcacgcactgggcctcgggacggtcatcatgggcatctatgacccggacaaggtggcaaaggtgctctccgtgcccgaaggacagacagtggctgcgctcattgccatcggtcatcctgcacaggatcccgccgcacctgcccgcaagagcgtggaagaactgctgagcgtacagtaaatgagatgggtccggcattctggacacctgccacaaagtagataacatcaccccggtttccctttttgaaaggcagaagccggggtgatgttattctatttctgaccaaacccaacgggcaggctaccggagccgcccgttgggtttgctgcatctggcaaaacagcaaaattatgataggatttctccgtcagcaaagccccggtggacgcttgatcgtctactaattctactaaaattgaatctgtggttgtttttttgaggcaaattggacaataaatcacaaaaagattgacaatatcgaccaaaattttctaggggggggggtagaatagtgtcaaaaccccttgcgtacaaggtaacacaatggtaaaataaacttataaatagttttatcgcaaggcaagaaattcgtgcaacatgaaaacagcatatttgcgatatgcaattcaacgctgttgctgttgcattaaaaagttgaattgctataggatgtcgaacgcacggtatctcccacgagcgaatgagagataccccttaattgcggaaggggtgataggtgtggcgtttcgacgatttggacatcatccgagaacaggcaaaggtgcgctaactgggatgggacggcgcggggaaaaggtgcttgatggaagaattgcaaacaaaatgacccttggcgaagcagtcgtcaggggcgttttgcgtgccctgacgtatgggggtgctgcggatcgatgccaaaaagtgactgcaagtgcctctgccgttgaagctggataagagaacgtacagttggaatcgtgtgtgagattacatagtgtgagtgaggagaaaaaatgagcgtagaggtaactggaatcaataagccggctgaaattgaccgaaaggaaaatctgagggagcatcagctctattggatcgggcgtcggacgcaggatgtgatcttgtcgtcgctggcattggtggcgctgtcgccggtcatgctggctacggccattgcgattgtggtggatgacccttctgctggcccgattttctcgcaggagcgtattggacgaaacggtaagccgtttaagttctacaagttccgctctatgtgccccaacgcagaggcaaagctggacgatctgctggaacagaacgagatggacggccctgtgttcaagatcaaggacgatccgcgcattacccgcgtgggcaagtttatccgcaagaccagcctcgacgagctgccgcagctgtggaacatcctgaagggcgatatgagcatcgttggcccccgcccggcgctgccccgcgaggtggaacagtacggcgactacgaaaagcagcgcctgtatgtgacccccggcctgagctgctattggcaaattgccccgcaccgcaacgacctctcttttgaggagtggatggatctggatgtgaaatacgtcaaggaacgcagcttctgggtggattggaagatcatttttaagacatttaaggtgtgtttgctggggcatggggagtaaggattgcgatactgtctttcaggataactacatagaaacaaactaaatttagaagatatgcgcaatgagaatgggaggagcagtttattatgaagaattataagattgccgttgtaccggggctagagatataatacgcggctgtcataatagggcaagggtacggcagagaatgaaaggctccgcaacctgaagttcatattttcttacccgaagaatgaacgactgatctttttgggtgacagcaatgccatccagaaagaaatctcgaccatgagggtggggtgatagccagcggacaggcgagcgagcctatccgctgttagtgttggccgagatgttaatgaagaaattgagtgggattgtgggaaagatttatgagtaagaaacttgcgattgcgatgttcggacagaagcgattatcgagagaaggcggagtagaaatcgttgtcaaagagctctgcacccgaatggcacagaatggttgtgacgtgacctgctacaacagagcaggccatcatgtgagtggtgcagaatatgacgatgctggtaaaacggagtacgagggaattcgtcagaagtctgttccgactattgaacggcgtgggactagagatataatacgcggctgtcataatagggacaagggtacggcagagaacgaaaggctccgcaacccgaagttcatgttttcttacccgaagaatgaacgactgatcttcttgtgcggcagaaatgccgcacaggaagaaatctcgaccatgagggtggggtgacagccagcggacaggtgagcgagcctatccgctctttgtgttggctgaaataaaaattggcaagttgaaacatcaggttgatgtgtgaatagatgaaaaattccttttcaacggtacgggttgaaaaggtcaggaggagtaaaaacgatgagaaattacaaaattgctgttgcgggtacaggctacgttggtttgtcaattgctacattgctttcgcagcaccatcaggtgactgctgtggatattatcccggagaaggtggacatgatcaacaatcgtaagtccccgattcaggatgactatatcgagaagtatctcgcagaaaaggaactgaatctgaccgcaacgctggatgcaaaggctgcatactctgatgcggactttgttgttatagcggcccctacgaactacgacagccacacgcagcacttcgacacgagcgcagtcgaggctgtgatcaagctggtcatggagtataacccggatgccattatggttatcaagtccacaattcctgtgggctacacagcatctgttcgtgagaagttcaacagcaagaatatcatcttcagcccggagtttctgcgcgagtccaaggctctctatgataacctgtatccttctcgtatcatcgttggtactgacctgaacgatgagcgtctggttgaggcagcacacgagttcgctggtctgctgcaggaaggtgctatcaaggaaaacatcgacaccctgttcatgggctttactgaggcagaggccgttaagctgttcgccaatacctatctggctcttcgtgttgcttatttcaacgagctggacacctatgcagagagcaagggcttgaacacccagcagatcattgatggcgtttgcctggatcctcgtatcggcagccattacaacaatccgtccttcggttacggcggttactgcctgccgaaagacactaaacagctgctggctaactatgccgatgtgccggaaaacctgatcgaagcaattgttgagagcaatagaacccgtaaggacttcatcgccgaccgtgtcctgaagttggctggttactatggctatgacgaggacaacgagtacgatgaaaagcaggagaagcctgtgaccatcggcgtataccgtttgaccatgaagagcaacagcgacaacttccgccagagctctattcagggtgttatgaagcgcatcaaggcaaagggcgcaactgtgatcatctacgagccgaccctaaaagacggagagaccttcttcggctctgttgtagtcaatgatttggcgaagttcaaggaaatgagccacgccatcatcgcaaaccgctatgacaagtgcttggatgatgtgaaggataaggtttatacacgcgacattttccagcgtgactaaagaacaacaaaagaaggagggtagaggaaaatgaacacagcgacatataacaaggagtttcatcgcactgtgaagaaagccgaaatcccaacttgtaatattttaggagtggatattgcagccattgatatggagtggctgttagcatatctgaataataatattaaagctctggctggtgattatatttgcgtgtctaatgtacataccactgttactgcgtatgaagaagaggcataccggaaagttcagaatggtggaattatggctatcccggatggtggtccactttcttcagttggacaaaagcgtggatttaaaaatatgaaacgtactaccgggcccagtttgatgggtgaaattttcaaaatttctgcatcaaaaggttaccggcattatttttatggctcaactgatgaaacactcgaaaaactctactcagtgctggtggagacatatcctgggattcaagttgcaggaatgtatagcccaccttttagaccgatgacagaagaagaggataaagcaattgtcgagagaatcaatgagaccaatccggattttgtgtgggttggacttggtgcaccaaaacaagaaaagtggatggctgtccatcagggacgagtaaacggactgatgattggtgtaggtgctggttttgattatcatgccggtaatattgaaagagcaccggaatggatgcagaagagcaatctggaatgggcgtacagactgttgcaagacccgagaagactgtttggaagatattggcatacgaacacgaagttcgtttggaatgcgatgataaggggaaagtaagaggatgggaataacttataaactgaaattgttgaggtgtaagctgctccttgctcctcatagaaatatatctattggaaataatactacatttggtaggggaaccgtattttgggcgccaaataaaatgacaattggtaacaatgtgtatatcggaaaatattgcactcttcaagcagatatggaaatcggtaataatattgatatagcgaataatgttggtcttattggcaagtatgaccatgattattcaaaagtcggtgtaagcataaaagatgccccttggatcggagaggattcttatgatttcaagggaaaaaatcagaaaatcatcattgaagacgatgtttggataggatttggagcaatagtgtttacaggtgtgaaaattcatcgtggggcaattgttgctgctggtagtattgtgacaaaaaatgttccaccgtatgctattgttgggggaaatccggcacgtgttttaggtcagcgcttcacagaaaaagaaatcaaattacacgaagagatcttgtactcaagaaagggttaagagatgaaagtaggcattctcataacaagcattagtaattttggacagaaaggtttttataatgctcaagaaattggactggccaaagcaatggcaaagagttgtgaagcagtggaagtttataaattgattccgacagatctggagaaaaaaacagaaaaaatctgtgagaatgctgtgctacatctgattccatcaaaaagctccggtatcaatggggttgtcaaggttaatgaattaaatcgatctcttaccgcgctgattcatttttcggatacccagttttctgtgccaaaggtgtatcaatggtgcgaaaaaaacggtgttcagtatgtcccatatattggcgttgtggagagtcacagtaccagcagattaaagcagattattaccaatttacttttcaggaagaaccttgcggtttatcggaagtgttcctgttgcgtgaaaacacccacagttcagaagttgctgatggggatgggagttaagaatacaatcgttacacctgtgggactggatttagatctgctttatgtggattataaagttacttctgtagtggatttgaaggagaaatatggctattgcgaagcagataaggtgcttcttttcattggcagaatgattgatgagaagcaaccggtaagaatgattgatattttgtcagagctccgaaaaaaggacgcttcctataagttacttatggtgggcactggagaattgaaaaatgctgtagaagccagaattgagaaactcgatttggaggatgctgtacagttagtagagagaattccaaacagtgatatttgggagttatatcggttggccaatacctttgtgaacctgaaccagcaggaaatatttggtatggctattttagaggccatgtactacggttgtaaggtggttgcttggaaagcaccaggaccgaatttgattatagaaaatggaaaatctggatggttggcggaaagtaatgaaaagatgatggaaaaaattctggacacaacagattttggagaagagatacattgcagggtattacgtgaatttacgtgggagagtagtgctggaaaaatgaaacaaatcataaaagatgactttagataagggtgaccaataatatggataatgataaacaactagtaaaacagatcaaacaattggtaaaacgaataaaatttagagtgaattaccgtgatctaacaatattgcctgaagaagagggaaataaagcaattcatgaaatgatagcaagtggtacacctggatttgttggaagaggtggagctaccgaaatgcgctgtattagcgaatatctgatgggagagcctttttcagatagaattagaacggaaatatcaacgttatccggattttttcctacagatgatgataacttaaaaagattctgcgaaacttatatagaggcaatttctaatgcagatattgtatctctttggggtgttggcgcagaatcaaaagttgtgcatcgctcgtgcaaatttgcaaaatttacagagttacatgcacttgaaccatattatttctccaatccttggtcggctgcgttggaagggaaaaaagtcttggtagtgcatccatttaaagagagtattgaaaatcagtatgcgaatcgtaccttgatattcccagggacatcgattcttccagagtttgcttcgttgacttgtattcaggctgttcaatcaatagccggagagaacacggaatacgaaacatggtttgatgcattgaaatacatgcaaaaacagattttagatgtcgactttgatgttgcaattattggtgcgggtgcatatggcttgccactggctgcctattgcaaacgaattggaaagcaggctgtccaaatgtcaggtgccacgcaactgctatttggcattaaaggaaaaaggtgggatgcgcatcctgtaatctctaaattctataatgacgcgtggataagaccaaatagtaatgagacaccaactcaaaagggaaaagttgagggtggaagttattggtaaggagaagaaatcaaatgaaggaaaagattaaaaaactcctgtatattatggggggggggagagtaagtgaagaatatacgaacccgaatgcccttacatatcttcaaacacagtatccaataaaagagactagctttgttgctgataatagtattattgctaattatgatttgttagtagttgtacctgtatataatgtggaaaaatatattaaaaaatgtatcgattctattattaatcaaaaaacaaaatattctgttcaaattgtcattgttgatgatggtgcgaccgatgcatcaggaaagatagcagatgcgtattctccattggagaatgtagttgtgctccacaagaaaaatggtgggttgtctgaagcacgaaattacggaatgaaacgactgacaggacgctatattacttttgttgattctgacgactatattccttcgaaaaacgcttttgatgtaatgcttgatgctgcctatgagaaaaatgcggacattgttgcaggaaaatttttgcgatttgttgagaagaatggccgagaagttcagactattgatagaaaattagaaagtcatggaaatttggatgaactagatccgatacaagaactccaaggatttgcatgggggaaactgtataaagctgaactatttgagaatatatgctttcctgtaggatattggtatgaggatactattattccgtggttagtttttccaaaggcaaatacatcggtatatgctgatgtaatgtgttatgcgtatcgaaacaatcctaatggtattacagcttcaggattgttttcaaaacggacgattgaaagtacctacattacaaaacttgtgctggaaaaaattccgaatgagttttgccaaaaaagagaaatctacaatctctttattacacagtcatttattaacattcagagggtgaaaaatgcagataatgaaataatacgagccatattctctattatgtgtgaattaaaaaacgaattctttggagagatgaaacttgaagatggaatatataaaaatatggaaattgaaaaggcattgacagagtgtgattattctcgcatgaaacgaattctgcggtggctctaatgcctgttggagggattcctgtgaagaaaatatgtttttttacatataacttgtttgacttaggcggtatacaacgtgttgtaacagtgcttgcgtcagcactttgtgcagagtttgaagtatatattcagtgctacgatgaaccccaaaaagaaaatcgtgcgctttataacttggacagtcatgttaaggtgatttttgcaaagcgagataaccgtaaaagtactgttcgaaaaattttaagaaaacttaatcagaagtatgctttaattgaaaaaataaattgcagtcagctgtttgaatatgcttatatcttaccggaagaacaaaaactctataagaggattattgaggaaaatgatattgatatagcaattgcagtaggggcttttgaaagttacattttgggtagtattgcaaatcaggttcaggcaaaaaccgttggttggcagcacaattcatataaagcatattatgaaacacctggcatggcatgttggggaatgggatacattgttgagaagtattttccaaaactagaccgttatattgtcctaaatgaatatgatcaagaagaatttttgaagaaaaaaaattttgaatgtctaacaatccataatcctaaaagttttgtgagcaataagcaggcggaattgaagaataagcgctttattgcagcaggacgtttcatatatgcaaaagcatttgatttactgattgaatctttttcggagtttgcgaagaaaaataaagaatgggaactagtcatttacggtaccggagaaggatatgatacgataaaaacacgtattgaaaaattggaattaacggacagaattaaacttcctggattctctgatcacatgactgagaatttgttggagtcttcatgctatttactttcttctcgctgggaaggaatgccgatggttattttggaagctttggagattggtctcccgattatatcttatgatatcagcgctatgattccattggttgagaatggcgttgaggggatagttgtgcctcagtttgatacgagtgcattcgcacaggctatgctggaaattgctgagtctgaggaaatgcgtgtgcgaatgggaaaagctagcagagaaaaggcaagtcagtttactgtcgagaaaatcacagaacagtggtttcaattattgagagaattgtaatggggtgtatatgaaatcaattaagagtgagataaaacatcttttaggaatggatagaaattctattgatgccttacggagtcgtggggtaagaattggaaaaaactgctctattaatacaaattatatcgactacggacatggatttcttatttcaatgggagataatgttaccgttgctgttaatgcgatgattctagctcatgatgcaagtacaaagccatttttagggtattctaaagttggtagagttgatatcgggagtaatgtcttcattgggggagggagcataattcttcccggtgtaacaattggaaacaatgtaattattggggctggttgtgtagtaaatcgcagtattccagagaactcggtcgtagttggtaatccaggaagggtgattggaaccacaactgagtatttagaaaaaaatagagaaatgatgaaaaactcaccgatatatgatacatattggatgaataagacttctggagaaaaggagaaaatgcgcgcggatttatgcggaggaaccgtagggtttgatatataaatagggaggaacaatgaaaaaagtactgataattattcggagtttagctcatggaggagcggagaagagccttgtatcatttttaaacacagttgataaggaaattctccacgataatgaaataactgtggatctgttgctgacgcagcgaaatcagttttttgaatatcaactgccagattatgtgaatgttattgagtgtccatttgattatgcggcttattgtaactcgttgaaaagcctgatgaatgacaagaacagattttctttggggtgttttcttagaaaagtatattcgtgtctagtcaaaaagacacttggaaaatatactgagttggcttctggtgaaattcagtggaaatatgtaggaagaacattaaaaaggtttccggatgagtatgatgtagcaatggcttattttcatgacgcgtctgcatattacttgattgataaaatcgaggcaaagaaaaagataatctggatacataatgaatatggaaaattgggatataatgatgagtttgaacgggggtattattctcgtgcggataagatcattacgatctcagatagatgtgttgaaagtttcactaagcatttcccggagttgcggaacaaggtagaaatgattgaaaacatatcttcacgagtgttgattaataaaatggcgggaaaccagatacctgaagaattcaagaaagaaacagttaatattctttccgtaggacggctttgcgaacaaaagggatatgatattggaattgaagcttttcgtcatattcagaatattgaagtgccatatcattggtatattatgggagctggcgaaaaagagattgaattaaaagcacgtattagtaaatatggtttacagaatagaattacgctcttaggcttacgatccaatccatatccctatattaaatactgcaacatattctttcaaccatctcgttatgaaggaaaatccatagctcttgatgaagcgatgatccttgaacgtccgattgttgtgacggcatatgacacggcgatggactctattaaagatggtttaaacggaaaaatatgtggaatgagtagtgaggaagttgcggagggattgtcggagcttattgctaatgttcagctgagagaaaaatatgcagcgcaactgcatattgagaagcacggaaacgagaatgagatagagaaatactatgagttaatgaggtgaatgggttgaaggtgagaaagagtgacatagaattatttttaattctagtaggtatatgcataccacagggaattgcgggaataggcgtggtatcaaaagtatctacctttataaaactcatagcgtttttgtatgcagggatattggtcttaaaaaaaacagtgaagcttgatatattcttttggacatggacgatatattttgctattatgttggcttcaacattgattaattcaggaaatatgtcaacattggtgtcaaagtattatccattactcgcgatgattgttcttgcaaagtattttgtgatgcatagagaggctgacacaattaaagtagtaggaatactatttactggaatattggtcttgaattcaatattaggagtattgtatcagacaacattgatgagcgatgtggctgtgtatttgcttggtattcgaacacgaatcaatgatcttgcatacattgggatagtatttgcatttgccttacctttgatatatcgtaaaggatggatatggactggattaggttgcgtaagtgctatacattttattataaatcaaaaagtatccacaagctatatatgcattccaatgttgatattgcttatagtattgtcattaaagaaaacaaagttacttacggataatagtataaaaatatattggattataattttaataaatatcttggtgatttcaggaggaatgcttagtagatttggatggtttttttcagatgttctaggagaagatgcgacattaaccggtagaacgaatatatggcgttcggtgttggctacgatgccaggaaaatgggttttagggcatggaattggaactattcgtagttttttagtcgtaacaaataatacgacagcaacgcacagtcagttattaaacgagctatataatggtggtttggtgggcgttgcgctgtttgttataattgcctatttggttgtgaaaaagtgtaaagagagaggggatgcttttgctggattagttgccagtggcatttttgcgacacagattgctatgatatcagaagtagtgtgtgattcgaatttttacaatatatatcttattttgtgctattatcttttgtttgttgttccaccgatatatcataagaattcacaggaagaactaaaagatttatttcaatgcggggaggctaaaaatgaattcaaataaaggagaaatatcggaagaaaataatatgctcaaagctggactttggtatacgatttcttcaatatcaatcaaagcgattggtatcattactactccactttataccagattgctttcaacatcagattatggaaaagttattaccatgacatcgtggtactcgattatttcagtatttgttgttatggctttgtactacagtattggaagggccaaaattgactttccagggaaattaaatgagtatgtaggcagcctacaattgttttctggattggttacattaatattaacgattttttgtattgtatttattaagccggtatctgccctactgggaatgaataaagcatatactttaatactgttactatatttgatggcagagccggcaattattttaaatcagaataaatataagtatcaatataaatacaaaagcaatatagcgataagtgtatacattacgttggcgacacttggcatgtcttttgcgttaattttcattctcccagatcgtggaataggccgagctttaggaattgtgctttcggcagcattcttatcattgggaatgtggattagtgctctgaaaaatggatatattcattggaatactaaatatatagtttatggattgaagatttctgtcccgttgatacttcatacgatttcgcttagtattatggcccagtctgatcgtttggtaattacaaagttttttggcgatacacaaactgcgatctattctttagcataccagtatgctgtattgattgatttagttttaaacgctgttggacaggcttggttaccgtggtttcatgatacatatggaactggacacacagaattaatccgagaaaaagtaaagccattggttgtcttgggcggagtagtaactataggtgcagttgcaattgcgccagaggcaatgatgattttaggaccgaaggattatcaagtaggtgtttgggttgttgcaccagttgcttttggaacatttataaagtatcttttccagaactatgaacatgtagaactacatattaagaaaacttggtatatctcagcggcaactcttgttggtgccggagcaaatgtggttttaaactattattttgtgccgagatatgggtttatcgccgcagcatacacaaccatggtttgctatatttttctcatgctggcgcataattttgtggtaagagctattttaaaacaacatgtgtactcagattgttttttctatttatctagtattgtatgtggaatcttatgtgtaggagcagttttattgtatccatatgttttggtacgttatatgtcaattacggcaattgtcattgtgtttcttgctagcaacaagactgctattaaagaaatgttgaaaaagaaaaaagttaaagataaatggaaggaataggtcgaatgtcgagaaggataaaaaatttattgttcataatactaatctcagcatttattttaatgctaggtgtaatgctgtggtcagaaaaaatggaacaagagaagtaccatgaaatggaacttcagagacaacatttggaaatgataaaaccaacagatgataatagtattcgtctaattgataaaacaaactatagtggtcaggcagcgttgtcagagggcactattatagtagacttcgacgaattcagaagtaaagcaagcagaacaagctatttggatactcgtggagcgactgtgaactttaaattaagtaatagttcaaatgaatggggggctgttacttgatttcttttcagatgcgggcgacagagaaaaatactgcggttagttttagagccggaacagtagttgaggatctatatttgtcaacacaatggcaggaattctgttttccgttgaaacacatcaatgatttaaggatatgcttttcaatggaaggtgattttcaagtattggaaatgagcaattttgaaatacgaggattctcaaatgatacagatatgagtacactaccgtgtgggtattatcttcttgaagatgttgaagaagtgcaactccaagagaatgattatggtatcggcagaacaagcgattttttagtagataatgaatatatgtacacggttggaggaaacaaatttacaatagcaagtatagagaataattcatcacctaaagtaatttctacattatcaggtattggaaatggccgaagaatcaagcaggtaaatgaggatgttgttgctgttgctgcaaggcaaaatggcgtttattttatcaatatatctaataaaaattcaccgtacctaattggcagatataattctcttgatacggccaatgatatctgcataagtggaaatctaatgatagtggtcaatagatattatggaatagaatttgtcgatatttcaaatctcgattcccctcagtatattagccaaataagtaataacaaggagtgctatcgttgtacaattgataaccaatatttatatgtaagttgttgggccactagggatgtggaaatatatgatataacggatgttaatacgccacaattattgagtgatgtagagatcgatggtcggtgtggtgaagcgactattgaaaatggacttctttatgttgcgtctggatttaatgcaaaggataatagtgcagaagtgggggaattcggttacggtaccggaaacggattgacaatatatgacgtttcaaatccattgaaaccgattcttttgagtgttgttaaatgtgatggtagtctttttgcttcaggttatgatgattggtctgttcgtgtaaaaaatggatatgcatattttactagtgcatacgacggagtctatatttatgatgtaagcgatgctgataatcctattagagtgaaacatgtgactgtaccgctttacaaaggaaccgatgattacgaagatatgacggtaaacagcaactatgtgttcccatatgatgagagtatgtatcttaacgcgggtaactgggctcttgaattaggagatggtgttatatactttggtgctggtaattcttctatagcagtttatcctttcgagaaagctgaacgggttgattattcagagggaaaggggtggtctcttacaagaaaaagtgtgaacaataatgataagtatcaaattctgcttgatggatatgatgttacatctgttgctataaacgaagacgaaaagttgtacgttggaactagtaagggaatagtctgtctatcttcagatatggaagtactttcaatttatgagaccgaagaagcagttaaggatataaaatacaataacggatatctttatactgcggaattcaatcgtgtggcgatatataaagcctctgatgatggaattacatttatatccgaatataaggatttttgggatgattgctgtgtgtcagcagttgaggtgacaacagataataattatttggtattacaagcgtattggtcaagagctgtagtattagatattcatgataaagaaacccccaaatttgtccagacgattgactctgctacatctgaatattcatcaacattttcggtaacaccaggatccatgtatggaagaaatctaactaattcagtagataatattgtgggggtttacgggtcttctagtatttgttggctcaaatcggtaggtgattccattgaaatggaacgtatgtatagaaattcaatttatggtgaacttagcggtattgcaatattgtctgataatcaagcagttggagttgcaaaagggggaatggtcctatttgattttcagaatataacaggttctgcattaggaaatcttgaagcgattaagataccagatttttatctttcgggtaaaattgctatttgtgataatttagcaattctctccaatatggtttctggtgatatatggatgttgaatatttccaatgtatctaatcctaggctgtctaagcgttttcaaatacagggaaatccacaaattgcttgtcgagcaggaggttcagtcttaattccagcaagaaatggtggattaatttgcgcaaaagtagattaatatgagaggggtataaaatgaaagttggaatactaacataccatgatacaaagaattttggatcttggttgcaggcatatgctctgcagaaaaaatgcgaagatataggatgcgatgttgagattattgattatcaatgcccggaaataaaacgtagagaatgtcctccaccatttccaaagactctgaatcctaaaatgtggttaaaagattttttatatgtgcgacctttcagaaaaacatataaatcaatgaaaggttatgccaaaaagtatttcaatttaagcagaccatatacaccggataccattcaagaggctaattgggattatgatacgtttttggtgggttcagatattgtttggggaacgcatataaatggaggggattggaattatttcttatcatttgcagctgaaacgaaatcaaagtattcgtatgcatcttcagtcggagaaaagtggaaagctgatgaatttgctgaagttgagcgtttgctgacacgatttgactcaatttctgttagagaacagcagtctgcagattggattaaacaagtagcgtcaagagatgccgtagtagtgtgtgatccaacgatgcttttgactgaaaatgaatggagacaaatgatatgtccacgtaaaattaaggaaaagtatatttttgtctatttcattgattcggaaggaaagataattgaggatgcgaagaaattaggaaaaaaattaggaataccagtttattatgctggattgacaaaccgaatgaagggcgtacatagtgtaaagatttcaaatcctagtgagtttatgtcggcaattgctaacgctgagattgtaatgtgcggatcttatcacgggacattgttttcactttactttaataaaccgttttattactactataagcattcggcttcaagactacagtatttatcggatacatttcaattaaagagtcgttttggtccggaatcagattttgataatatatatgatattgattaccaagaaattaataaaaaaattgagaaatttcggttggatggaatagcatatcttactaatattatggaaaataatgaaaaaaagtaaactggatttttccatacaaaatactgagtatttcatatgcatatgggaggatagaatggagtatacagaggaatttagaaggcaatatgagtgccccaattatcgtgtgattgatactacttcggggggggggtactgctatatatatttttcagggaatggcgtttttgatccagatacagaagatgccttccgaaatatgataatcaataaagaccggtatgaatggatccgatggagtacacaatcagaaagaaaaatatacttaagggatatccataaagaatggtatttcagaggtattaattcggtttataatacaatcgacaaagtactatctttgctaaagataatgtctaaaggatataagatagtaacagttggcagttcagctggtgggtatgcggcaattttatttggtatattgctgggtgcagaacgagtatttgctttttcaccgcaatttgatttgactgaatggttagaaccaagaaagctcctaggtacaaagccatttgttcagcaggaaagatatattaatattgttgatattataaaagaaagtgatacagagatcttttactttttccctgcatatgttgatgtggatgtttttcaagctaaacttgtggaaaatattccaaatgtatatatgttcggaataaaaagtaagttacatggaaaagcgttatatcctaactgtatcccacacgttctttctgctgaccttggcagtttaaatagaatgaaaaagcagtttcagaataaaatcgtgtcgccattctattttgcaattgctaatggtggaataaaagtggctatcattggaaaagaatatgaaatggcaaagttaatatactatcctttaaatgatatccgaagaaagtgtaaaatcgggagacagaaaggataaattcgagaaaaaattatctttagttagtggcggaatatatgcatttagacaggaagtaaagaagttttttaaagagtaatcattaaatagggggcaaatatggaaaaaaaaagattgtactatattgacattgcgaaaggaattgcaatatttttggtagtactaggacatacatatcgaggaaatatagttcagaattggctgtattcttttcatatgccgttgtttttctttatttctggatggctgtatgagggaaagaataattttgaagatggattcccgaagttcgttttaaaaagaaccagaagattacttattccatattttgtttttcttatgctaaatttcgtatattggattatagtagaaaggcattttcgatcgtttgatcaggggccattatggtttttacctgtgttgctaattgacgagtgtattgtggcggttgtagttaatgagataaagaataacaacagaaaaaaattgtgtgcctttttattttttgttgtgatattactttgtatcggtaatttgggaattgactatgatggaattatcggttggatggtgcgatgctataatggtattgtttggtattatgctggcttttgtgtttcgggatatatcaaggagaaaagcgagcgaattcttaataataggtcaagttggttgtatatcttgttctttctttttctcaacctattgtttggctgcaacaatggaagggtagatatgtatgaaaatagattcaatgatgtctttctatatgtgcttgcagcattttcgggaatattcttttgctttggaatatctgctgttattgggagaaataaggcattagagtatttaggaaagaattctttaattattatgtgtacacacgaaccaatcaaaagagctattatccaagttataagcattcttacacatgcttcgtcagagtcaattagaaataatatattaattggatttattatcgcaatatttgtggtttttgtggaaataattgtaattgaaattctacggcttttgagtagggcaacaaagggaaaaagaattcatattttcttcgagtatattaagtgatttgcaggaagaatgatgaagtaattactaaaaaaatgaaatggttattacgaaatacaattagagttatcaaaaaacaagaaagagacggataaatgccaaaatttagtataattttatcatgctataatgtatcaaaatatgtgataaattgtttgaaaagcattattaaaaatgatatgtcatcttgcgaaatacttgtgattgacgatggatgtactgatgatacgatagaaaagtgtagagattttataagccaatattttaggggggcatcactctgcaagtattgaaattatttctcaaaaaaatgcaggtgtatcatctgcaagaaatttaggaatacgacatgctcaaggagaatatatagtgtttattgatcctgatgatgaaatagatgcgaacttaattggtaagttggataaaaaatattaagttatcggaataagccagatttagtaatatggggacattggagcataaaggttgattcgtctaataaagagattaatagatatcaagtgcttccgcataagcagtatgaactgttttcaaataaagaggtgatggatgagctatttccaagatatatcggttattcagtggagcaagtgcagcattgggcatatcatggatcttttgaaccgaaacatgaatggggagcttgttggcgagtggcttataaaagaactttattagtagaaaatggtatttatttcaataaacaaattcgattaaacgaagatagtatgcttaatgcaaacgcgcttgtatatgcaaatagtgtgctaacaattccggaagcattatactgttattatattagaaatacaggaacaatgaaaaaagcgttgcttagttcattgatagagaataagaaggaattgttcttagagcgtaagaggatagtaagcttgattcaaaatccagagattaaggtagacttcagtatatatgtagggtccatcatttttggaataattgagataatgacttcagcattattgcgagagtggcatgaaatatcagatttgctatgcgatttacatattaaacagtgtatatgttatatgccgtatgtgaaaaatgtaaaattttcgatatgtctctttcttttgaaaaagtatttgtcaatttgcttatttgcgggaatccaagtattaaagaggatgggattaagaatatctgcgtgaaaaatcctaagaatataagggtggaacgattatgaaaaatgaaaatgttagtcttagtatattaaagagtatagcatgttttagcgttgttgatagtattggggtctgaccacctaaaggaaaaacaaagcttttctaaagaaattataaattaaactgggagcaaaagatattatgaacacaacattacttattatggcagccggtatcggtagccgttttggaacaggaatcaaacagttggagccggtggatgcctcaaatcatatcattatggattactcaattcatgatgcaattgaggcaggttttaaccaggtggtatttattatccgcaaggatattgagaaggagttcaaaaaggtaatcggtgatcgtatcgcagctatttgctctgctcataatgtaactgtagactatgcttttcaggacattaaggatattc

SEQ ID NO: 1027 - DNA, 15035 bp, unidentified
  source 1..15035: mol_type = unassigned DNA
  misc_difference 12874: note = a, c, g, or t
  misc_difference 12875: note = a, c, g, or t
  misc_difference 12876: note = a, c, g, or t
  misc_difference 12877: note = a, c, g, or t
  misc_difference 12878: note = a, c, g, or t
  misc_difference 12879: note = a, c, g, or t
  misc_difference 12880: note = a, c, g, or t
  misc_difference 12881: note = a, c, g, or t
  misc_difference 12882: note = a, c, g, or t
  misc_difference 12883: note = a, c, g, or t
  misc_difference 14984: note = a, c, g, or t
  misc_difference 14985: note = a, c, g, or t
  misc_difference 14986: note = a, c, g, or t
  misc_difference 14987: note = a, c, g, or t
  misc_difference 14988: note = a, c, g, or t
  misc_difference 14989: note = a, c, g, or t
  misc_difference 14990: note = a, c, g, or t
  misc_difference 14991: note = a, c, g, or t
  misc_difference 14992: note = a, c, g, or t
  misc_difference 14993: note = a, c, g, or t
ttactcatcccagcttagcctgtgaagattgcccttgcacaacaggtcggggtagttccattgtctgagcgtttcatatacggcaaccgctacagaatttgacagattaaggctgcgtgcctcattaatcataggaatacgcactgtggtgtcgggattatcgtgaagaagctgctccggcagtcccgctgtttctctgccaaaaagcaggtatgcaccgtcgggatatttaatgtcggaatgtatatgccgtgcctttgtggagaaataataataagggccgttggttcggctgaaaaaatcatttatattgtcataaacagtaatatcaagtaaatcccagtagtccagtccggctctttttaccgccttttcgctaatgctaaagccaagaggccttactaaatgcagccttgcaccggttgccgcacaggtgcgtgcaatatttccggtattttgcggaatttcgggttctaccaaaactatattaagctctgccataaaatatattgtcctttctgttataaattattactctctgtacaaaatagaaaaaggaagtgattttaaattgaacaacgaagttttacttctggaaaatatattaacattctatactctatacaggaggtgtaaaaaaatgactaaaaatgcaatgagcgttgccaagggtgttgctgccgtggtagctaccggtgtggtagtaggctatgtaagcaacaaggttatgcagaaaaaccctaaaaccgttaaacgcaaggcaaacgatgccgtaagtgcaatgggacaaattgtaaacgatatttcttatcttttaaaataataacaagcaacacaaggtgcacagggcaagctttccctatgcaccttattttcagtttttctgccttataggcttttctgggcataaataaagcttaccttatagttcctccgcctactacatactctccgtcgtaaaaaacaacagcctgtccctttgtaatagccctttgcggccggtcaaactctactactaccttgtcgttatctacagggtgtatagtagccggagcctcattttgactgtagcgtgttttagccgttaccttaacatcactcttaggagcgtctatggcaatccagttaaggtctgcagccgtaagagtgtttgtaaacaggtctgaattttcgcccaaggttactacattgttgtcagggtttttatcaagtacaaatatagggtgccggtagcttatacccaagcccttgcgctgacctatagtgtagtggataatgcccttgtgtctgccaagcactgtgccgtccttgtacacaaagtccccctgtggggtatgcacgcccattgtattttccaaaaagcctgcatagtcgccgtcctttataaagcatatgtcctgactgtcgggctttctggcattaattaaattatgctcctctgccaaggctctggactgctcctttgtcattgagcctaaagggaacaaagtatgccttagcatattctgtgtaagcacatacagcacatatgtctggtcttttctgccgtcaaccgccttttttataagcaccctgccgtttgagtctacttcccgctgtacatagtgaccggtggcaatgtagtcgtaattcaaaagctttgccctttcaagcattttggcaaactttatgtatttgttacactctatgcaagggtttggagtttcgcccatttcgtagcttttggcaaatctgtttataacctgctccttaaactgctcgccaaaattaaaaacatagtggcgtatgcccagcttgtagcatactgttcgggcgtccataacatcctccagcgaacagcaggtgcgtgtattgcttacgccaatatcctcgttattaaaaagacgcagtgtagcaccgtcggtttcgtagccctgctgttgtaaaagcaaagcacaaacagagctgtctacaccgccgctcatacctaccaaaactctttcagccatatttttcaccttctaaattcaaatagtctgctttgtagctattataacacattacaaaaaatacggttacaaaaatttatgggaatacaacccctgtattcccataaataaataccaaataccgtttaaggcttattatattttaacgatatttataaattagtccttcatcattgtaacaagcacagccttttgtgcgtgcagtctgttttctgcctcttcaaaaatctcatccgcgtgtgcctcgaaaacatcggctgtaatttcttcgccacggtgtgcaggcaggcagtgcagtaccatacagtctttatttgtaacgctcataaggtcagcgtctacacagtaaataccggcaaaggattttgcacgaagctgtgcctcctgctcctgtcccattgaagcccatacatccgtataaactacatctgcattctttgcggcctccttaggctctctgtacaagccaaacttgtcaccgtattcctttgcaaaatcaagaatttccttaggtgggtcgtaaccctcagggcaagcaacggtaacgctcatacctgttttaagtccgcctacgattaatgagtttgccatattgttgccgtcgccgataaagcaaagctttagcccctctaaagagcccttgctttctcttattgtcataaggtcagccataacctggcaagggtggcagaaatctgttaagccgttaattacaggaattgaaccgtattcagccagtgcctctacctctgcctgctcaaaggttcttatcataatgccgtcaagaaatcttgacaaaacccttgcggtatcctgtacaggctcgccacggcctatctgcatatcgtttgcagacaaaaacagtgggtaaccgccaagctggtacatacctacctcaaaggaaacacgggttctggtagacgccttttggaatatcatacccagtgttttgccggcaaggtgcttgtgctcaataccgtgcttttgctcatatttcagctggtcagcaaggttaagcatttctataatctctttaccgctgtagtccagcagctttaaaaaatgtttcattaattgctctcctttatattgaatttatattaattaaatactaagtaattattgtctgaaatattaaaaattacagacacttcttaaatatttcaaggcccttgttaatttcgtcctctgttatgttcagtggcggaaggaaacggattagagtcttggctgtaagaaccaaaagtccgttttcaacacattttgcggctacctctttagcgttgtccttttcaagtacaacgcctatcatcatacccataccacgaacctgacttacaccgtccatagcggacagcttttctttaatatactgtcccttttcctgtacagactttaaaaattccggagtatttacacggctaagcacctctaaagcaccggcacaggctatagggtttccgccgtaggtagtaccgtgagtacccggcgtcattacatttgcaagggcctcactgcacaggcaggcacccataggcaatccgccgcctataccctttgcagaggacacaatgtcgggcttaattccaaactgctcgtagcagtaaagagtacctgttctgcctacgcctgtttgaacctcatctataattaaaagcaaatcgttttccttgcagtagtcggcaagctgctgtacaaactccttatcaagcgggtttacaccgccctcgccctgtataagctccaccataacagcacaggttttttcgtttaccttttcttttacgctgtttatatcgtttgccttagcaaaggtaaagccctcggtaaacgggaaaaagtaattatgaaaaacctcttgacctgttgccgccagtgttgtaactgttctgccatggaaggaattttcaagagttacaatttctgttctttcttttccgtacttttcaaagctgtactttcttgcaagtttaattgcacactcgttagcctctgcgccgctgttggcaaaaaacaccttgctaaagcctgtagccttgcaaagctttttggctagctctgtttgcagtgggctgtaatataaattggaaatgtgctgcaatgctgccgcctggtcagaaaccgcctttacccagccgtcgtcactgtagcccaggcagtttacgcctattccgcttgtgaaatcaatatattccttgccgctttcgtcccaagcccttgcacccttgccttttaccaaggctacattaaacctgccataggtatgcataaggtattggctttcgtcggcctttatttgttccagtgtcataatacttcttccttatacttaaattattttttctcgtaggagtaaacaaaaatatcgtcacgcttttcaaagccaatactgctccaaaagctctgaccgcaggaattgtcctgataggtaaaaatatgggttttatgtattccctgctgtgccagcttctctatagccattgtagccatagcttttgctatgccctttcttctgtattgcggcataaccgccatatggtgtataaagccacgcctgccgtcgtgacctgccagtacagttcctactattttaccgtctgctacagctatttggctaaggcccttattcctgttaaggtaatactcaatttcttctctttggtcggcctctgacaaggctcttttagaggtaatttgccacatagcaaatatttcatcgtagcagtctatagtcatttctttaatttgtaccgacataatccaccccatataattttaaaatataatgcaaacctgccccaatagaaaagcagtccattaataaaacattgtaccgataccctcgtcagagaacatttcaataagaattgaatgctctattctgccgtctataatgtgggcacgcttaacgccctgtcttactgcctctacacagcagtcaattttaggtatcataccgccgcttataatgccctcttttttcagcataggaacctcgcttacattcacaacaggaattaaagtattctcatcgtccttatctctaagcaagccacgaatatctgtcattaaaataagcttgcacgcacccagctttgcggctatttgtgcagctgcaatgtctgcgttaatgttgtaaacattgccgtcgtatccgcctgcaacagtggagataataggaacatagccgttgcttacggcgtcattaataacctgtgtgtttacctctcgtatttcgcctacaaagcccaagtcatcagctgtaataagcttgtctgccataagcatttttccgtcaagtccgcacaagcctacagccttgccgctgtggtcgtttaggcactgtacaaggcttttgtttaccttgccggcaagcaccatttcaacaatttccattgtttctgcgtctgttacacgcataccgtttataaacttgctttccttgcctgtttttttcagcatttggcttatttcagggccgccgccgtgaacaagcacaacatttacgcctaccaagtgcattaggactatatcgctcataacagcacttttaagctcggggcttatcatagcgtttccgccgtatttaacaacaatggtttgtcctgcgtacttctgaatatacggcagtgcctgtataagcacatttgctcttttttcgttagaaatatccattttttattcctcgctgtgtaaattaaaatatactgttttaggctttagaaagcaggcggtataatttcaagtcctgttttttcgtcaagaccgcatacaatattcatattttgaattgcctgtccggccgcacccttaaccatattgtcaatagccgaaacagccaccaatgtgcctgtgcgattgtccatatgcaatgaaacatcgccaaagtttgaatacttaatgttgtgaatatctgcaacctgtccctttggcaaaagtcttacaaagtattcatcgttataaaactcctcgtaagcctgtcttacctgctcctctgttacgccctccttcagcggtgcataaacagttgaaagaatacccctgtttaccggcagcaaatgaggaacaaatgtaatcttcaccggcttgtttgccaagtgtgaaagtgtttgctcaatttcaggagtatgacggtgacaagcaaccttgtaagggtgaaagccctcgttaaggtctgtaaagtgagtgttttgggacaagcctctgcctgcacctgtagcaccgcttttgcagtcggctataatgccctttgtttccactaagcctttagctacggcagggccaatggcaagaggtacgcctgttgtgtagcagcccgggttggcaatagttttcttgccctttatattatctctgaaaaattcaggcagtgcataaacggagtttttatgaagctccttgtcggtatattcaccgccgtaccattccttgtagtcgtcttcgttttcaagtctgaagtctgcacccaggtcaataaaaatcttatccttatcagagcacaccttagcaagctcctgtgaaagtccgtgtggaagtgccgcaaatataacctgacatttgtcaacaacccggtctgcattctcgcaaaccatatcgtttaggttgtaataagacgggtatacctgactaatagccttaccctcaaaactgactgagcttattgccgtaagctgtgcctgcgggtggctcataagcagtcttacaagctctgcacctgcgtagccggtagctcctataattcctaccttaatcattttatcatcctcttaatttttaatttatttctaaaaatctattttcaaaaccgtatgggtaattataattttactctgaaaattatttaataagctctctaacctctttaacggcgttaagtacatttgccgggccgccgtatgggcttctttcctttacgcacttttcaagcgagatggcctcgtaaacgccctcgtcaaaggtgtcgcaaattgccttgtattcctctataggcagggtttcaagggtttcgcccttttctatgcacagtgcaaccaatgagcctgttgccttgtatgcatctctgaaaggaagtccctttttaaccaaatagtctgcacagtcggtagcgtttataaatccgcctgcggcagccttgcgcatattttgcggaataaccgtcattgtatcaagcataggcgtaaaggcagtaatacacattttaacagtgtcaacagcgtcaaacacagcctccttgtcctcctgcatatccttattgtatgcaagagctatacccttcattgctgtaagcaagccctgcaagtcgccgaacactctgccggatttaccacgaacaagctctgcaatgtcaggatttttcttttgcggcataattgatgagccggttgaaaaagcgtcgtcaagctcaataaacttaaattcccatgagcaccacataataatttcttctgaaaatcttgaaaggtgaaccataataatagacagtgccgaagcaagctctaagcagaaatcacggtctgacacaccgtcaaggctgtttcttgtcatactgtcaaagcctaaaagccttgttgtaatgcttctgtctatagggtatgttgtgcacgccaatgcacagctgccaagagggtttacattcattcttttctgtgtatcctcaagtctggacaggtcacgcaaaagcatttcggcataagccataaggtggtggccaaaggttataggctgtgctctttgcaggtgtgtatagcccggcataacggtttcggcatactcctctgccttgctgcaaataacctctattaagcccttaacaagagattttaattcatctatctgatttcgcaggtacagtcttacatcaagtgcaacctggtcgttacggcttctggctgtgtgcagtcttttgccgttgtcacccagtctttttgttaattcaccctcaataaaggtgtgaatgtcctctgcctccatatcaatgcttagcttaccgctttctatgtcggccaaaatttcctgcaagcccttgcagataatatctgcctgctctttttctataatgccgcactgtccaagcatagttgcgtgtgcaatactgcctgtaatatcctccttatacattctgctgtcaaaggatatagatgagttaaaatcgtttgttgttttgcttatttccttttgaaatctgcctgtccacagcttcatttgtttcacctcataaattagtatatgggacgagcggcaaaaagcacccgtccctttagtattaattgctatttaatagtgcctaatcaaacaaaatcacttaattaagcccttttttgctcttacctctatcggcaggccaaacagattaatgaagccctcagaatcattctggtcgtaaacctcgtcctcatcaaatgtagcgatctcctcgtcatacagtgagtatggtgaagtaacgcctgcatcaataatgttgcccttgtacagctttagcttaacatcgcctgttactgtctgctgtgtgctgtcaacaaatgctgagatagcctctcttaatggtgtgtaccactgaccgtagtatacaagctctgcaaaacggttggcaacaatctctttgtaatgctgtgtatctctgtcaaggcaaatttcctcaagctttgcgtgagctgtatatagaattgtaccgcccggtgtttcgtatacgccccttgccttcataccaacaagtctgttttcaacaatatcggttataccaatgccgttttctccgccaagcttgttcagctttttaataattgaaacgccgtccagcttttcgccatcaatagctgtcggaatacccttttcaaatgaaattgttacatatgttggcttgtcaggtgcctgctcaggtgaaacgccaagctccaaaaagccctctttattatacattggctcgttagccggattttcaaggtccagtccctcatgtgacaagtgccacaggttcttatcctttgagtagtttgtttctctgttaatctttagaggaatcttcttagcctcggcataagcaatttcctcttctcttgacttaaactcccatgttctccacggtgcaataattgtcatatccggtgcataagctttaatagcaagctcaaaacgaacctggtcgttacccttacccgtacagccgtggcaaatagcgtcagcaccctctgccttagcaatttctacaagtcttttagcgataataggtcttgcaaaagatgtacctaacagatacttaccctcgtaaacagcacctgctttgattgtagggaatatgtagtcctctacaaactccttgttaaggtcttcaatatacagctttgaagcacctgttgcaatagccttttcctcaagaccgtcaagctctgtaccctgaccaacatcgccggaaacagcaataacctcgcaattattataattttcctttagccaaggaataataattgatgtgtcaagaccgcccgaataagccagtacaacctttttaacatctttctttttctttgccatgataatgacctcccgtatatttaaataaaatgcttttatttattgattacaagttatattatactcacgctatgcaaaaaatcaagaaatatttgtatatttattcaaacccttgattttttgtagcaatatatattttaatttaacatctttaaaaacttatctctagattttccacattttcaacatattttttgacaacagctgtacttcaagctgtttatgagtatacattattcaaatttttatgcatttttattcatatatacgcaaggtattgtatattgatttaagtaatgctataataatttcagcagctattaacatattttataatacacatttctaaaaaggagattttactatgagcagctttaagaaaattaaacccatagaaattacagaaaacccgtttaagctgataggcaatgactggatgcttgtaacagcagaacatgagggcaagtgcaatatgatgactgccagctggggcggtgtgggcattatgtggaataagcctgttgccttcacctttataagaccacagcgttacacctttggtatgcttgaaagcgaagatatgttctccctttgcttcctacctgaaagctaccgcagcgtgctaaagctttgcggcacaaaaagcggcagagatattgacaaggtgtcggaaacaaacctgactgttgagcatactgacggtgtgccgtactttgcagagtctaagcttgtgctggtttgcaaaaagctttacggtcagttcctttcagagaatagcctaacggaaatgtcgctaaagtccaactacaacgccgagggcagtgactggcacaagatgtatataaatgaaattgtaaaggttcttgtaaaggaataatatgtcaaaaacagcattagtaacaggcgcttctaagggtataggagcagaaatagccctgcagcttgcaaaaaacggctttaatattgccattaactacaacaaaagcaaggcagaggcagaaaaggtgcggcagaaaatagcagaccttggaggctgtgccgaaatattccaagcagatgtaggcgactatacagcagtaaaaaatatggcagacagcatatacaagaggtttgggtttattgatgttcttgtaaacaatgccggcatagcacagcaaatactgtttacagatattacaccggaaatttggtcaaatatgataagcacaaaccttaccggtgtgtacaactgctgcaacactgtgcttccgaaaatgatacattcgcacacaggctgtataattaacatagcctctatgtggggagaaaccggcggaagctgtgaggttcactactcggcagccaaggcaggagtaataggcctaacaaaggcattggcaaaggaagtaggtctaagcggaataagggtaaactgcgtttcgcccggggtaataaaaaccgaaatgatgtcctccttctcggaggacaccctaagagagcttaaagaggaagcccctcttaacaggctgggcactgcactggatgtagcaaatgcggttgtctttttggcagatgaaaaggcatcgttcattacaggtcaggtgctaagcgtaaacggcggaatactgatataacaaaataatacacaacgaaaaaggctttttgattgggaacattccctttcaaaaagccttttttgtatatacatcatatggttttcattttatcgatttccgatttttattttgttaattacaaagcctttggatttatccgagcaaagacacctcttttttgtcattcatatagaacattgcataggcaaaggaagcaagcattaaaagcaggctctataataaaagtcgtggtaagtaaaaaagcctgcaagcctagacaaagctccacgcattttaaaacgacacaaggcagacacctttttgagagtatctgccttgtgttagttaatttataaggatttacttattatcttcaaatgtctgagaagccaggaactgtaggtgagcaagctttttagctgcctgctgttcagctctgttaaacagaagatctgctctctcagggtttgcacgagaaagtgcgttataacgaacctcgcccataataaagtcacgatagctcattgtaggagccttagaatctacgataagcggatttttgccctgctcaatcaaacgagggttgtaacggtagatgttccaatagcctgactgtacagcctttttctcttcgatttgagctattgtcataccgcccttaataccgtggttgatacaaggtgcataacaaataataattgacggaccgtcatagctttctgcctcaacaaatgcctttatacactggttatagtcggcacccattgaaacctgtgctacatatacattaccgtatgtcattgcaatagctgcaaggtcctttttgtttgtagccttacctgctgcagcaaactgtgcaatagaaccgctaggtgtagcctttgaagcctgaccgcctgtatttgaataaacctctgtatcaaatacaagaatatttacatccttaccggaggcgataacatgatccaagccgccaaagccgatatcgtatgcccagccgtcgccgccgaatatccacatagacttcttagcaagctggtctttatctgcaagtgtctttttagcaagcttgcctgcctcgcagtcacagccgctgatttcctcaagcttctcaataagtgcctgagcagctattttgttctcgcctgagtttgttattgttgaaaggtattcctcacaagcagatttaacatcttccttgcttgtcttttcggaaatttctcttacataatctgcaagtctgtcacgaatagcgttttgtcccaaaaccataccgtaaccgaactctgcgttatcctcaaacaatgagttatgccaagccgggcctctgccctctttgtttactgtgtaaggtgtagccggagccgaagcgccccaaatagatgaacagcctgtagcgttggcaataaacattctgtcgccaaacagctgtgtagcaagctttgcatatggtgtttcaccacaacctgcacaagcacctgagaattcaagcagcggctgcttaaactggctacccttaactgtagtttccttaaacttagcggcaacatcaggcttaacaggcaggtcaagaccgtaagcaaatacctcctgctgatccatttcaccgtcagccggcttcatctcaagagccttgttgcccttcttgccaggacaaacctgtgcacaagagccgcagcctgtacagtcaagtgtagaaactgtcattgtaaatgtcatacccggcatagccatcataggggctttctttgttgcggcaggggnnnnnnnnnncggctgtcatagcaacaggacgaatagcagcgtgcggacatacatatgaacagaagttacactgaatacaattctcggaattccaagacggaacatcaactgcaatgcctctcttttcgtatgcagctgtaccctgaggaactgtaccgtcaatgtggtttttaaacgcagatacaggaagctggttacccttgtaagcatttacagggtgcagaatagtatttacatactccaaaacctccggcttaccgttagttgatacaaccttttccagctcgccctcggcgtcagcccagcttgcaggtacctctacctttacaaagtctgttgcaccacgctcaatagccgcatggttcatatcaacaatagcctgacccttcttgctgtatgactttgtagcagcgtccttcatatatttaatagcatcgtccttagggataatgttagcaatagtaaagaatgctgactgcaaaattgtgttgatacggccgccaagaccgatttccttaccaatcttgataccgtctattgtatagaaattaatcttcttttgagcaataattctcttcattttagcaggaagcttttcttcaagctcctcgccggaccaaggacagttcagcaggaagctgccgccctctttcaggtcgtccaccatatcgtacttatgtacatatgacgggttatgacaggcaacaaagtctgccttactgatgtagtaggttgacttaatcggcttgtcgccaaaacgcaggtgagatactgtcaagccgcctgacttctttgagtcatatgcaaagtagccttgagcgtacatatctgtatggtcaccgataattttaattgagtttttgttagcaccaactgtaccgtcggcaccaagtccccagaatttacatgagcttgtgccggcaggtgttgtatcaggattttcaacaacaggcaaagaaagatttgtaacatcgtcaacaatgccgattgtaaatcttctcttaggctggtctgcttccatattgcggtaaacggcaataatgtcgccaggtgttgtatcctttgaagacaaaccataacggcctgtataaacattcacgcctgtaaacttagaaccgttaattgcggccaatacatcaaggtacaaaggctcaccaatagaaccgggctcttttgttctgtcaagcactgtaatatttttaactgtttcaggcagctggcttagcatatagtcagctacaaacggtctgtaaagtcttacctttagcaaaccaaccttttcgcccttagctgtcaggtagtcaataacctcttctgtacagtcgtttacagagcccattgctacaataacattttctgcgtcaggtgcaccatagtaattgaaaggcttatagtctgtaccaagcttttcgtttaccttgttcatatattctacaacaatttcaggtacagcgtcataatatacattacaagcctctcttgcctggaagaatatatcgtcgttttgtgcggtacctcttgttacagggtgctcagggttaaggcttcttcttctgtatgcgtcaactgcgtcccagtcaagcatatctgcaagatcctcatagtcccacatagcaaccttttgaatttcgtgtgaggttctgaagccgtcaaagaaatgcataaacggcactctgccctttattgctgacaaatgagcaacagcggcaaggtccatacactcctgtgggttagtagaacacagcatagcgtagcctgtttgacgacaggcatatatatctgaatgatcaccgaaaattgacaaagcgtgtgatgtcaatgcacgggcagaaacatggattacgctaggcaacagctcgcctgccattttgtacatatttggtatcataagcagcaagccctgcgaagcagtaaatgttgttgttaatgcacctgcagaaagtgaaccgtgaacagcacctgctgcaccaccctctgactgcatttctgttacctgtacttctctgccaaacagattttttctgcctgctgtggcatatttgtcaacctcatcagccattaccgatgaaggtgtaataggatagatagcagcaacatctgtaaacgcatnnnnnnnnnnggctgcgttgttaccatccatggttttcatttttcttgccat

SEQ ID NO: 1028 - DNA, 15437 bp, unidentified
  source 1..15437: mol_type = unassigned DNA
ctattcgccatatattgataatgactctttttccagctccatataatcaatcttatcagcctttgtccttggaaacttctcaactacagtaaaatatttagggatttcatactcctttagttgaataacctcgccattgaatgtttttctctctttttgtaattcctttattatgcgctcacttgtcattgttttatcattcaaaataataaatgcgtgtcccacataaagccatttcgaatccggatgttttactactgcagcagattctattccttcgattgtatttaatgccatttgcacatgatcacaatataccttgttaagtgtagaaataatataaaatctcgatgatcttccagttaattcaaagctgccatctaaaagaagtcttccgttcgttcccgtcttgaaatattctttaccttgatatctaaactttgactgtctggtgagctcgggatttccatagtactccttaaatacattctttccggagatacagagcatcccttcctgttcataaggtaactcttccatattttcattgactacaatagcactcacaccataaaaaggctttcctacgcttaaaaaaggaacattacagccatatgcgtttgtatttccaccacatgtctctgcatttcctgagccatttataatctctacttctttgcagttgtgctccctaaaaaagcagattgctcgctttgccatttgttcattcaaaaaatctccaccggaaataaatgtctctacacttgataaatccatgttgtccggaatatttcgcatagtcaattccaggagcgccgggcttccgaatatgatattaggtgattgcatataaaagtctgcaattgtatctttggaaatatccgggccaattataaccgttctcccacatagtaaagacattaatacactggtcacaaatccataaggataacaaaaaggaacacataccagacttttttctccggattgttgggttacatgggaagatttttttaaatagatagcggttgctataatattcttatttgttaataccactgacttaggatttcctgttgttccacttgtatataaaatcattgcctcacaattttttattccaatgcttctttgtatcccttttgacttcctgtttagcaatgattcatatgaaattaccgcattttcggcatgttgagatggcatctgctccaatgtaataatacatctggtgtttccttctccacacaaaatctttttatcctcttctgtgtatttttccttcacaagaacagaacttccgtacatttttaagtagcgttccacttcttgcactgttgcatgtgaattcaaaaaagtaactataactcctatactgtttgctgctaagaaaagttctattccctgataacaatttggtacaaccatcgtaagaatatcacctttttgtaatccaatacgatacaatgatcttgctaatatctgtgcattttcaattaatctttcaaagctgatcttcttacctacatcttctattgcaatttcttttctatactttctacttgcatatttgattaaagaaaaaatactgcatccgggaatcaccggatgtttctgaaaaaaagtagcatctttctcatgcaatcttaatttggacggatagcctgtctgtttaatcgtttcgctcataacttagtattctcctcttacatctttatctaccgagtgcagccatctcttccaacttccgaaaatctactttgccaattggggtatgtggaaattcttttacatatcgatactctaccggacacatataggtcggtactttatccttgcagattctccggaataaatcattacactgaacctgatccatagtcatagcttcgtcttttaagattacatacgctacggcttcatagtaggcactattttgtttgcatcttgcaacaactgtacaatcctccacaggggcggctgatttaatggcttcttctaccagattagggaaaatctttgccggctgcccatctactgctgtaagataaattcttcgaatccttccctgatgaaacagtagtccatctttgttgatatatcccagatcaccggtgcgtatccatttttttcctgtctcatccaacgtaatgatctcttgggtcgcttcttgatttttatagtaaccaagcataatggatgggctggatatcaaaatttcccctacttttccatatgataattcttcattcgtatccatatccacaatttttactgtattatgaacaagtggaattcccacactgccaatagcatttgctttcggagtactgataactgcagttgctgccaattctgtcattccataccctttacatacctcatatgagcaatggtgctgtcttaaaaatccatttactttttcttccattactgtatttagtgaatctcctcccacacctgctgatatgagaaaagacagatccattttctgcgtctttttactttccgccaaatattttaaatgatcagataatgcagaaaaatgatttggtcgatatttcacaaattcattgggaaagtttttagaatcaaatacaggatataaaatcacttgcaatccataacataatgtcgtatgtatcgccaatgtcaaaccatatatgataaaaggcggaagatcattaaaatacttatgctgtcttttaaaagggatgcctaaatattgatatccatgtgctaccgaattgatattatcatctgaaagcataactcctttcggaattcccgttgtaccacctgtatgtgcaataataaagcatttctctttttcatattttgctgtttttgcctgtccgtccttcccgagtcttacgaaatttttccaggaaagagcatgcttgtctacattttttccaaatgttttgatactataagcagctttcttaattcctcttaatgactcaccgggggatactacaatttttttctttacatgacttccccgtagtgccttttctattacaggataggcaaaatccacggtaagtacatattgcgcattacattcttgcacatacgtctgcatttgctgttcattggtacgaagatccaccagattcacaacagccccgagtttatttaatgcatatagactgtatacagtttccggcatatttaccatgcaaaaaattactacatcatttttacgcacccctgctgcgtaaaaagcatttgctaccatatctattttttcaaataattctccataagtaatcttgtgtccgaaataattcaacgctatatcccgaggataattcttgttattccggtaaaccaattcatacgccgtgcactgcggttcacaggactggattgcttcttcgctgtaatattgaagccatggtttatcaattgatggataaccggataattcttcttttgtcatacttgattctccctttattcttctgtttataacttattgatgaattcgtaagttttagttattcgtctgcaagtatatttataaattgtctctcccataaatcacggatttttcatattcccaatctaacggtggatattctttgataatctcatttttttcctcttccagccttttatggtcaacctcattccttgtcgttatttttaaacatccttccattaactcccatcttaatgtagccatactgtaatacttgagccatggtttatcgattgaaggataaccggataattcttttgtcataggtatttctccttgtaagtatttttatgaaatctcatgtcatcgtctcagcccatataaacattgaaaaacaggaacccttttcattacttcattaacaataattgtcagtactgaggatgccagtaaaatagcaatccactgtacacctgccaatactgctaaataggtgactacataatatgccacaataatcaaaagctgcatgtgcagaaaataaaagttaaatgaattgtttgaaagccatttgagtaatttcccatttccatccatccaaatctgccctgctcccatagctgctaatacaactgatacacgcactgttgaccatatcattctgcatatagcatagcttactgtccatatctccatatcacgaataatcactaacgtaattgatgcaataacatttataaaaaaagcagacacactgaatgtcttccagtacttccttgtaaattcataaaatggttgattatcatataaaagtaaccctaataaaaaaaatagtccaaatgccagataggtctcctctgttgttccgtaacttaatatgcaattcagtatcactaataaaaggatacttttccatgacacaatctctttattagaaagttccccgggcttacttagcaacctccgaataaacgggtatgacaaaattacatacgtcccaagataaagtaaaaaccataactgcgatggtgaaaaactgccatcatatccgtaaaaatttgaacttatatgcgaataaaaataccaccaggcacttaaaaagtttcctatataatcaaaatgatttttcatcgcaaaatatgattgtataggaacccagaataacacgcccatcacaccaggtatcacaatcttttgcatccgattctgataaaattcacgaatcgtcctctttttcaagctaagcatggaagataccccagcggtaaaaaacaaaattgccatcaaacccggacttgccagattataaacgattgtcaaaaaaaagacttttctctccttctatatagaaaccttctttgcaatgaaatacttcgcttgcatgccatataaagagagaatagacgcataataatctgatgttatctataaaattttttcgcccattaacttctctgttggaattattcatcctttgtattccttttcatttcttactttctaaacaaaaaggcattctgcagtgatggaataagctgttctctgtacttaaaagcctcctgttgctcaatatcatctctatccatgtaatgagccttttcctcttcttcacgctcgtatataacctgtgttttgatataatcttcaatatgtttattccaatattgttccggggacatccctttcaacaattcttctctggttatcttcccatacttctccataatttcatatttcattgtggccagttcatcacgcagtaattgcagacctttatctcttgtatattgcgagatatccatagcttttccacgactaatatacatagttccttcataaatcatggtagctactggtatgacgggagctttcgtgctacatgccattttccaaattccggaataaagttttcgaacaattagattgggactcatgttccagacaccttccggaaatatcaatatatttccaccgtgtcctaatactctttccgccttacgcaatgccgctgcccggttttccttatcatatcggtctaccagtattaccccaaccaaccacatggcgattccttccacatcatacagtaattccgatctcccatttgtcatcagataaaccgattctcctgctgttgaaattgcaaattccacatcttcggcagaatatgtatgtgttgccgcataaattttaggtcccttaggaagttctcccatacttacaacaacctttttcattccgcacattttttcatccagtcgccgaaggacgggataaataattctcctgaaatgaataccgaaaacagatatggtttttagcggatcattacctgtaagatacttaaaaaaccaattattccagtatttcattacattttctcctcattcgtatcaaaataacctattgtttatctaattactatttacatagtaactatatatatgtaattcgtcaagctgttacttttttcatagtattgttatatagcgtaatttttataaattatcttataaactcaggagtcattatgcagaatgtagttttttctatgaaagaatatggacatatagaaattcatttgaaagaattaatggaagaacgaggagtaaccagaaacgctcttgccagagctacgaacactcgttttgaagtaataaataaatggtatcagggacatgttgaaaaaatagatgctgatgtgcttgccagaatttgttatatcttagattgtaaccccggagatattattttatataaagtctccgatgaatgattttaaaaatatcttataatacacaaaagcgccagaaccgacatttgccgggactgacgcttttcattttatgattcttattttgtctcttctgcttcgccgtcttttttcttgttgaatacaaacagcttactgaatacatagttgccgatgatgaccagaactgcggagatcagggttgccaccagcagatttacaccgattgcggtcagtacctgcatcactaccatatccagaatcagcgtggatactctggaaagtacgaatttcggtgcttcggacagcatcggagcattgctcttgaatacaaacttacggttggtaaaatatgcgaaaatgacacccgccgtccagttgataacacttaatacaacattctgaaagggtgtgggatacattgtgttgtcaaataacaggaagtttgccaggaattttgctgcccaggatacgaccgtggtcagtccgcctacgatcaggtatgcaatgatctcttcatacttgatccaaagtgcctttattttttctaccatattgttcctcatttctctgtgctaaggttaataaaactattcagaaccccattcgcaaaatcgcctctacgaggctttctttttgctcatgtggttacttcgccctataaatagttaactacaaataacaaatatacacaaatatccccttaaatgcaagcattccaaagacatttgtgtatatcttaatcactgtttatgaaattctataccaccgtatggcttataaatttaccacgttacggttctcaccacgcataaatgccttaatgttctcgtagacgccctgtacgcaacgggtacgtgcctccacgctggcccatgccaggtgcggtgtgatgatcagcttgttactgtcttttaactggcttaaaggattagataactccaaaggctccttttccaggacatccagacctgctgcctgaatctctccggccaccagtgcttcatagagatcagcgttatttaccacggggcctcttgccacattgatgaggattgctgtctttttcatcttacgaagggcttccttatcaatgaaattacgggataagtcacttaacggacaatgcagggacaggaaatcgctctcttttaacagggtatccttgtccacctgcggataatccgtacaggtgctcttgcccgtgatggaataaaagattaccttacagccgaaagcggtagcgatcgctgcggctctcctgccgatattccccattcctacaatgccccatgtcttaccttctaattcataaaaaggtctgtcaaaattagaaaaacgatcctgtgcactgtaagcgccggattttacatattcatcatagtagggcagcttctggctcaatgccagcgccagagtaaacgtatgctgtgccaccatggctgtggaatagtccaccacatttgccaccttgatgcctctggacttgcaatatgccagatcacagttgtcgtatccggtggcaagctcacagatcaacttcacgttcggacaatttttcagggattcttctctcatcggagccttgttgcagacaatgacatccgcatcgcccacacgctctgccacttcctgtgcagtaacggtattcgggtaactggtcacttctcccaattcattaaaacagtccaccggcacatccgtgccggcgctgtttctctccagtaaaacaatcttcatctcttgcaatttctcctgtcttttgttttcttttcgtaatagcataataacatagtagaataaacgatttctccgggctatcgccctacttacttattccatcatacagcaacagcgtaatgaaatcaattcattacgctgtccttttctgcttttgaaacatattactgccggagtaatcccgcctctgtggcttacaatctcttcagcagttcttctctctgtgcctcataaccgggcttgccaagcagagcgaacatattcttcttgtagctctctacaccgggctggttgaaaggatttacacccagcaggtatccgctgacaccacatgcgaactcgaagaagtagaacagctcgccaagatagaactcatttacctcgggaacggttaccatgaagttgggaacctgaccgtcggtatgtgccagaatggttccgttcatagcgctcttattgacgaaatcaacggtcttgcctgccagatagttcagaccatccagatctacaggctcctcgccgatcgtaagctcctctctcggagtgtcgatattgatcacggtctcaaacattacacgggaaccgtcctgaatgaactgacccatggaatgcagatcggtggtcaggtccacgcttgcggggaacagacccttgttgtccttaccttcgctctcaccgaacagctgcttccaccactcacttacatagtgaacagcgggctcatagttcgccaggatctcgacactcttgcccttgcgcagtaagatgttacgcagagccgcatactgtaaagcatcgttctcttcgaaatcattctccagggcacgctttcttccgctggctgcaccttccatcagcttgtcaatatcagcaccgctgacagcgatcggtaacagacctaccgcggtcagtacggagaaacgtcctcctacatcatcgggtactacgaaggtctcgtaaccttcctcatcggacagatgctttaagcttcccttcgccttatcggtggtagcataaattctctctgccgcgcccttcttgccgtatttagcttccagcttctccttgaatacacggaaagcaatagcgggctctgtggtggtaccggacttggagatcatgttgatggagaaatctctgtcgcctactacatccatcaggtgcttcagataggtggagctgatggagttaccacagaagtagatctccggagtcttacgtacactcttatccagtacattgtagaagctgtggcttaagaactcgatagccgctctggctcccagataagaaccaccgataccgataaccagcagaacgtcggaatcactctggatcttcttcgctgctgccttgatgcgggcgaactcttccttatcgtaatctacgggaagatcgatccatcccaggaaatcattgcctgcgccggtcttggataccagggtctccttcgcatccagggtaagcttcttcatgtaaccgatctcttcttcagaaataaaagagccggccttggaataatcaaatgtaacttgtctgctcataatgctcctccttatatcttgcagatatatcacgcattcttgcgttacttacttaaaaaatccgtttttattttaacaaagttacatctcattttcaagacatatctatagatccggggaatgttttctgaattctttcggacgtctgacattttccgctatactgtaagtaattcctgaagcaatgcctgtaattcttcctccgtgactctggcgggatcctccggccgttctgttatcgcctttccttccgccttttcgggcgttgcattttccgtggaaaatacttctctgtccagacgatctgacgtctcctccggctgcaccgctctgctgcggatcggcatcagttccaccgtccgtctgccggaagtacgctgccttcttcccgcctttccgctggttgcgatctcctccaccagacttcccgggccgtagagtctctcataatcctgctccgtaacggggatccggcccgacagatgattttccagataatcaatgaggttcgtctttaatattctgcgttttcccttgatatccaccatggctgacaaggaaaaataaagatacattcctaagaagcttactatataaaaaggcaggatttcccccagcatccttccgcccatgatccccttgcagatcccgacaccggcaaacacaatggaaaacagcatgcactggccggacaaatgataccaggcatcaaaggataggtgtccaaacgccagccggttgaggaacttgtccacaaacaccggaatgtttgatactccaccatttaactggtaacaatttgcaaattttactttacactgtttcaacaggcggttattcgtcgttgccatattatctgtctcttttatcatcgtatggtaaaatcctgccagaagcagacgcaccagaatactaagtcccagaaataccagaattccggttgtgatcactttttcttctttgaaaatcgtaaacataacctgcgctcctttctatcgcttccttagagtataacgtattagaggcttgttttgtacgttttttcatcgtcattcttctacgttgccgaacagaaaaagtatttcttttacatttttcgtgaaaagaaaaccttgtacatattgttgtataaatgccgaaaatctgctataatcactccttagaaattcagtttgaaaaggatggttttacatatgatatacaagacaaaaggtacctgttccacttcgatcgatgtagaattaaaggatggtgttattgattccgtaaaattcaccggtggatgcaacggtaatctgcagggaatcagtgctctggtaaaaggaatgaagccggaagaagcaatcagccgtctcaaggggatccgctgcggtttcaagcctacctcctgtcctgaccagctggctcatgccctggaagaaatgatcgcacagtaatctcaccgacaagaaggattttattatgaaaaaaatcgtattgaccggcggcggaactgccggacatgtaacccccaatattgctttattaccggcgctgcaggcggccggctatgaaattgcctatgtgggatcttatgaaggcattgagaaaaagctgattgctgatttcaacattccttacacaggcatttctacgggcaaattccgcagatacctggatccgaagaacttctccgatccgttccgtgtcatgaagggatttgtggaagcgagaaattacctgaaaaattaccagccggatgtagtcttctccaaggggggcttcgtaagcgtcccggtcgtccgcgctgcagcttccttacatattccctgtatcatccacgaatcggatatgacaccgggactggccaataagctgtgcattcccgtggcagaaaaggtatgctgcaatttcccggagactatgaaaaatatccctgccgacaaggctgtcctgaccggttctcccattcgtgcggagctggcacagggcagccggctggccggactgaacatgtgcggctttactgccaataaacctgtcatcatggtcattggcggaagtctgggtgcagctaacgtgaacaaggctgtccgcgatgcattgccgaagcttctggaggatttccaggtagtacatctctgcggtaaggacaaaatcgacaacctgttgttaaatacacccggatataaacagtttgaatatatcaaggcggaactaaaggatattttcgccatggcagacgtggtgatttcccgtgccggagccaatgccatctgtgaacttctggcgctgaaaaagcccaacattctgatccccctgcctgccgccagcagccgcggagaccagctgttgaatgccgcttccttcgaagcgcagggttattccattgtgctgaatgaggatgatattacgacgaatctgctggtggataaggtacatgagctgtacttcaaccgccagaattatgtagaagccatgagccgcagccatcaaatggatgcgatcaacacaatcatgttgctgatcaatgaagccgcaaacaagagtcatacgcaataatgtcatgtattgattgaggggattattttgaaaggattattggaaatctgctgcggcagcttcgaagatgtgaaaaccgcctggcaaaatggtgccgacagggtagagcttaacagtgcactgtatctgggtggtctcacaccttctacggccaatctgatctgtgcaaaagagcagtgcagcatccctattgtaacaatggtccgcccaagaggaggcggcttctgctattcccaggatgaatacgagaccatgctcttagatgcccgcatccttttagagcacggagctgacggtattgctttcggcttcctgacagaggaccatgccatccataggaaccggacacaggagatgatcgacctcatccatagtgtcggaaaagaagctgtatttcaccgggcgtttgattgtgttgcacaacaggaacgtgcggtggaagcattgatcttacttggtgcggaccggatcctcaccagtggtggtgcacccgatgtatggtcgggcagaacgcaattgcaaaagctacaaagccagtatggtaaggatatcacatttttagccggaagcggcgtgaatgcacaaaacgtaaaagctctgatggaatatacgagcatagagcaggttcatacatcctgcagaagctggcagccggatgcgaccgcctccctgcaggacgtggacttctcttatgatagaaaccgaaagaatgcatatgaagcagtggatgccggaaaggtgaaagaaatgcgggcagcaatgcctatattgtaatcagcccatgttctaagcaaaaatcgtagactccgtcttcttccaccgatctgcacgtgcaggtggcgtgggctttgatctcatccttcgcattccccatggccacaccggtgccgactgcttccagcatctcgatatcattgaagccatctccaaaagcgatggcttcctcctttgtaacgccaaaatgctgaagtaccgcgcgcacagcgtttcccttcccacattccagaggaatgatatcagacgctctatcccaccacgctgtaatctgtgtatggtgcgtaccatagagaatcctctcatactcttcttcccggcaggcacacatcatctgatagatatcctcacgaacccgttcatcgaattgtttatcgattttcaatatctcattaccgaatctgaaatactgctccagatccggatctgtaccgttggtgatgataaaatgttcgttactgattgctaccgccctatgcatatctttcagattctgaaggatctgaagcttgtccatccgatcaagcgggcacttaaaaataatctcgtctccgactgttacataagaaccgttaaaggtcagaagcgcatcgaaatcaattcccggaaaacgcggcgccgacagatatcctcttccggtcgccatacacagcttcaccccattctgtcgaagagaaattaatgtatgcagcgtccgctcacttaattctttatgacccatcttcaaaagcgtcccatcgacatcaaaaaatgcaattttaatcatgcttgccacctccatccggctcacaggatatattccatctgccgttcttttgtcttcattcccatcttttcataaaagtgctctgccgaagtgttgcctgcccagacgttcagggttacttcatagcagcccagttcttttgcctgctgtttcacatattcaaacaggctttccccgatatgctgcccccgtgtctgcttgtcaacacaaaggtcatcgataaacaatgatttgaagggcaccatattagtggaaaagggctgctccctgagttggcagaatgcatagcccatgcacagatcgtcctcgtctacggcaacatagatagggtgatcctcctgttccaatagctctgccagctcgcagggggtgtatttcgtagtacccggtataaaaatatccggacggagctctgcatgtatctgtaatacctgccccagcagcgcaagaattcttggaatgtcctttttctctgccttgcgaatcttcatttctattttactcctttattcggcaaatcccgttttattacttctcccagtattataacccttccatgtctagatccacgattaactttccaattttccgttcttttaaaagatagcacatatagataggaagatataccacggctccctcctgttccatatttgctaccgataaaacatatgctttctcaatatgataatcagaaattttcataaagttatccaaggatttgtgtgccttgtaagctttcccggatttcacctcaatgggaaccactttcccatccatttcgaccaaaacatccagttcccctatatttttctttttacagaaataaggttccaaaccattggccgttaattgctgtgccacagcattttcaaagtgagcaccgttatttacttcgctgtttttattgatcagttccagtttggtttccgccggatatgcactggtaagcaaaccggtgtcattggaaaaaagtcggaacacattactgctcttgctcgctttgagaggaataacaggagcttccacgttatacaccggtaacgcaactccggcatctttcagccataaaaagctgttttcatatctgtcaaactttaactctttattcagcattgtaaatacaaattttttattctgtttgttcaattctgccggaatgatatcataaatagatatcaatttcagttttttatcttcactctcatattgagagaaatcctctttatatagcgcaacgatatcccgttgtaccttatccacttcccggatatcttttgtagcaatatagatttttaccgcatccggcatgcctccgacaattagatagataaaaaacagcgacaatagcttctgatgtatgaattcatccacgggctgacatgtttcaaatttcgctttcaacatttccaaagttgtttttgacacattatttgctatcatgaattcttcaaaatccatcggatacattgtcaaaacagttaaatatccaaccggaaccgacgttattcccttaagctctactcctaataaggatccgctcattacatatttgaagctgccttcttctacaaggaattttatttttgtcactatttccggacatttctgtatctcatcaaaaaagacgaccgtttcctgcggcttacaatcctccggcataatcatttttaatttcaccagaaactcattcgcactcatttttacattgagataatccaccaaatccggctgatctataaaattaacttcaaacttacgatatccgcttttggcaatttcctctcttatcagccaggtctttccaatctgtctggcgcctgttaccaataatgctttatccgatcttttcaaccattcttctatgataatagagtcttttctatacat

SEQ ID NO: 1029 - DNA, 8272 bp, unidentified
  source 1..8272: mol_type = unassigned DNA
ggcaggaccttcagcagagcggaggacacccaaggacggtacaggcggaccttgatgataccgaccttctcgcccttggcgttcaggtagtcgatgacctcgtcagcaacgtcgcagatggaacccatagccacgatcacacggtcagcatcgggtgcgccgtagtagttgaacagatcgtagttggtgcccagctttgcgttgatcttggccatgtacttctcaacaacagcaggcagagcgttgtaaacgctgttgcatgcctcacgatgctggaagaacacgtcgccgttctcgtgggagccgcgcatcttggggtgttcggggttcagagccttcttacggaactcctccacagcctccatgttgcacatttccttcagatcggcgtaatcccacttctcgatcttctggtactcatgagaagtacggaagccatcgaagaagttcaggaagggaaccttgccctcgatggcgcacagatgtgcgacaggggacagatccataacttcctgcacgctgctctcgaccagcattgcaaagccggtctggcggcaagccataacgtcgctgtgatcaccgaagatgttcagggactgggtagcaacggtacgtgcagaaacatcgaacacgcagggcagctgctcagcagcgatcttgtacatattggggatcatcagcagcaggccctgagaagcggtgaaggtggtggtaacagcacctgcacccagagagccgtgcacagcgccagcagcgccggcctcggattccatctcgacgaccttgacctgattgccgaagatgttcttctggccagctgcggaccactggtccacagagtcagccatcggagaagacggggtaatggggtagatggcagccacgtccgtgtaggcatacgctacatgggcggcagcggtattgccatccatagtttgctttgctctaggcatttttcttcctccattattcagaatttggtaccttttgcgcggggcaatatgccccacatgggaccggagaaccccataaaggcactattgcttgtgtactataatagcaaattccgcccataaagtaaacgcaaaccgctcaacaaacgcaccaaaaataaagaaatttttttagcgcttttgtacgtctttagttcgttaaagtgagcactggcgcggattttccggttttggcctgcctgctttgccagatcctgtaatttttttgcaaaaaggggagggaaccctctcagtcacggcttgcgcagcgccgcgctttctcagaaagcggcgctgcaaatgctgctttccgttacgacccctcctgtgaaaaggcaattctggaaaatccgcgtttgtgtagcaatgaaagccccagtggggctttcaagcggcagagcggtctgcgttagcagatggaggggctttgccccgacaagctccgcagattttccagaattgcgaaattataaatattctttccgctgattatgcgcaaagcaaacgcggcgcgcatttcaaatcgtcccatcctcttatatttatcatctctttattgacaacaaacctcattttgccgtaaactgaagccatagaaaaccggcgctgtgccgggcaaagaggttaataaaatggagaagaccgtgcattacgaaaaaacactcaccagtgaggtgctcttcgagggccgggtgatcaccctgacaaaagacactgctctgctggaaaacggcaagaccgccgaacgcgaagtggtgcatcaccacggcggtgcgtgcatcctgccctactttgaggacggcaccatctgcatggtgcgccagttccgctacgccatgcagcaagagctgtgggagctgcctgccggcaagctggaaaagggtgaggacccctttgaagccgccaagcgggaactgggcgaggagtgcggcctgaccgcggacaattatatctctctgggccagtttttccccaccgtgggctatgacaccgaagtgatctatacatgggtcgccaccggcctgcacaagacccagatgcatctggatgccgatgaattcctgacccctgaccgtgtgccgctggataaagcttatgagatggtcatgagcggcgagatccgggacggcaagaccattgccggcatcctgaagctcaaggcgctgatcgccgagggcaggctgtgaacatcctgtacgaggacgcttccatcgtggtgctggacaagcccgccggactttccagcgaagagggcgtgccggcagccctgcggcagctgtggggccagccggatgcctttgtaggcgtggtgcaccggttggacaccggcgtttccggcctgatggtgtttgccagaacgcccgaggctgcggccgcactcagccgtcagatcacccagagccagaacgcctacgctgtgcaggatggcagggccgaaggaaagccggaagtgccgcagttcatcaagcagtaccgtgccgtcattgcaggcgggccggacgaagcactgcccgccgaaggcaccctgcgggactggctgttcaaggacagccgccggggccgggtgttcccggtcagccgcccccgcaagggcgtgcgggaagccgtgctggaataccgcatcgtgaaaacggcaggagagatgagccttgctgagatcacgctgcacaccggccgcacccatcagatccgggtgcagtttgcatcccggaagcatccgctggccggagacggcaaatacggaagccgcgtaaaaggcagcattgccctgcagagctgcggcctgcagtttttgcacccggagaccggaaagcccatggcatttatgctgccgctgccggacgccgcactgtggaaagagtttttagaataagattgttgtatacggtcagcatcctagccctctccgtcacctgcggtgacacctctcccaaagagagaggccttggcatagagatacagtccgcgtggactgccaaaggctctccctttgggagagctggcaaagccgacaggctttgactgagagggcgagcccgctaaaggaatacatcattttcattaggtgagaggtatggaacaatacaaaactgatgctgagatctatgctgtgctggagcgggagatcattgacctgaccatccgccccggctcttcgctgagcgaaaatccgctctgtgcccgctttggcgcaccgcgcaccctgatccgggtggtgctgcagaagctgcaggaaaacgggctggtaaagatcgtgccttacaagggcaccaccgttacccggctgaaccgccgcatcgtggacgagctgatctacgagcgcaccgccgtggaagcccgcgtattgcgggatttttcgccccggtgcaccccggagcagcgggcgttgatccgcaggcgggtggaagcctacgaggcccttgcggccatggagagcccggattacaacaagctgtacgaagccgaccgtgccctgcacgggacatggtttgcggccatggataaaatgtacctgtggagcaccctgcagaacgcccacgccgactacagccgcttccggatgctggacaccatgaccaccggcggccttgccgaggtgatcgcagaccaccgcaacctgatgaacgccatcgagcggtgcgacctttccgcctttgaaccgttggtggaacggcacctgtacggcggcatccggcggcttggctccaagctgaccgaggaatatgccgattattttgagccggaaaagtaattgttctatgtggaacattttataaaacgaaagagcacagcgcattgcagcgccgtgccctttcgttttatgccgtctgaatttcagaacaccccggaaataaaaatttccagaccaatgccaatgaggatgatgccgcccagaatggatgccttgccggagagcttggtgccaaactttttgccgatgcgcaggcccgccatgcagataaagaaggtgaccaccgcaatgatgagcgatgccgcaagtgccatcagccagccgtattccgaaatggtgaagcccaccgaaagcgcatcaatgctggtagccacgccctgcatgagcagtgcacccgcactcagctctgctgcttcttcggcctcttcgcccttgatgccatccaccagcattttgccgccaatatagcccagcagagccagcgcgatccacgggatgaatttttcaaacgaagagaacagctccacaatggtgtgcacgcacacccagcctgtcatgggcatcacggcctgaaaaagggcaaaggtgcccgcgatcctgcacatggttcccctgctcatgcgggggtcgtgcaggccgtttgccatagacaccgagaacgcatccattgcaaggcccacgcccagcagggcactgttgaggaaaaatacaaagctccattccatattgtctgcctcctgaatctgaccagaatatcgggcaatacaaaacccggtcccgggcgcacatgtacgtccgggaccgggtgatttttttgaaaccaactccatgtgcacgggcgctgttctatgcgccaaaaacacatgagtctcgcaaatgaaagcaagccagaccggaaccaacggtcatcatgttgacttgctgcgccctgcaaaagcgcctgctactcccccacgggtatttgtgattgttttgccattgtaacatatctttgcagggaagtccagacaaacctgcacggttacacggtatttttccatcggcgggcaaaataccagtcctgtgaaataataaaacacagggtgttgcccagtgccctcagggtaacagcatgttcctgacgcaaggcccggcgggcgcagcgctcgtactcccgcgcctgctgcatccgggcactccggcgctcttcggcggtcaggtgcattcccacatcgatcagggagtgcagcagtgcccagtacagctcacacagcgaacccgtgatgccatggcggcggacgcactcgaacacggtatagtttgcttccacacggtcgagattgcgcagggtgactttgctgttgacgatgctgcccgccaccttgcggtaaaggtacagcgcatccgggatattcgcgattctgtccgctttttcgtaggcgtaggcgatcagcagggtgtcctcgttcagcttgccctctgcaaagcgcagctgcgcaaaaatgctgcggtggtacagcttgttccacaccaccatgtagggcagaagggtgctgtgctccaacgcctgctccggggtcagcacctcccgccgcacatgcagatactgctcccggatgggggtcagggcttcgtccacctgccggtaattgcacacggccatctgtgcaccggcctcctgcgccgcatggtaaagctttgcgcagaagtccggcatgatggtgtcgtctgaatccacaaaggcgatccattcgccctctgccgcgtccagcccggcattgcgtgctccgctcaggccacgattcttctggtggatgacccggatgcggctgtcctttgccgctgcggcatcgcacaaagcagggcagctgtccggagagccatcgtccaccaggatcagctcaaaatccgtgaaggtctgggcaaggatggaagagatgcaggcgctcaggaaacgctctgtcttatataccggcacgatgatgctgatctccggctgttttttatgttgttcctgcacaataaactcctcattgcttcaggtcgttttctgtcgtctttccgcccttttgcggcatagatccagataactgcaggccgatgcagcgcagaccactgccgcccacaaattttttagtgttacgccgcgggcttgcatcagccgatggcgggctgtacgctcatacgcaaaggcttccttcatccgggggcttttgcgctcttccggtgtcaggtgcagccagatgtcccacacggcagtcaaaatcgggcgataggctgcacacaaagcatcccggatgccgttttggtacagcacatcaaacaggcggtaccatgcttccacccagtccagtgttttcaaggtagtcttgcggtgcatggcactgccggtaacgatgcggtaattgtataaaaaatcccatacaccgcaggcagaagccgctcttgcgtaaatgaccggcatgagacaggtatcttcaaatgccttgttttctggatagcgcagattttccagcagttttcggcgataaagcttattccacggaacctgaaaatccgacaccaccatccggcgcagaacttcctcctgcggcaaaaactcgttcaaaagtcggtgttccccgcccgcaagcgttttgcccgtttcatcaatgcactgactgctgcagattgcaaaatctgcacctgtttccagcactgccttatgcattttttccagatactccggttccaccgtatcatccgaatccacaaacgcgatccaatttccctgtgctgcatccagacccgcattgcgggctgtgcttacaccgccgttttgcttatggatcacccgcacgcggctgtccctttttgctgctgcatcgcacagggcagggcagttgtccggtgagccatcgtccacaaggatcagttcaaagtccgtaaaggtctgagccagaatggaatcgatgcactcattcagatatttttccacctgatacactggcacgatgatgctgatctccggtcttccactttctgttctttcactcacagtatttctcccattcggaattcagttttatttccggtacttgaagttgaagtagaactgcgggtttgcaatgcagagtgcggtttctgctgcgttgcgcagggtacaggccccctgttgacgaacctctctgcctgcttttttcaagcacgcttccgcctgctgaacccgttcactgtttctctgtttgggtggcagatttttttttgtgtttcggagcatgcgtttcatcagtacatactgcaggaatgctgtgtctttttttccatacttgagtgcacaagcaagaaggccgtagtttgcatcgatctcatccagatttttcaaggtgacctttccatgcatgatgcttgccggatgcagccggtaatggtacagtttttcctttatacaagccacagctgttgcatgttcaatgatttccggtgtggtaaatgcatcttcatagtttttgcccacaggaaaaacgattccttccagcacatctctccgatgcagtcttgttgctgcttgaatcaacggcgtaaggcggatgcggtgtattgcttcctcacgggaaagcacttctgtacgtaaaggctgttcctgataatcacaaagacttccatcctcttccataaaaacttcgttgcagactgcaagttcagcacctgcctgctttgctgcccgcagcattttttcgtagtaagtcttgtctacaaagtcatccgggtccacaaagccgatccaatttccctgtgcagctgccaaacccgcattgcgagctgtgcttacacctccgttgattttatggatcacccgcacgcggctgtctttttctgccgcagcatcacacagggcagggcagttgtccggggagccatcgtccaccaggatcagctcaaaatccgtaaaggtctgtgccagaatggaatcaatgcattcgttcaggtatttttccacctgatacaccggcacgatgatgctgatctccggggattttttttgctctgtcatgttccttaaaccactttctgtgtttatttttattcctcacacgctatttctattatacatggtttggatggatttgaaaagaagccgccgtgcagaaatctctgcgcggcggcttctttcaaatcttattgtgttttcaaggtttactcttcgcccttatcgtcggcttccggggcttctgcagcggcggcagcatctgcagcttccatggcggcaagctgctctgcggtgggttcggcatcggcatcggaggtgtcgatctgctcggtctgggcctcgtcgtcgtggtcggtgcgggcaagtaccatcaccttgtcgttctcacccaagcgcatcacccgcacgccggaaccgtagcggctctgcagcgggatttcgttggcgtgcaggcggatgatgatgccctcctgactgctcagcagcacatcgtccacgtcgtccacgatcttgaccgcagccaccttatccttggcggcatcgtagttgcggatgcccttgccgccgcgtgcggtgatgcggtaggtgtcgatgtccgaccggcggcccttgccgttctcggtgacggtgagcaccgtg

SEQ ID NO: 1030 - DNA, 39757 bp, unidentified
  source 1..39757: mol_type = unassigned DNA
gaatgacagttgccatttcctcctctttattctttaaaagaatactcgcctgttcatcaacgcctgtttcggcatatttaacctgcgacaacacatcgtttgggcatgagctcataaacatacgaacaaacgaaagcgcatacacgccgatgtcaagcattgcaccgcctgcaagattgcggttgaaaaatcggttgttcatattgtactctttgtaactgccgaaattcatctgaataagcctaagctcgccaaggtcacctgaatttaccttttcaagaagtgccttgtaaatcggcatatggaaaattgtcattgcctctgcaagcacaacatggtttttctctgcaagagagattgcctcgtcaagttcatctgaattaagcgttatcgacttttcgcacaaaacatgctttcctgccgcaagagccttgcgaagatattttatatgcgtgttgtgcggtgtggaaatgtaaattatgtcaacattttcgtctttaaacagctcgtcaatatcgttgtaaaccttttcaatgccgtacttttcggcaaacgcaaccgccttttcatgggtacggtttgcaacggaataaagtttctgtcctctgcttttgagtgcggctgcaagctcatttgcgataactccgcaaccgagtgttgcccagttgtagtttttcataaaaacacctccgtatatttttcgagaaaagtttaacacacggaaatgcgtctgtcaacggttttagatagcttttctcgtatctgctccgtactttttcataatcttgcgaagttcgttattttcgctttttgaaagactaaaatacataaatccgtgcttaacaatttcatcaccgtcacacgcaggcatatatgtattacagcctattcttattgatgcattttcggaaaagccacaagacggtgaatcaaaatatgcggatttgccctcaaacattttcttcacggtttcggcatcttcggcagacatcttagcgtcaaccttgtcgcagtactcaacatcaaaatacacggtaggctcacacgcatagaaactgattttcggcacggcaaatactgcggcggcaacgcataaaacaactgcaaccacaattacagcaatctttttcttcgtaacattcactccttttcgcttacccctttaaaaatatattatattaagcttgtatcataattgtatcattattaatcggcatatacagcaattttaaaattatttatttgtaggttaaaaaatttttcgtcaatgcttacaagagagcaattttacttttattgaaaaggcacaagttgcgaacaaattaagagccttgcttattgagaaaaatcggtctgaaaatatgcagaaaagcagtttttaccatattataaaggcataaaaagaagaattttgacgaggtagttattgtaactaaaattgtgagcaaagtaaactttatgtttataaggtattttgcttgtttatttcgggcaacaggattacaataattgtggaaaacggaaaagaatagtatcgtttacaacggttatgtgattgaagaggttagaaattaatggagaaagtcaaaaaaatgctctcacttgcgtttgcaagtctgtttagaagaaacaaaggtcagaataccgtaaaagaaaagcgacggcgctcacaccagataaatatgctggaaggtccgctcgtaaaaaaaattcttcttttcacacttccgcttgcaggatgcagtattcttcaacagcttttcaactcaaccgatgttgcggtggtcggcagattttcaagcagtcaggcacttgccgcagtcggaagcaacagtccactcatcaatatgcttgtgctgttattcacgggactttcggtcggcgcaaatgttttgattgcacgatatatcggtcaaaatgaccgtaaaaaagtttcggaagctgttcacacggtaataacactttcacttatatgcggatttcttcttctgatactcggtcaggttattgcagcaccgctgttaaggctgatgaacacaccggatgatgtaattgaccttgcggcaacatacctgagaatttactttatgggcatgccgtttgtaatgctctacaactttggttcggcaattttgagaagtgtcggcgacacaagccgtccgctctactgtcttgtaatttcaggtattgtaaatgttcttttgaacctcttttttgtaatcgtctgcgatatgagcgttgcaggagtcggcattgcaacagtaattgccgacggcataagcgccggacttattatgatgttcctcatcagaaacgaagacgagtcaatcagagtcaatccaaaaaaactttcattcaagaaagaacatctcattatgattttgaaaatcggtgctcctgcaggtattcagggtatggttttctcaatttcaaatgtattcattcagacagccataaacggcttcggttcacaggcggttgcaggctcatcagctgaactcaactttgaatacattacatactatatagtatgtgcgttcagccagacagccgttacattcacaagtcagaactacggcgcacttcagtttgacagatgcaaaaaggtgtttaggctttgtatgcttttcagctgtattttcacaggctgtgtgagcgttatattcatgctcggaagcggatttttcatcaccttcttcacaaccgacccaaccgttattaagtacgcaatcatcagaatggcgattgttatgctccttgagcttatgacaggttcatacgaaatcagcggcggtgcgctcagaggaatcggacattcactcctccctgcaatcctcacaatcttcggttctgttgtgttcagaatcatctggctcttcacagtattcaaggcattccacacctacgatatgctccttatggtttaccccgtttcatggcttatcacaggcacatccgttttgattgcctacttcatcatcagaaaaagggaattcaaaaaggtaagtgccgattttgaaatttaaaatcaaatagatttttatggctgacatcggcattggtgtcagctgtttttgtttagaagaggctctaaaattaaaaaaataataaaaagcaattattttgtactttttgtgcggaataattgtttttttgctgtgttttatgttataatccaattataaacacacggaggtgcgacaatgactaaacggactgttgccaacaattttttatactacattttttgcggattcagcggtgcggttacttcgctgatagtatggctgtttctaaaacttatgggtttgggaatcggtcttgtgtgggatacaattccgtcaaattttgatttcaaattttatccgattatcgtctgtacggcaggcggaattattctcggaatatggcaaaagctgacaaatgccgttcccgatgaacttgacgaggttatgaaaaaggtaaaaaaagataaattttatccgtataacaaggtgcttttgctctgcatttcggcacttttgccccttgttttcggcggaagtcttggccccgaggcaggcttgacaggtgttatcgtgggactttgctactgggcgggaagtcatatgaaagacgctaaaagtaaaattcccgaactaatgcaaatcggcataagcgcaaccctgagtgcggtattctacgcaccgcttttcggtcttgcatcggtcaatgaagaaaggcttgacagcgaagaaaagcctaccgatatccgttcaacaaagcttatttcaaacatcattgccgtactttttgcggcgggaactctgtttttgcttaactcgattttcggcggaagtatgggacttccacgacttggtggttataacattacaaattttgagcgtttgtggggaattcctctcgcacttttgggtgctgtatgcggttttctgtttatcgtatcttcaaagattttcggaaaatttttcgcactcattcagggtaaactcggcattattatcagcacaactctcggcggaattatcctcggtgttatgggtacatacctccccctcacaatgttttcgggcgaagaaagcattaccgttgtcaaggaaagctttgccgaatttgcaccgtggattctcattatcagcggtgtgcttaaacttgttctcacaaacatctgcataaagtcgggttggaaaggcggtcacttcttccccgtcatcttctgcggagtaagcatcggctacggtgttgcaatgctcggcggacttgacacggcattctgtgcggcagtcataacggcaggacttctcggtgtcacaatgaaaaaaccgcttgccgtaacaatgctccttttgctctgttttgacgcaagagttattccgtggattttgctcgccgcattcctcggaagcattattccgactaaaattttcggcagtaataaaaagaaagctaagtgagcatataaaaaactgctttgcgaaccaccgtttcctttggaacacattgaagaaatgaccgctcttatgggtggctacggttcaattaaataaaaccaagaaatccgtgttgtaaccatgcaacacggatttttatataaagaacaacctccccgtaagctgaaatgctttgcagggaggttgtattattcttatatggaattttattttacttgcggataattattgctttgccgttgcaatgaatctttccgtttgaaaccgtaactgtttcaccgctgatttcgtttttatagtcgccgtcggggaggtcaacttttacatcagccgactttgatctaaggctgaaaatgccgacttttttgctcttgttgttgtcacgctcaagaattgcaatatcgttttcatcgtctgcatcagccttgaaataatcgtcatcatcaagaacggttttcttgattgtatcaagctttgcaagaagtttgcttaaatcaattcctgtgttgcgtgggaaaacatccttgtcaaaaagacttggagtttcgtcacaaccgaactcctgaccggcatagatgagggttgaacccttcaagaaatacagaaaagcggtgtaattttcaaggtcgctcttttccttaacatagtggcaaattcggggctgatcgtggttttcaaggcaacgcattttatcgtaattctgcggataaattgcctcctgataattgaacatatccatataatttgaaagtgtggtttcgcccttcaaatatttgtcgaaaacctcacggatatcgtagtcatattccatatcaaaagcgtcaaaaagctcatagtcgcttgcggtataaattccgctcttgcgagagaacacattgaaagagctgtgtacgctttcggcaagccaaatgcagtcgggatttacctttgcaacagcctctctcgcctgtttccaaaattcaacgggaacgaatgatgcaacatcacaacggaagccgtcaacaatcttcgcccacataacgagtgaatcaatctgatactgccataattctttgttagaataatcaaggtcgattatatcactccaatcaccgactttgttgccaaaattgccgtccggctttctgtagaaaaatttgggatgttcaaccgaaagatttgagtcgggcgaagtatggttatagacaacatcaatgatgcacttcatgccctttgcgtgaattttttcaacaaggctcttgaaatcgtccattgttccgtattcgggatttgttgtgcgatagtccttgtttgcataaggacagccgagagagccttttttattcttgacgacaatcggatgaatcggcataaaccaaatgatgtcagtgccgagtgactttattcggtcaagatcctctgcaacggcattaaatgtgccgtcatttgtgtggttgcggacataaaccgaataaataaccttgtttctcaagctgatttcagtattttttgccatttaaaacatctccttatgtatttttccacggtctgtttttaccgttccaacctcgttctacccagtaatttttatcggcttcattccagccgcttttctgaatcattctcataataaagaaaaagccttttgtttttaaacctgccttaactttgccgttatttttctttaccttattggcaattgaggtagtctttttgtcaattttctttttgagttcatcggtgacgcctgaataatttgttgcacgaacattgacaccgtaacgataagtttttggaacgccccaaaagaacatactgtcggcgatatccttgttggcagattttgtacccgaacctgcggctgtcgaaattacaaccgcctgctttgtaaacattttctgttcgggacggtgaaccatccaacgataaccgtaatgatcaagaaatgctttcattgagcctgtgcaatgataaacatacacgggcgttgtgaagatgagtacatcagcctcgtccatagcctcggtaatctttttcagtcgctcataatgcggacaaagtgtttcggcttttagaaaacactgcgtacaacctatgcaaaaatcgccgaaatctctcggaagaaaaaactccgtaacctcgccgcctaatttatcggcaacctgcttgccaatatgataggttgagcctttatggttctgaccgtttattactgcaattttcattttatgtcaccaaattcatcaatttcaagtcaattttagcacaacaaagcaatattgtccatatgatttttatgccttttaagagcttttttatgcggattttttactcttataaaagacaaaaagcacctgtcctctgacagatgcctttattgtcaatcatcataatgacctttgcactggtaaacaataataaagtcattatttacactataaacaagtcggtctttatcatttatgcggcgactccacaatccacttttatcgttttttagcggttcgggtttacctgctccgtcaaatggattacgctgaatttctttaagcaacgcattaatttttttaagagttttcttatcttgcgtttgccaatataaatactctgaccacgcatcatctgcaaatgaaatattactcaccgctcattttctccaattcttcaagtgatttcgttacaatatggccactttcaacctgagattttgccttttcaatctgagtcatatttgattgcgaatagaacggatcaatcggtgcatcgactgcaaacggaatacttctttcacgaagtgccttttttgcgtaaatcataaaaaaggtggtcagattcatacccatttcagcacacatttcgtcaagctcttttttagtattgtcatcaaaacgaagacttactgttgtcatatcaatcaactcctttcactgcttatattatatgacaaaagaattaattttgcaatagtttaaagcaaatttaattaaaattctttcatttatcagtcattttgaagtagaaaacagctccccgaaaacggagagctgtgataagtacaaatagatttgtcaaacgaatcagaagtcgatttctgtatcgtagtagcaagccttgagaagtttttccatttcttcctgatttggctggcgtgggttagaacctgtgcaagcatcggcaattgcgttcttggcaacttcggggagcttttcgaggaattctttttcgtcgataatgctctcgtcagccttaacaccgcccggaccgtagttcttaatgccctgcggaatgttgagctgatcgttcattgaacggagttcagcgatgagtgcgtcaacaagttcttctgttgtttcgcccttgaggttgatgaacttagcaatcttagcataacgctcagctgcaacaggatcttttgagttatacttgataaccttaggaagatacatagcgtttgcacagccgtgaataatgtgaccgcctgtgaaagccgcacctgttttgtgagccattgagtgaacgataccgagcagagcatttgagaatgccatacctgcaaggcactgtgcatcgtgcattttatcacggcaagccatgtcgccctcataagacttcttgaggttgtcgtgaatcaactcaattgcatggagtgcaagcggatctgtgtactcacagttgagagttgaaacataagcctcaattgcgtgagtcatagcgtccatacctgtgtgagcagtaagtttagccggcattgtttcggcaagtgcaggatcaacgatagcaacatcaggtgtgatattaaagtcagcaagcggatatttgataccctttgcatagtctgtgataactgagaaagccgtaacttctgttgcagtacccgatgttgacgggatagcgcagaatttagcctttgtacgaagtgtcggaaaactgaacggagtgatgatttcctcaaaggttgtgttgggatactcatagaatacccacatagcctttgcggcatcaatcggagaaccgccgcccattgcaacaatccagtcgggttcaaattcacgcataacagcggcgcccttcataactgtttcaacagatgggtcaggctctacgccctcaataagcttaacctccatacctgcttctttaagatagtcaacagccttgtcaagaaaaccaaaacgcttcattgaaccgccgccgacaactacaacagcctttttgccggataaatttttaagacttgagagagcatccttaccatgatagagatctctcggtaaagtaaatctgtacattttaattacctcctgaaaggatattttgtcaacttctccttgactaccgtaattataacaccgaagatttataaagtaaataccttttttgaaaataatgtgtgtttattttgtgaaattttcactatagttctttattggaatttatattgagaaatatgctcagttacagcccgtaaatgttgtcatctcccttggcatatttcttaacagcctccataaaaagctttgcggcaggatttgaaatattctttccccatgccataacataggctatgcttgtgtccgcatcatcaataaggtatgaatcggtgtattcgtcagaagtgtatgcggcaaccgaggttggtacgacagacacgccgattcccgatgacgatgacacatatatggaaacaagatcgtcaaatgaattttcaattttcggggttatgtgaaatgtacggaacaaatccataatttccatatatacaatcggtgcaactgattccgaaagtaccagaatactttcgtcagccaattcggaaagcttaacactttttcttccgctgaattttgaatttttcgctgttacaacggacaaagtttcattatgtgtaatgattgattcaatacctgaactttcgggaaccatatctctcggcataaagcagaagtcgtattcaccacctgtgattgcaagcgtgcggtcagcctcgtcaagctgtcgcacatcaatcgtaattcccggatatttttccgcaaagtcggctatacattttgtcgggaacgaaagcgaggtaacatcacagccgagcgtaattttaccctgacctccgtcatgcatctgcttgataacggtttttgctttctttaaagtttcaacaatttcaatcgcatagggcaaaagtgccttgccctcgcttgttatgataacatcacggtgagagcgtgtaaaaagctgaaccccaaactccttttcaaggtcgcttacatatctgctgacggttgactgagaaacatagttccgccttgccgcctctgaaaagttgagcgtctgagccacagttataaagcaattgagctgatttatatccataataacctccgttttgacaatttcccgcagtattttgtcggtttttttcaatattatgcaaaactgtaaatttaagactgccaaatcgtcatttttgcataatcaacggtattgaataatttttccatatttggtacaattcaagtatagcataataatatgcaaaatgtaaataacttattttaaaacaaggagcttaacgaatgaagaaaatagttgtaaccggtatgggtgcggtaacacctgtcggcatcggtgttgaaaactactggaataatatcacggcaggtgcatctggcattgacacaattaagacttttgatccgtctgaactcgctgttcagattgccggcgaagtaaaggactttaatccgtccgactatcttccaaaggatttaatcagaaaaacagatccgtttatgcaatacgcttatattgcggctgaggaagccatgaaacagagcggaatcaagattgaacccgaaagaacgggtattgttatgggtactgcaatggcaggtattgcaacaatcgcatatactcaggaggcactcacaggcgcatcacacaaaaaggtaggtcctcgttttattccaaaaattctcggaaacattgccgccgcaaatatcgcaatcgactacaatattcagggaccgagctttacggtaagcacagcttgttcgtcaggcggtgacgcaatcaacacagcttgtatgtgtatgcagagcggcaaggctgatattatgctcgcagtaggagcagagtccgttctctgtcctcttgtaatttattcgcttgccaacgcaaaagctctttcaagaagaaacgattcgccaagcactgcaagccgtccgtttgatgttacccgtgacggttttgtaataggtgaaggcggcggtgcgctcgttcttgaaacagaggaacacgctcttgcaagaggtgcgaagatttatgcagaaatcagaggttgcggcaacacggatgacgcttatcatgtaactgctccgcatcccgaaggacgaggtgcaatcgcttgtatgaaacaggcaattgcagaggcaggaatcaatccttccgacatcggctacatcaatgcccacggtactgcaacaaacaagggtgacacagttgaaacatcttcaatcaagaaggttttcggcaacactctcccctatgtaagctcaacaaagggcgcaacaggtcatatgatgggtgcaggtggtattacagaaacaattacctgtgtcaaggctattgaaacaggcacagttccgcctacaatcaacctcaacgaggttgatcccgaatgtgccggcattgactttgttgcaaataccgcaaagaaagccgaaatcaactttgccatgtcaaacgcattcggattcggcggtcagaactcaagtattatcgtaggcaaatacggcaaataatctgccgacaaaacaacatacaagcaacacacatatgtgtgtataaaataatgtacacccatacataataggacaggaggatattatgaatttaacatatgattcacagatgttcagagaaacatttgaaagtgaatttacatggcttaacggctttatgagaaatgtaagacgcttttcggataagcctgccgcaattgatcctcagagcggcagaatatggagctacaaagagcttaatgccgatgcaaacagatttgcaaacgctatgaaaaaagacggcgtcaagaaaaacgacatcgtgtttatgcagctttacaactcaccgcagtttttgtttggttacattgcgccgcagaaaatcggtgcaatctcaaatcccgctaactttaacctatcaccgggcgaaaccgcagaaattatgggacacaacaagcctgttgtttatgtttatgatgcagacattatgcaaacagccgtacaggctcttgaaatctgcgagcataagccaaaattgattctctgcgttaataattccaaaaaggaagtaactcttcccgaaggacacattttctttgacgattacgtcaaggacagcagttacgaaaatccgcctgtggactatgcaccgcatatttatgacgaggttttaagacttcagacctcaggtacaacaggcactccaaagggcgttccgcttaacgcaatcaacgaagttctttcggctcacgatgtaattatgcactttccgctctcacccgttgacattacgatgaatatgacgccgtggtttcaccgtggcggtattcattcgggcggtcctacacctaccctttatgcaggtgcgtgtcttgtgattatgagaacattcaacccgagaagctgcatggactttatcgaaaaatacggcattacattcatcacaggtgttccgtcaactcttgagatgcttgcaaaccgtcaggaaaagcatcagaaaaacctttcttcgctcaagggcattattaccatgggcagtccgcttgaaaaagccgcttgcattcgctatcaggagcttctctcccccaacatttttaacggctacggcacaacggaatctttctggaatacatttcttcgtccgtatgaccttcctgaaatggcaggttcggcaggcagatcatgcacagatgatgaggtaagacttgtaaatgtttatgacgacagaaaagcagagcccgatgacacagtcccctgcgataacaaaacagagggagaaatcatcatcaaatgtccgaacaaaactacctactgctatgtaaataacgaaaaggctacaaaagacaagttctacaagggttggatgtacacaggcgacatcggcacttggaacagcgagcagtttgttacaattgcaggcagaaaagatgatatgattatcagcaagggtgaaaatatttatcctgcaagaattgaggaaattctcaactcacacccgaaggttcaggaatgtatcgtaacaggtgttcccgattcaacaagaggcgagtgcgttgcggcatatgtaataaaagctgacgaaagccttacagttgccgagcttatcaatttctgcgacagctcaccgaatatttcaaaatatcaggctccgagatactaccgttttgtcaacgatcttccgcagactgcaacaggcaagaaacagcattttgtaataaaaaaacaggcagcagaggaccttaaaaacggtttgttgcttaaaaaataattacggattttccatatatatgtaaaggagaaaatatgaccgagaaattatacaaagcaaaggtttcatactatgaaacagactgtatgaacattgttcatcactcaaattttatcagatattttgaagatgcaagaattcagtatatgcacgacatcggttgtgatgttgccgaaatgcagtcaaaaggattgtatattccaaatgttgacgcatatgcccgttacaaaaagccgcttaaattcggcgatgagtattccgttgaagtaagccttgtattttttacgggttcaagaatgatttttgactataaactcttcaacaataaaaacggagaactttctgcaacaggcagaacaacacactgttttgcaactcccgagctaaagccgataagcataaagcattcaaatcccgattattacaacagacttcgtgacaatactgtcagcccggaagatattacaataagaagataaacaattttacaagcaaaaagtgcgtaccgaaattcggtacgcacttttttgatataggaaaataggaaaatatcagtcgtcaaagttgggagtctgaattgcatcgtagcctgtttctcccgtacggattttaaccgcctgtttaaggtagtaggtaaatattttaccgtcacccgggttgcccgtaaaggctgtttttctaattgcctcaattgtttttctctcccattcttcggaagaaacaacaatttcaaacttgattttcggcaaaacctgaacatcaaccttctgtcctcttacatactccgacatacctcgctgaattccgcagcctacaacctgatacgctgtaattccgtttacgccgatatccgtgagagcctttttgacatctacaaacatttcttcacgaacaacggcctctatttttataagctgaatatcgttattgttttccatactttaaaacctccgttagttgtcaagaccgttaaatgacggataagcagattcaccgtgctgtgaaacatcaagtcccataagctcatctctgaggtcaaccctgattttgcctgtaagaagtcttgtgatgccgtagcagatgagtgttccgacaaccgcaattacaattgtgataccgatacctgccgcctgagcactgaactgtgcaaactcaccgtacacaagaccgttacctgcactgctgttgattgccgtgcatgagaacacacctgtgagaagtccgccccagataccgcctgtaccatgacagctgaatgcgtcaagcgcatcgtcaaagccgaattttttcttgccgtatgaaatcataatatagcaaactgggcttgttgtcaaaccgataataactgccgcccacatcggaacaaagccggcaccgggcgtgatacctacaagacctgcaaccataccagtgcttgcaccgataagcgtaggctttttgttcttgataacatcgcagagcatccacgagagcattgcggctgcggctgaaacacccgttgtcataaatgcgtgagccgcaagaccgtcggcggcaagtgcagaacccgcattaaagccgaaccaaccgaacataaggagcgacgcgccgagtacaactgtcgggatattgtgaattctataaattgaatgttcataatcgtgacgcttgccgaggagtatgcaaagtacaagtgccgaaacacccgaactgatatgtacaacatcgccgcctgcaaagtcgagagcaccgataccgtctgcacctaaaagtcctccctgtccccacaccatgtgagcgagcggataataaacgataagcgaccagaaaatcgtgaaaataaaaattgacttaaacttcattctgcctgcaaccgcacccgtaataagagcaggagtgattacggcaaacatcatctggaacgctgagaataccatattcggaattgacgcatcatccgtgtagccctccgtgagtgaaacaccctcaagaccgagccaacggaaatcaccgataaaagcatttcccgaaggggcgaacgaaagcgaataaccgaaaagcacccacataacaattccgacaccgataataaaaattgatgtcatcattgtatttacaacatttttctttcgtacaagaccgccgtagaacattgcaagacccggagtcattacaaatacgaaagccgaacaaagcagcacaaagcctatatttcctgaatccatttttaacctccacataaaccgtttttgccgaagcaaaaaaataaagctcacaatgtttttatctgattttgcaagtttttaaaaatttgttgcaaaatcagaagaaaccaaagtgaacttccttgtcctttttatattcagttttccgaaaacttcgtaagacctttgccttactgtcttgaattataaagcctcactaaccgattgtcaatacttttttgaatattttttaaagttttttgctgttttttaaattacagtttacaataacaggtcaaaaatctaagctatgtcacaaatttaatttttgcaagtttatttaattttcttgcaaattatttttttgattacagcatattctttgtagcgtttgtagcggcgaacctcgttcgccgctacattaaattgtgcaaacagctactatactacgctcgggcataatatgttttttatattgcgaaccatcttcccgaacgcaatttttcatttaatgaacctatctgcacgaatcaggtacggcggctcgccgtactggcgtataatatcgtccctacaaaataaaaactacggtcaacatagtcctgtcaaccgtagttaaaatcaagatattttattttgcaaaatcggacgctctgctttcacggataatattaaccttaatctgtccgggatattcaagctcttcttcgatttttttacagatatctcttgcaagcggaatcatacgctcatcatttacaatttcaggcttaaccataactctaacctcacggcctgcctgaattgcaaaggtacgctcaacaccgtcaaaagaagacgcaacctcttcaagcttctggagtcgcttaatgtagttttcaacattttctcttcttgcacccggtcttgcggctgaaatagcatctgccgcctgtacaagacaggcaacaattgttctcgcctcaacatcaccgtggtgagcgtgaatagcgtgaataacagcgtcgctttccttatactttttggcaagatcgacaccaatctgaatatgtgttccctcaacctcatggtcaatggatttaccgatatcgtgcaaaagacccgcacgcttagcaattgtaggatcaagaccaagctcgctcgccatcatacctgcaatgtatgaaacttcaagagagtgatcaagtacattctgaccgtagcttgtacggtaacgaagtctgccgagaagcttgacaagctccggatgaatgttatgaacacctgcgtcaagcacggctctctcacctgtacgcttgatttcggattcaacctctcttcttgccttttcaaccatctcctcaattcttgcgggatggattctgccgtctgcaataagcttttcaagtgcaattcttgcaatttctcttcttacaggctcaaagcatgagagcgtgatagcctccggcgtatcatcaataataagatcaacacccgtaagagtttcgatggctctgatgttacggccttccctaccgatgattctgcccttcatctcgtcattgggcagaggaacaaccgaaattgttgcctctgaaacctgctcggctgcaagtcgctgaattgcaagcgaaataatgtttcttgccttgtcgtctgcttcctctttgagctgttcggtatattccataatcttaaccgacttctcgtgagcaagctcattttcaagctgtgaaagcaaatagcttttagcctgttctgccgtgtaacccgaaattttttcaagcatttcaaactggctctttttcagagtttcaacttcttcgagttttgcatctgcatcacgaagctttttgttgaccttttcttccttgcgttccatattgtcaagctttttgtcaagagtttcttccttttgctggattcttctctcctgacgctgaacttccttgcgtcgatcggaaatttctttctcgctctcgtttctgaaacgatgaacctcgtctttaccctcaaggactacttcttttttccttgcttcggctgttttgattgcatcagccacaatcttctttgcctcctcctcagcacttccgatttctttctcggctgtgtttttgcggatggcaattccaaggaaaatacctgcacctgcgccgataacaactgcggcgacaatgcagataatacttatccacaatggcaatctggacacctccttagtttgattttttaatatttcacagttcccaatcaattagactttaaaggtgccgttaaaaagatattcaattttcatttttactttgtaaatatttttaatacattatatatacatacgcaaccgcaaaacaccctacagattgcacagaacgtttcaaaaggcgaaacgccataaaaattacaaaaaatatctatatataacggctcttttaaagagtctgattaaaaaagtcgcaaaagtcaaaaactgtacttttgccaaaatccgcatcagcggactatacaattttataataaaataaccaaattgtcaagaataagcacgggaattttgcagataattattacggaaataaaaaagattacagctttttgacggttacagcttaaatttgccttaaaaaagcaaaatgtgaccgtgttttttaccgtatttgtaaaaaagtcaaaaatttttcgttaaatttttgtcaagctattgaagaaatgaaaaaaatgtaatataatagaagcaccttagaattttaggaggaatttttttatgtcagtaaaagttgcaattaacggtttcggccgtatcggtcgtcttgctttcagacagatgttcggtgctgagggttacgaagtagtagctatcaacgatcttacagatcctgctatgctcgcaaaccttctcaagtacgatacagcacagggcggctactgcggtaagatcggtgaaaaccttcacacagttgaggccggcgaaggctcaatcatcgttgacggcaaagagatcacaatctacgctaagccaaacgctgctgagcttccttggggcgaactcggtgttgatgtagttctcgagtgcacaggtttctatacatcaaaggcaaagagccaggctcacattgatgccggcgctaagaaggttgttatttctgctcctgcaggcaacgacctcaagacaatcgtttacagcgtaaacgaaaagactcttacagctgacgatacaatcatttcagctgcttcatgtacaacaaactgcctcgctcctatggctgacacacttaacaagtatgcagaaatccagagcggtatcatgtcaacaatccacgcttacacaggcgatcagatgattcttgacggtcctcacagaaagggcgacaagagaagagcaagagcaggtgctgctaacatcgttcctaactcaacaggtgctgcaaaggctatcggtcttgtaattcctgagctcaatggtaagctcatcggttctgcacagcgtgttcctgttccgacaggttcaacaacaattcttacagctgttgttaagggttctgatgtaacagttgaaggtatcaacgctgctatgaaggctgctgcttctgagtcattcggttacaacgaagatccgatcgtttcttcagatgtaatcggtatgagattcggttcactcttcgattctacacagacaatggtatcaaagattgctgatgatctttatgaggttcaggttgtttcttggtacgacaacgagaactcatacacaagccagatggtaagaacaattaagtatttcgctgagcttggctaatctgaatttacagattattctttgggctgtcctttttggacagccctttttgttttccttttcggaagatatttatccttatttttctttattcgtaaaattatgctttaaaatgtaacatttagtcgcagtttataaaatatacacgaaaaattagttttaaattttttgaatttgcttgaaattgacatataattttggtattatataagtgtgagcaaacaatcaacaaacaacagatattaaacaaggagcaattcttatgaattacagctttaacgaggcaagaccggctcttgaagtttttcacaccggcgattcagtgcgtgcatatgattttttgggcgcacacctcgtgaaccgtaacgacaaaaacggagtagtgttccgtgtgtgggcgccaaccgcaaggagcgtttcggttgcaggcgattttaataattggaacaacgaggcaaactatatgtataacatcggttacggtgtgtgggaagtgtttgtcgagggtgtaaaagagttttgtacatacaaatactgcattgaaagcgaatacggcgacaggcttatgaaagcagatccgtatgcttttcatgctcaaacccgccccggtcaggcctctgttgtatatgatatagaaagctattcgtggaatgacagcgaatggtttaataaacgcaaagaaaacaacatttcatcgtcaccgatgaatatttatgaaatacatgcaggctcatggagaaaatatcctgacggcaacttttttaactatcaaaagcttgccgatgagcttatcccctacctaaaggagatgcactacacccatgttcagcttatgccgattatggagtatccctatgacggcagctggggttttcagacaaccggctactatgccccgacttcacgctatggcacaccgtctgattttatggcttttgttgacaagcttcacggtgaaggcattggtgtgattcttgactgggttccgtcaaattttccgacggacgatttcggacttgcaaggtttgacggttcacctctttatgaaagcaacgatccaaaaacaagcaagcgtgactcatggggaacctgccttttcaactacgcaagatttgaggttacaagttttcttgtttcatgcgcaatgttctggctcgacaaatatcatattgacggcttgagaatcggcgcactctcctctatgctctacctcgattacggtaaaaccgagggtgaatgggaaccgaacaaattcggcggaaaagaaaatcttgacgctgttgattttgtaaaaagactcaacacggctgttcatatgtaccaccccgatgttatgatgtttgccgaggaaaacacatcgtggccaaagcttactcataaaatagaggacggcggtcttggttttgacttcaagtggaacatgggctggatgaacgatatgctgcactatatgtcactcaatccgatgtggcggccgttcaatcatgacagtcttactttcagcttttattatgctttttcagaaaaattccttctgccgatttcacacgacgaggtttctcacggcaaaggctcactcataaagcagatgcccggaaagtatgacgagcagtttgcaggcgtgagagcattcataacatatatgtacgctcatccgggcaagaaactcgtgttcatgggaactgaaatcggacagtttgacgagtggaatcacgaagaggcaattcaatgggatttgcttgaatttgaaaagcataaaaagctcagaacattttttaaggagctcaacaaattttatcttgactgcaagccgctctacgaacttgacacggtctggaaaggctttgactggattcaccatgacgattacacaaacagtgttattgcattcaagcgcaccgacaaaaacggtgatgaaattgtttcggtatgtaattttcagcccatcaggcgtgacgaatactgcatcggtgttcctaaatacggtctttatgacgaggttttcaactctgatgaagagcgtttcggcggaagcggtgttgtaaacggtaataatatcaaaaccgaggtaatgaaaattcacggttttgatcagggcctttcgctcactctcccccctctcagcgtaatctatctgaggtgtgcaaaagagcttgaccccgatgaagctcagaaagaaaattgatattttcagtcacaggactgtaattaataagtttaataaagataataaaataaatatcggaggtattttaagatgtttccaaaaaaggaagtagtggctatgctgcttgccggcggtcaaggctctcgtcttggcgtgcttaccaaaaagcttgcaaagcctgccgtaccgtttggcggcaaatatcgtattattgatttcccgttatctaactgtgtaaattcaggcattgacgctgtaggtattctcacacagtaccagcctcttgttcttaacgaatacataggaaacggacagccgtgggatcttgacagtatgcactcgggtgtaaactgtctcagcccttatcaggctgttgacggtgcagactggtattcgggaacagccaatgcaatttatcagaatatcaactacattgagcgttataatcctgaatatgtggtcatcctttcgggcgaccatatctacaaaatggattacaacaagatgcttgaatatcataaggaaaagaatgccgcttgtacaattgcagtaattgatgtttcgcttgaagaagcctcaagattcggtattctcaacacaaatgaggacggctcaatctacgaatttgaagaaaagcctgctcatccgaaaagcactaacgcttcaatgggcatctatattttcagttggaaggaacttaaaaagtatcttacggaggatgaattcaaagagggttcaagccacgatttcggtaaggatgtcctccctgccatgcttgacgcaggtgagcgtatgtttgcatatccttttgaaggctattggaaggatgtgggaacaatcgacagcctttgggaggctaatatggatcttctcgatccaaaggttactttagacctcaaggatatctactcaagaaacccgatgatgcctccgcactatgtttcaaacgaggcgtcaatccaaaattcactcgttgccgacggatgcaatgtttacggcaaccttgagttctcaattctctttgcaggtgttacaatcggtaaaaatgctacgattaattcttcaatcatcatgcccggtgcggtaattgaggacggtgccgaggttcagtttgctatcattgccgaaaacaccgttgtaggcaaaaatgcaaaagtcggacaaaaccccgaagaaacggaaaatattgacgactggggaattactgttgtcggtgcaaataccgttatcaaagaaaacacagttatcaaagcaaaaaccatgatagacagcgacacggaggtggacggcaatgagaagtaataatgtactcggtttcatctttgcggcaacacttgacgacaaaatccccgagcttgcatcttcaagaacaactgcaagcgttccgatcggcggaaaatacagaattatcgactttgacctttcaaatatgtcaaactcaggtatcagcaatgtaggcatagttgcaaaaagcaactttcagtcacttatggatcatgtgggttcgggcagtgcatatgacctttcaaagagaaggagcaatctttcaattctcccaccatatgacggcaaggctttttcaagctttgttgaaacaatctacaatatgcacggctacattgagcattgccgtgaggagtatgtgcttatttcacagggcaatgtaattactaacattgattacacagatgtttttgacttccactcaaagaagaaggcagacattacacttatatataagaatcatgcaattccgcagggctatgacagaccgattacccttgatgtagataatgacggcaaggtaaatcagatttttgtaaagcccggtgttgttgacaaagaggtattcaaccacgcatacggctctattctcatcaagaaagacattcttatgagtgaaatccgaaacgccatcagcgttaatcagcttgatgtaaagcgacttcttcagagcagtctgggcaaatacagtatttatgcttatgaaaacaagggttattgtgcggcaatcagctcaatcaacgattactttgagttcaatatggatcttatgaaaaaagaagtaagggatgagcttttcaatccgcaaagacctatctatacaaaggtaagagatgacgctccgtcacgctacggacttacaagcaatgtgaaaaattcaatcattgcacagggttgtgttatcaacggtgaggttgagaactgcgttatttcaaagggcgtttatgtcggcgaaggcgcaaagctttctaactgtattgtaatgcaggacacaaaaataggttgcaataccaacctcaactatgttatcatagataaggatgttaccatcaaagatggtcgatcacttatgggatatgattcgtaccccatttatattgctaaaaaatctgttgtataaagttgtttaaacaggaggtaatcttacaatgagaattttatactgtgcttcagaggctaatcctttctgcggcagcggcggacttgctgatgtagcaggaagtcttccgcacacactttgcagaaaaggtcaggattgcagaattgttgttccgctttacggcacaattccgcaggaacttaaaaactccatgaacttcatcacaaactttaccgtgccggttgcatggcgtcatcagtattgcggtttgttctgggcaagatggaatgactgtacatactattttattgataacgaatattatttcaagagaggcactctctacggtcattatgacgacgctgaaagattcgctttcttctcccgtgcaattcttgaaatgcttccttacattgatttccatcccgacatcattcattgtaatgactggcagacggctcttgttcctgtttactactatctgttctattcacacagaccatggtactataacattaagagtctgttcactattcacaacatccagtatcagggtgaatacggctgggaagttaacacagagtgcgtcggcattcctgcatccgaaacaaagattcttgaaatgaacggcaaactcaatatgatgaagggtgctatcgaaacagctacccgtgtttcaactgtttctccaagctatgcggctgaaattaaagacccgtggttcagttggggacttcatgacgaactcaatcttcgccactacaagctttgcggtatcaagaacggtattgacacagaaagctacaatcccgaaacagactatcagctttatcgcaactattcaaaggacgatatgagcggcaagggcgaatgtaagcgtgctttgcaggagcgtttgtgtcttgaacagcgctgggatgttccgctggtcggtatggtaacaagacttgttgcacacaagggacttgaccttgtaagaatgggccttgaggagcttatggacacagaaaatatgcagtttgtaattctcggttcaggtgacaaggagtacgaggactacttcaactatatgcaggctaagtatccgggcagactttgcttctgtcacggctttgttcccgaacttgcaagaaagatttactcaggcgcagatattttccttatgccttctgctcaggagccttgcggtcttgcacagatgattgcactccgttacggtacaattcctgttgttcgtgaggttggcggtcttaaagactccgtattcgacagtgccgacaactacggtaatggattcacattcaaaaactatgaatgtgcagatatgcagcttgccgtaagacgagcattgtggggcattcaggacgaccagggttggcatcagcttatgtggcgtgctatgatgagcgacaacagttgggatcgttcggctcaggactacatcaatctctacaacgataccctcaagtgggcttaatcgtgcagtcaaattttataacaaaaaattcagtcggaaagcagatttcaaatttgctttccgacttttattttatttgaaatagcaatctcgtaggggcggatattatccgcccgcgcggcgagccgccgttcccaattcgagcagatagtttgatagaaaaacaattccaatgcccgaattaggtgaatttatgtttacaaaaaattatttttcacaaaaacaaaaaaggttggaaactactgcggggagcagtcgatttccaaccttaaaattttgcattagtttttcatcaggttctctttattgcgtgcggaacacgaattttacctgcaagcttaccaagagcaaacacaagaataatctcgggaatgcacttaacggcaacactgatgaatcttgctgtaagataaactgtgtacggtgttgaaccgccgccgtagagtgtgtaaagccaaaaagctatgaggaatgtttcaacgcagagcatatttgtaaaccatgcaagaacaactctgagcggagttacattgttcttataaagaaacataccgtagataaaacctgtaataaagccgttgattgtaaagccggggaaatatgcgcctgtcggggcaatgataaatgaaagaatatctcccaaagcgccgacaattgcagcaggaatcggtccgaacattacgcctgttacggcaatgggaaggaacgctgcgctgagctttacattgtttccgaaaaacggaagtgtgctgtttgcaaaaaatccgagaacaatacgaagtgcaagcagcattgcaattgccgcaagagcgtagatactcttcatttcaagcaaagagctttgaatttttttgagttgtgacatattttttacctcctgaatctctgttgttgcttcaggaagaaaaaaagcggacagattgctctgcccgctgaattatatgtcccaaagtaacagcgggatgcgaaatctgtaccgcaggataaacctttcgttcttgcggcaactccccgtccgcaaaacacttcacgcacaaatttctactctgtgatagatgcctttcgacaccgtatgttattatacgcctgaatttgttgtttgtcaaccaaaaaattaatttcgggtttactgaaccgttgcttttttcttctttgtaagaagggcatcgaggctgttgataagtcttgaaagcggcttgtagattatgaaaacaactaccgaaatgatgagtcccttaatgatattgaatggacctacgcagtacaggcagaatgtaaatgtgccgtcaattgcagggaaaattgcctgtcccattttgataatttctgtaagcggcataaatgacgagtagagcggaacaagcacgaatgtgttgagaaccacaccgattgccgccattgcaaccgtacctgtaagcattccgacaatcgcaccgactcttgtttttttgtacttgtagatgaaacctgccggcagaataaacgagcagccgatgagaaagtttgcaagctcccctactccgcctgtacttgtgcctttaataagaaacttaacgagaatttttacaaattcaattactgcaccggcaatcggacccatgctgaatgttccgacaagaacgggaacttcggaaaaatcgaactcatagaatgaaggtgcgatgaatccgagaggaaattcaaagaacataagaactgccgaaagtgccgcaagcattgcggttacggcaagctttgttgtctttgccgtgttgtctgaattaattgtttttgtttttgcttttgattttgtcattacgaccactcctgaaaaattatttcgagttgtcgggaaaagaaaaatcccgctacaaatgtaacgggattgcgtaccaaaataaaacagacgaaccgcctgttctgccgcatcttctcgtatccggactataaccgtcggtgtctgaatttcacagactcggcaggctttcacctgttcgtggactttaaccaccggtggagaatttcactccgccccgaagacaactgttgattatattatatgccgattttcggatttgtcaatatctcttcagggttttgagatattttttcgtttcatcgtcaattctgaaactttcaacgcatttccgaatcattttattaaaggttgcgttatcaagagaatttgactttatgtaccgcatagtctgttctctgcactttgcaagtgctgttgcaacaagccatgcccttgccatgctcacataataatgcggatttttcgcattgtcacaacattcaagcaccgtgtctatgtactcatcttcaagataatagtcaagcatcagcacaagacctgcacgaattatccacggattgtcgcttttggtgtattcacaaacatgagggaaaaattctgatttatactttttcgtctgctttaaatttgcacaaaagccgtcgcaaaccgcccagctgtctatacgctgtacaaaatcatcgcagtacatcaaaaattcttcatagctttcggttttgagcaaaccgattacaatacctcgcattgttttttcttcataagaattatcggttgtctgctccaaaaaactgcgtccgtttcccttagaaatttccttgccgagctttcgcataacaggcattcttactccgataaaaaagtccttgtcattgtcgggaatcaatgaggaatgaaagcttctgtacttttcatcggcatatgaacgaagttcccctacaaaatcatcatagtcatttctagtccaattatctcttataagctccataatgcaccgctatttttgcttattctttctttcgctgtcataaatttcacacggtgagttcaggtcaagatatgcaatatcgtggtgtggcactctgtcctcaaccggcggaagctgcatataatcaccgaaaaccattctgagatactcgtcatagccagacatacacggcatttttatgccctcaaatgtgacataatcaacgcccgaataaatgtgtttcggatactcaattttcatccaatgagggcctgaacaaagctccgttacacacttgtttttatcaagcctgtacttaaccatatgcttttcggcagttctccaaatcttttctcggagctttttccctctgaaaattgaaagcaaagccttactgcctgctcccacaattccgccgtgcttttcgggaacaacctgagccaaaaacagcgaataaagcattgtccacacatactgcattttgcgtgcaaaacggctgtcgggacaaacatcaagcggaaagacatcaagcacaagtccgtgcggaatatcaacctcggtctgatttgtcttgaccatagtgtaatttgtgtcggttacggtcataaaaatattgccagtgaacatatcgctgtcagttttgagaagtcggaatcttccgtctgcgccctgttcatgccaaagcttgtacagcttttcgtagtcctctcgtggcagcataacatcaacatcatcatcccacggaacgaatccgccgtttctgagtgcaccgattaacgcaccgccgatgagatagaatgtgagattgttcttttcgcaaaagtccctgaaatacacgagcatatcaagttgtttaagctgtaactcacgcaaaagttcgggggtaagttctactttttcagtcataagtatctccgtaaatatcaaatacgggcggagattatccgcccaaaaaattatttgtatgaatgaccgggaagtgtgttttcccttatttttctttttaccttttcaatgtgttcttttgcaccgctgtttttgattttcttccgccatgacggaatctgaatcaaaccaacaattgtgcctattccgtaggcaacatggagcaacgggaaaatgaacggcaaaaacacaaactgaggctgaacatttttcattgtgcaacatccgacagcgtttacaatatcaaacattccgtaaattatcaaaagaatgtacaaaaaaagcggaagtccgagaaatgcaagcacggaacagccgaaaagtgccattacaaaaagaaacggtgcaaagtgaaagtatgaaagacaaccgggacattccgagagtgtaagtcctatccaccgtccgtttgaatacttctgccttatcattccgtgaaggtcgtttcgtgaatgctgatacgaaataatatcgggacaacagcacatcttgtagcccgccattctaatgcggtagtgaaattcattatcctcggttctgccgagattttcgttaaatccgccgaccttggcaataacctctctgcggtaagccgcatgaaaaaggctgtcaagatattccttttgcgcaagcggccgtctgtacgaagcaaccgaactgccgaacagagaatcctcagccgcaagcaaggtaagcttccagcttgaaacatttgaagtgatattcggtctgccgccgcctacaacattttcgccctgctttatgttataaacatttcgtgaaacaaagtttctcggaattcttgcgtgagcgtcaactcttatgataacatcgccctttgcggtcatcagagcggcattccaagaggttgcctgattacgctttacgcattgaacaacggacacattccaaaagccgtagtcggtatcacggaatttttccattttttctttagtatcatcggttgacatactgtcaacaaataccacctcaattttatcatgcggatagtcctgaagtgcaatatccctgaaaagtccgctcaaagcattcgattcgttataggctatcatacaaagtgaaactaacatataatatctctgctcccttcaagctcgaacaaccattttgcagacattgcagaggttgtcagaaaataaggcacggcataaaatgccggaacaacaaaaaagcacaaagccgcccaaccgataaaaccgataaacagctttattgtggagatgaagttctttattgaaaaagccatcattctcggaagataaattccaagcggcagatgttcgttaaaaccgtaagccaaaaatgtataatgaacaaaaataatgtaacacaccacaacaaccgcagtgctgacgataaacgccaaaacaagcaatacagccacaaccgccgtgagtgagggtgaattttcaattattttatccgaaaccgcactaagataattgaacacattgagcagaccgcttatgataaaaaacaagccgactgaaattacatcaagaataacagacttaaaaaataatttcggctttttataatagtaaaaaacatcaagaggactgcactctctgcccctgactacattacacacacttctgtaaactccgtttatgagcggcagacacacaacaacaaaagcaaaaaatacaagcccgaaaatcattgtaagcatctgctgagtctgattcggattttttacaccataaagtcctgccacagacattgcaaggctgaacgcaaacagccctgtcaaaaatgcaagcacagcgaccattatctctgagataattaccgaccggttcccctcaagaaccttttttgcctgttttctaacagttttttccgtattcattagcattcccttttcatctgaatttgttcataacgaaacgcattattctccgtcagtaaacattctgtacattgcctcaaggcaaatctgagcgtgtttaaagaagttctccttatccatactttcgtctgcattgtgcatacgaacatcgtcatttttgaatgcaggaccgaatgcaacaccgtgacctccgagcattcttgcgtatgttccgccgcctgttgaataaagctcagccttttcacctgttacgctttcataagcgtcagagagaagctttacaagcttgctgtccttatcggcataaagcggttcttcgtgattgagaacagtaaccttgaggtcgctgatttttgcaacctttttgaactgtttgagaactctgtttccgctcacggtaacgggataacggatatcaaacacagcctttgcggtctgtccctcaatattcacgctgctgaggtttacggtgagcgagcccgaaacagcgtcgctcattttaagaccgagtgatctgccgtttgtttccttgttaattgcgtagtcaataaatgaacagattgaacctgtttcctttgttgtgtaaacatttgagataaggtcaacaagtgtcgctgcggcattgtagcccttgtccggttcacacgcatgagccgctttgccacggctgattatcataagaccgtcaatagtgtaattaaattcaaaatcaccgtcacttgcgtctgcaaggcgcatgagagtctgctcgtcatagtctgatgaatcaagcattacatacgctctgtcgggaactgcattaactgctctgcctgcatggaactggctgagtgttgttgcattatttaaaagtgtgctgacttcaagctgaagaatacccttttcggcaaagcagatgccgtagtcgctgtcgggagtgaacgccatgtcgggaagtggatttttcttgaaataattttccatatcctccatacccgtttcttcacccgtgccgtaaatagcacgcagagtgttcacgccctttacaccgctgtccttgattgctttcaaacaatagagagtaacaagagccgcacccttgtcgtctgcaattcctctgccgtaaagtctgccgtccttttcggtaagcgcatacggcggaacgctccagctgtttcccgcaggaacaacatcaaggtgagtaagcacaccgcaaagctttccgctgtcgccaagggttatatgaccgctcttatcggttgttctctcccctgtcagtccgaaatcttctgctcttttaagaataaaattcaaggcattatcgcactcgtcattcttttcaccgtcaaccgattcaaaagaaagaagtgtgttaagatcctttaaaagttcgtctttgaagtcaagtattttgtttccaaacataataaatacctccgtacttaaatgctgattgtatctttatcagtttttattttttctttttttaactgttttaacggtcacaataaccgcacaatagattaaaaatgctccgaatgcgcaaaggctgattttgacacctgttgaaaatccgggtgtttcataggtgaacacaatgtcacacttttccccctttggaatcttaacagccataaagccgtagtcaaccttttcaacatctgccgccttgccgtttacagttgcggtaaaaccatcgctgtaaggaacgctgaaaaacaacaggttatcgtcaccctttttattattgtaaacagccttaaagccgttatctgtatattcaaatgaagtacaactgttcaaggccctgagattacaaacctttttgtaatctgaattactgtaatcaaacttttccgtaatgctgtcataatcctccggatgtttgccgtacaaaagcttgtacttttcatcgctgtagcccgtaatatcggaatacttcttcataaggtcacggggaagaaccattgcatagagcaaagcctcggacttgtgtgcgttcgtcacaaggtcaaattcttcttcggcaatgaacttatcaaaggtgtatcccataggaatatagtattcgttgcggtaaatatcaaaacggttctgcgttctgagatatttccaacccggcattcttgtgttgccgttttcgtcaacgaatgaattcagacttcccgattttccgtcgccacggtaatcaaaaagatacttacaactcagaaacgggcgaagtccgtatacatcaaggtcaggtcttgacgcaacatcccttgtaattccgagtgcatcgtaaaactgcattatagatgttgaaacagaactctgaaagcagttaatgctctgaatctgccagaacattgccgtgttgtcaacacattcgtaaaaatcactgcgaacattgtcaatatcggcaattgtgataccgtcacgcctgtttatgatatcttctttgatggcatttgtactgctgcttgagaaatagcctgtggcgattataaaatatgaggtaaaaagcgaaacgctcaggataccaacagtgagcataaccgtaaatctctttttgtttcgtctgaattttttgattatgagaacgaacgcaagcagacttaacaaagccataaggacatagagccaatagcgttcaaatgttgcctgagtgccgataaccgtattttgaatatcgccgctctcctcatccgtatagctcacaggcataagacctatcagcagagttgcacctaccgtaattcctgccgaccaacgaatcgccctgttccaattggtttttctgttttcaaacgccttgattgttgcaagaacaagcataagcacgcccatatagaaccatcttgcgtagtaaattgagctgttcataagctggaacatactgttcaaaacaggcacacacgcaaacacagcaagcacggcaagaagctttttgagccagctttttcggcaaacctgaaaatatgcgataactcccgtcattccgacaagcggcaaccatgccgcaacagacgcccatctgcaatttgagccgggtgtgaacacaggaaacgcaggcatatctgcggggaaaaacaggcttaaaattatcagccagtatttttgcggttgactgtagacaagcgaatcccagccgttcggaagctcggcaagccttgggtttcccattaagccgagcactgacggcagcagtatgaacgccgttgcaaggaatcctatgataacctcaagcgcaagcaagagaaaatttttaactttaaatttgtaggttttggtaagcgtaatcataagaaaatagatgattacgaacagaacctgtcccacaaagaagtagtagttcacaacacaggcggagaataccgcaagtgtgaacactattctttttccgtcatagatgaatgcgtcaagtgccgcaagcaacagcggaaacattatcatcggttcatgaaagtggaaaaagaacacattgtagattgaaaatcccgaaaatgcatacagcaatccgcctacaagagcgaaattcctgtcagccacatatcttttcaaatagagatatgcggaaagtgacgcacagccgaattttaaaatcagcaacggtccgataagatacggtacagtctcactcgggaacggaattgtcagccaaaagaacggactgccaagaagataaaagctgaagcttgagagcatatccgttccgaggtcaacattgtgcatccaacccatatcaccgtttcttacggcgtcatgcacaagctgataaaacggaatttcctgaacattgaaatcaccgtaataatagaaaacaccgccccccattatgataaacggtagaaaaagtgctgttgcagttataattgatataagaaacacacgcaaaccgaatagtttttgtgttggatatttttgcaaaattctgctcggcataaaaccctccacggagcaaaaagtctgaaaaaatctttttttcgataatttctttacttttaaattatgaatagtataatcagtaatataaatgtccttcaccgtcatttattcaaaagacacctacataatagattcaattcggagcaacgctctgctttgcttgcagagaacagaggacactcgcatttagattatattataacataatgcgatacaaattgcactaatttttagcaaaaaacaggagaaactacccatgaatatttcacatttttacgcaatgctttcaagaatgaggtacatcaaccgttggggacttatgaacaacacacgctgtgaaaacctcagcgaacacagtcttgatgttgcaatgattgcacattgccttgttttgattcacaacaagcgtttcggcggtaatctcaatgccgaaagagccgcattgctcgcactttttcacgatgcaaccgaaatcataacgggcgatatgccgactcccgtaaaatacttcaaccccgaaatcaaaaatgcctataaggagattgaaacaacggcaggcaacaggcttgtgtcgatgcttccggatgattttaaggacgatatggataaaatcatcaaaatgaacggtgcaggtgacgatgaacttaaaaaatatgtaaaagcggcggacaagttttccgcactcataaaatgtattgaagaaataaaaatgggcaacagcgagttttcaaaggcaaaagaggcaaccgaaaattcaattcacaacatgaatatgcccgaaaacgaggtgtttgaaaaagagttccttccgtccttctatttgtcacttgatgaacaggattgacagttaccgacaaaaaaatcaatattttcagtcagatttttcgctaaaactttacgaaaaggcagattttaattctaatttagcattaaaaagaaattctcatatggtataataaactatacttgtgtattgtgtgctttttacccgattggaggagtaatatgccaaattacgaaaaaagcagtcagaaaagcaattttattgacataagctcaaataagcaggtcaaaaaattatataataaaaaaggcagacttaaaagagttctctgccttgtgttttcgataattttcctgttgggcggcggcggaatgctctactactattcattccttgacactctcaacttcaaagagcttgatgacacaaacaacaacaacacggcagctaccaactcatcggttgcaccgcttgagggcgacgcaacaaacctttcgctttcagagggtgaacttctgcagaactccaaggagcttaatgttatgctctttggcgaagacaattcaaacggcgataaacacggcagaagtgatacaatgattatgatgaccattgataacaaccacaaaaagcttaaactgacatcattccagcgtgacacatatgtttatatccccggttacggatatgacaagctcaacgcatcttataactacggcggagcaaagctttcaattcagacaattgaggcaaacttcggcatcaaggttgaccgttatgcggttgttgactttgacagctttaagaagattatcgacaccctcggcggtgttgatatggaagttactcaggacgaaattgactacatcaactatcagatgtacaagaacaatcaggctgacacaagaacaactatcacagacgcaccgggtactgttcatctcaacggtcaggaggctctttggtatgctcgaaacagaggtcttaaaaagggcgaggacggcaacgaaatcggtcttgacggtgacgactgggacagaacctcaagacagagaaagcttcttgaaactttgttcacaagtatgaaaagtgcagacctcggtcagattgtttcaattgtaagctctgtcggtccccttgtaacaacaaacctcaagaaggacgaaatcacagcgcttgtttctcacgctctcacatatctttcctatgatgtagagcagtattatgttcctgaagaaggtctttggtactatgatgataaaaccgaaacatggaacggtgcaatcacatcaacaatcaaaatttcagaccttgaagaacagagaaagaagtttgcaagcttcgtttttgaagaattgttcacaggcggtacttcttcaaaagaaacaacctccgcatcaaattaaatattgaacaaaatgcagacagccaattataggctgtctgttttttacggcgagccgccgtaccctatttgtgaagacaggttaattaaatgaaaaattgaaaatgtaaaatggaaaattgcggtcgtgaagacagttcgtttaaatacaaaacatattatgcccgagcgtagaattgcagttttctgtacaaaccgagccgtagcggcggatattatccgcccgccttgatgatatcatatgcttaaacacatagattctgatattatgaaaattccgctgcaatataacaaccgcattgcacataaaacaaaaatgcatcagaaccttacttggaatctgatgcattttatttgtttgattattattctattttcgtataataaatactcaaaaatagctgataaaattctgcctcgctgacattgaattctgcgtactttgaacccattgtaacctgaccggggactgaaaccatatcaattccgttcataccgccaagcacagcctgctgagcaagatatgacacctttgacgggttaagatttgtacatgaatacggagcggacgcattgaacaaatcaatcggcgtggttaaatcctcctttgtctgctgaagaaccgtattcataaaagactgaatgtaaaccttctgtctttgcatacgcatattgtttgaatcggtcttgcttgtatcacgggttctgacaaagctttcagcctgctgtccgacaaggtgatagctttctccctcaacaaactccccgattgtttcgggtgacacaacatcaacaccgccaacgctgtcgttgagagcggaaatgccgtcaaggtcaagcgaaaagtatgtattaatcggaatgttatagaacagcctctgaactgaatttaccgtattttcacagcttgattccttaccgtcaccgtatgaatacgaaagacaaatctgctgtttttccgtgccggcatacgcaccgcctgctgaatacattgtgacatcaaccatcgaatctctcgaaatgttgaagagcgttattttaccgtttgaagtgtcgattgacacaagcataagcacatccgcctgaccgccgctcgccctgactttgctgttattattttcgtcaaggttgcgcttgtcaacaccgatacacagaacattcgtcaccttttcgttgaactgatatgtttcaccgttgtatacgacatacttaccgttttcctcggtttcaatgccctgtggggcggtaacatgaatatcagtattaaacagctcgtttccaccctgataaatcaaatacgcaaccgtgcctacggtgagtataattaaaccaagtaatgtgcaggcgattgacaaaagcacctttttccaggttttcatctttcgatgctttgaatggtgatgatgcgactttgatctatgctttttatagtgatttgtggtattactattcacgacaatgctgtcggaatcaactccatacacatctgtatatacttttttctttttctttattaacttgctgtccttgaaaatataaccttctatatccagccttgaaagattgcttacatgctccttactgttcttttctctttttgattcaagaatttccggtgtattcggatcaagcttgttttctatattttcagttgttgcctcagccgaactttcattttgtcggttcatctttcttcagcactccctgcacaagatatcttccgtcaccgctgtctaagcatgtgcttaaaacaagaattttatcatcggtagtaagctccgtatttctcttgttcacagaaacagaatgtgggtttttaatcatattgagataatccgaaaatacattatcatcggaaaaatcaaacgaattcataatgtgtcggttatcatattcaaaagctgacacaatttcgtatgtaagctttctgtcgggagtgtaaacatagatgtacctgttcttgttaaagaaatcggcatcataaaagcgatggagcgttgcaaacattgagccgtttgccatattatgaccgtaaagcacagtcactctgtcggaataatcacgcttgttgcacatctgcgaatagatactgcccgaaaagctgtaattcttataaatatcgtggtcaagatataagttatcgtcaagatgactttgcaaaacaggataatttacatttgtattcggaatgtaaatccacgaataaatgtcgctgttctgctgttgaagcgacttgaagtcaatcggattttcgacctttttcacattgattgacggtgaagtcacttctgttgcagaggttgtaccgttttcaatgcctgacgcatacgagcctgcgatgctatcaagactttttcgttcgttattttcatttaagtttttaacgactatgtacgcaagtgtgccgataattgcagcaacaagcaaaataatcaaagctataagaaatttgtttctttttctgctcatatcaaaaactcccaattggttatattgtatcatttttgtgtcagtgtgtcaattaatcattacttgttagtaaaattttattacaatttacaaacttctgcatctgcaatacaaaacctaatattcaaacatctaatgaataaaaaagagacttccttatgagaagtctcttgatttttagttaaggttggattatttgctctttacaagcttaaatacagccacaccgcaagccgcaagagaaagaactaaaattgcatacggtacaacatcgcttgcgcctgtctttggtgaagttgttgaatcatctttctttgccgtagctgtagcaacaggacctgttgtgccgccgctgcttgccttacggtaataaggagtacaaacaaggtcacctgaaataataatattcatattagcatctgtatacttgctgtcggttctgaaaggaccgcccgaaatttcccagtggtcaaaagtataaccgtcatatggaagcggctcaatgtaaacatgctgttcgccgttttcgtcaatacctgttgtgaacttataatcaccgttaccgccctctgtcggaataacttcaaccttatatttgaatgtattcggctgaggacttacggcagcaaatgcgggaactgccgacaataacat

SEQ ID NO: 1031 - DNA, 17276 bp, unidentified
  source 1..17276: mol_type = unassigned DNA
tcaatcttctacttcaacaccccactgttgttttgcaagacgtttatagttattatatctccattttgcattatcctgagcagcttggaataattcggctgcttcgttcggatattgtttcattacagaagcgtaacgaacttctcctttcaggaagtcttggaatttatcccattgcggttctttgctgtctaatgtgaacggatttttaccttctgcctcgagcataggattataacgccacaaatgccagtatccgcattcaacagccgcagcttcttcggcctgagctttacccatacctttcttcaagccgtggttgatacacggagcataagcgataataatagaaggtccgtcgtaagcttcagcttcgcgaatagctttcagagtctgagcctgatcagcgcccatagcgatttgtgcgcaatatacataaccgtaagtagaagcgatcagaccgagatctttcttacgtacacgtttaccggcagcggcaaatttagcaatagctcccaccggagtcgctttagaagcctgacctcccgtattcgaataaacttcggtatccaatacgaggatatttacattcttaccggatgcaagaacatggtcgagaccaccgaaaccgatatcataagaagcaccgtcaccaccgataatccattgggatttcttgataaggtatttgctcaacgaagctatctctttacaaatctcacacttatcggctgctgcttttaccatcggtgtgattttagcttccagttcgatagaacgttcggtattttccttatcggcgatccattcggtaaacaaagtcttcatttcttcgggacaaccgccttcgatagcctgattcatcaacttaacgatacgttcacgcattttgtcaacggcaagatacataccgaaaccgaattcacagaaatcctcgaacaaagagttcgcccatgccggaccgtgacctttttcgttcgttgtataaggagtcgaaggaatagaacctgaatagatcgaagaacatcctgttgcattagcaaccatttcacgatctccgaacaattgagaaatcaatttcacatacggagtttcaccgcaacctgaacatgcaccggagaactcgaagagaggagtagcgaactgcgaattcttcacattagctttgatatctacaagatgctgtttgctcttcacgttattaacgcaatattcccagttggcagcttgaggcaattgagattctaaatcggtcatagccaaagctttaccattcttattacccggacatacgtcaacacagttaccgcaacccaaacagtcgagaacatctacctgcatacggaatgtcatgccgtcgaaagcttttcccaccgctttaagcatcgggaaattcgcacctgattgttctgccgcatcaagaacgaacgggcggatagaagcgtgaggacaaacataagcacatttgttgcactgtatacagttttcagctgtccataccggaacaaaagctgcgacaccgcgtttctcgtatttagctgtcccctgatgccaagtaccgtcttcaagacctttaaatgctgatacaggaagcagatctccatcttgtgcattgataggacgaacaacttcgttgatgaacgccggatcattgttcggaatcacttcatcatccggcagattcgcccatgcaggatctacagtaagttgtttatattcaccgccacggtcaacggcagcataatttttgtttacgacatcttcaccttttttaccgtaagattttacgatgaactttttcatctgctcgatagccaaatcgacaggaattacaccggtaatacggaagaacgcagattgcagaatcgtattggtacgattacccaaaccgatttcctgagctatctgagtcgcattgatataataaacgcttatgtttttctgtgcgaaataacgtttcactttattcggcaaatgctttgccaattcttcctcgttccaaatcgtattcaacaagaaagttccgttctcacgaagaccgcgagtcacatcatacatgcgcaaataggcctgcacatgacaagcgacaaagttcggagtatttaccaaataggtagaacgaatgggagtatctccgaaacgaagatgagaacaagtgaaacctcccgacttcttagagtcataagagaagtatgcctgacaatgcttatcggtattgtcaccgataatttttacggagtttttgttagcaccgactgttccgtctgcacccaatccgtaaaacttagcttcgaacataccttcgccgcccatagcgatttcttctttttgaggtaaagatgtaaaggttacatcatcaacgataccgatagtaaagttatttttcggcatcggcaaagcaagattctcaaatacggccagtatctgagacggagtagtatctttagaacccaaaccatagcgtccgcctacgatttcaggagcattttcttgtccgtagaacacatctttaacatccagatataaaggttctccggtagcgcccggttcttttgtacgatccagaacggcaatacgttttgctgttttaggaacagctgccaagaaatgttttgcagagaacggacgatacaagtgtaccgaaaccaagcccactttttcgcctttggctgtcaaataatcgatagcttcacgggcagcttccgttacagatcccatagcaataatcacacggtcggcatcttctgctccgtaataatcgaacagaccgtatttacgcccggtaattttcgaaatttcattcatgtactcttcaacgatagccggaacagcttcgtaatagttattacatgattctctgtgttggaagaaagtatccggattttccgccataccgcaagccaccggattttcggggttcaaagcacgattacggaattcttgaagagcttcctgatcgattagcggagctaaatcttcattttccaacatttctattttctgtatctcatgagaagtacggaatccgtcgaagaaattaacgaaaggtacacgagctttgattgtcgacaaatgagcgactccggcaagatccataacctcttgaacagatccttctgccagcatagcgaatccggtctgacgggtcgacattacatcttggtgatctccgaagatacaaagcgcatgagatgctaatgtacgagcagaaacatgaaatacacaaggaaggaattcccctgcaattttgtacatattcgggatcatcaacaacaatccctgagatgcagtataggtcgttgtcaaagctccggcctgcaaagaaccgtgtacagcaccggcagcaccggcctccgattgcatttcttgaactaatacggtttcgccgaagatattttttcttccggcagcagcccattcatccacgtattccgccatggttgaagagggtgtgataggataaatagcagctacttcactgaacatataagagatatgcgcagcagcttgattaccatcacaggtcaacattttcttttgtttggtcatattctaaatatatatttgagaatttaaaaatgcaattacaatattactgaaattaatataaaaatccgaacaaccacaatggaattttattctccctgccgatttcggtacgatctatcgtataataaatatcgggatttattcttcctcgtatattttcgctctctattttaaaattatatttctgattaacgaggaaatgcgtattcttttctcctttattcaatcggttatccttatgcaaggtattataaaagaatgtttcccgaaccgcctgttcctctacttgtgccggacgaatcgggtacatcagattcgtattgtgcatatataccattgccggtttcttgggaaattcctcatctacaggatatagcatattgataagccgggcatctttcagatatttgatatagttcacgactgtagccctcgatgtctgtatctccttgctcaactgactcacattcggagcagaaggagcattgaccgctaacagatacaaaagcttacgcactttcggcaaataagtaagttctatctgtttgatgaaaaggatatctacctccatcatcatattcatcgttttaatcaaattttccgaaaaattgcgcttttccagaaaaaaaggataaaaaccatgatgcagataatcttgaaaataagccaaaggtttcaccttattacatatttccgaggcaataaccgtatgattgcatagcaactcatccaattttaccgaagggaaatctgtccctgccatcagatttaaatattctctaaaagagaatcccctcagattataagaatccacgacacccgaaagcaaaggattttcttcttttaatcgcatcacagaagaaccggaaaaaacgatcttcaactccggaaaatgatcataacaatacctcaattcctctgaccaaccgggatacttgaatacctgatcgatcaacaatgtcttgccaccttttaccctgaattcgtcggcaaaatcgaccaatgtccgttccgtaaaataaaggtgattcagattgatataaaggcatgaacgatcgataccgaaattttccttagcatattggagcaaaaacgtagtttttcctaccccccgactacctttaataccgataagccggtgactccagtcaatctcttgcatcaattctctctttaccggagaatttacatgctctaccagatatttatgtgttctaaagaatgcttccacgctattgttctgtaagacgggacaaagataatgaaaaattgattttttgcaaagtagagattacaatttgtactattttttctgaaagtttttctcctctcctcccaaaagaaaaagagaagaaaatattacattttgtttgttttggtctatttttaatttcaaatgttcttttattcatcttattgagtttcaatgttttatttgccggttcgaatattaaaaaaatttgtgatttcaaacgaatcttcttcttcacggtaaaaacagaattgttttttcgaaactcctataacgacagatatttatctctactcacataatagtagagtctattcaaaatcacctgtttacgaatattttattcagttaaaaaatgtattcaaaacctcgctccgtatttattggtctatctttgtgtcaaatttaattatattaattatgaataagtttactcgaaaaatgatgcttgcaatcgcgtgtataattgcaggttgtataaatgttcaagcgcaataccaattgccgaatcccggatttgagggaacatggaaagaaacgacttggggaagctttctcggcaaatcgacagaaaacgttcctcaatattggcattctttcggaactgctgacggatcattacaaagttttacaaaagcctctgtttctcaaagtaccgacacccgtacaggatcaggtagttgcgcaaaaatctccgcaacaagtcctttaggcgtagtaggaaacggaacacttactaccggaagaatgaatgccggaagtgctactccggatgatgaaaccggaaactacaattttaccgaccctaatgatgaggaatatcaacaaaaattcaccggtcgccccgatgctatctcattttgggtaaagtcgaaaatggcaagctcgaccgaagaagcccggatggcagcaatattgcatgacaattttcgctatcaagatccgacaaaagacgagactattctcagccacaaaatcggatctgcagaattgaactatacaacgaccaatgaacaatgggtacaaaagactgttaattttgaatatactcaagatgctacaccctcattcttattactaactttcactacaaataaaactccgggtggaggaagtaaagaagatgttgtatatatcgatgacatcgaatttatctataactcaaaattggaatcattgaaaatcggaggtgtaacggttgacggatttgataaagatacctataattatacgataacaggtgacggagtcgttcctaccgaagaccaaatagaagccgtatcggacggtaaaggggcatcgatagaaactacaattaacgaaaatgtcgttacaatcgttgtaaagggaaacgattacagcgaaaacaatgataatactcatacgtatacgctgacttatcaagatactcgctctcaattatcttcgttaagtattaacggcatagcattagaaggattctccaaagacaaatatgattacaccgtcagcggagaagttcctacaaaagaacaaattattgcagaagctgacggaaaaggcgctactgtagatatagaaatcaacaaaaaagtagttacgattaccgtatcgggcagcaatatcgcaaccgatcccgaaaataaacatgtatatacgctcactttcgattatgaacagggaatcgaaaataacggaacaacggaaaatatgaaagtatatagtacaaacggaaatgtatttgttcaaggctatacaggtattgtcgagatttatcttttaaatggaggtaaagtcgctcaaaaagaggtatccggaaacagtatgttccggttagaaccgaacacttatattatccgcaccggaactaaagcgacaatggtaatagtaaaataaattttgtgtatatttataatagaaaaggcgtcaaatgacgccttttctattataaatatacttctcaacttttatagctatcaagaatctaatatctccttcttaaaagggaaaacttcaatacgacagaatctgctatcgagaacctgtttaaattttccaataaaaaatactacaaaaacattcgctctgattttttgggcttctttttgatctgtctctctataccaacacatcatacagttcgctatatttattatcgaaactgaaaaacacttttaaagaagctattcaaataaattgttaaaaaataattttgcaatgtatatattacaattatatactatttttgcaaagtcaagattgcaatatttatttaaatggaaacaaaagatctcaaattcggagaattagacgaaggttttaccataaaagaagccatagaagaagctaaacgatgccttaattgcaaaaaccccttatgtattaaaggttgtcctatcgaaaacaacataccgggatttattcatcagttatctatgggaaacatcggtgcagcgatgcacatcatcaatgaaaaaagtaatcttccggcaatatgcgggcgagtatgtccacacgaaaaacaatgtgtcggccattgtgttttgaatgccaaaaagcgtccgatacaagtaggaaagttagagcggtttgcggcagacttcgacggaaatatgggtttaatacgagacaaaataccccaaaaaacgagaggaaaagttgccgttatcggatcaggaccggccggtctgaccgtagcaggagatttggcaagagaaggattcaatgtcatgatttttgaaggagaacaagaagcgggaggagtactaatgtacggaatcccggaatatcggttacctaaagatgttgtgcgtaaggaagtaaaaaaaatcgaggctttaggagtaacgtttattacgcaatgtatggtaggacaaacaattacggtagatgacatgtttgaacaaggctttgatgccgtgtttatcggttcgggaacagcactacccaaatctctcgatacgccgggatctacattaaggggagtcacacagtcttcatattttctccgcatggcgagtttatgcaacaccggaagtataggaagggaagaagttcccgtaaaacaaggtgatatagtcggtgtcatcggagggggaaacgtagctatggatgctgcccgaacagcgttgcgtatgggtgccggaaaagtatatgtattgttcagaagaacaatagaccagatgagtgcattgcaaacagaatataacgaggctgtcgaagagggtgtcgaatttttatgggaaacgacagttaccgaatttatcggttctaacggtaaattggaaaagatcaagattaaaacaccggagagtgaaaagtttatgccgatagaccgtatcttattagcaataggatctcgtccggcaaataggatcgtttccacgacttccggtatagaggtcgacgacacaggatacgttattactaaagaacgtccttatggaatgaccacccgaaaaggagtatttgcaggcggtgatgtcgtacatactccacaaactgtcgttctggcaatgaaagaagcgaaacaggttgccaaaggtatcgctcaatttgtagatgctaaaaaacttttagaagaataattatttataatagtcaaaaatacggtcatattacattcattcataactaagagcccatttaaattttccaacaaaaaatatcatcaggtcatctctgtgctttttttccgttttttttatccgatagcccgctatcatccttataaaaacagaaaacagcctcaaaagaaaaccttaaaccgactaaacaagatttaaataggctcttaattataatacattagtaataaaacgattataatattaatatatgtaacgatcataaaattgtatgtgttgcataaattttacaattcttatatctttgtaaacaaagttcagagcttgttcaaattttgtacggacgtttttttgaaaaattgttttcgagggaatttttgtttcgataaggaatataacgcactacataacgtacagaaacaggaaaagcaaatcaaaaaaaagaccccaaaagtacggatatgcatccttatcgggaaatttaaaccggctcttattttattaaagatataaacgatgaaccatttttccgagaatttagcgcattttgtacatggcgcggcatttatgttttttatacttgcaagtattcagctatatcctttaagatatcgtagcaatatgatgagattacttttttatagcatgatctttcttgcttttcttgaattcaaggatatgggatttttgataaagggcgtatggtacaacccatatattacaagcataacaatgagtaccgacatgttatatgttccgttaatggctcttttcttctttgaagttatctctcccggatgggttacattacgcaggatcataggaatgtctatgccgtcggtactttttataatcgcatatatcatatacccatcggctgttatttttaaaaccgcgatgctatatgccctcgttttcggaacagttattaccgttatcgttttcatggcaagctctcgtcgcgataattacataaaaaacaatttctcggatatcgaaaacctgagtatttcatgggtacgcaaagcaataacggcattatatatatgccttgttctttggactattctcctttgggaagaaaattggctgagcgatgctgcttattatgcaatatctattatcgtttggacttatatttatcgattatctcaaaaacattcggttattgagatgccgaacacatccggattatttatgccgaaaacggaaaagaatgaatatcatgagatacctaattttcccttttgcaaaagattgagagaatatatggaaaatgaacgaatgttcctgaatcctaaactgactctcaccgaagtggctacagcaataggaacaaaccgtacctatttgtcggaatacttaaacaatgatctcggcacgactttctatgaatatgtaaacggattcagaataaaagaagcctgctccctactctcatcgaatgaacgcaaaactttagcggaaatagccgaattaagcggtttcaattctctatctacattcaaccgcgcttttattaaaagtatcggagaaactccagcccgatatctgaaaaaataccaaacgaaataacattttattctgtttttacaaaatgacttctttttttgttttaatgacacgataatttatttattgaatattctttttactgattgattttctgtacacttagagctattcccatatttgtcagactttaaagcctgtctaaattttccgataaaaatatttattcagacctttttattttttcgttctgttttcctgttcccgcatgtcccatagtctgcgccatgctctttatcggaacagaaaaacaccctcgaaaataaccgtaaaaaatgtatgtacaaatattgcgaccggcactcaaatccgaaatactgtttataaattcattaataataacccatacctaaattatcgcatgaagaagtatagttacctactgcttatctttctatccatttattttaccggatgtgaaaaagacgaaacaatagaagagctcgaagaagcgacattgtccgtttctcccgaaagtctgaatttcgacgaaaacaatccgtcaaataatcaaattacgattatttccaatgtttcatggaatataaatgtcagtaacaatgccttgaaaataaataaaaccgaaggcgatcccggagaaagcaaagtcacagtaacagatattcccgccggagagacttacatgcttacgatctccaccgtaaaaagaaacgagacggataaaacaatctcgaaaagcgttgccgtaactcgaaaactacaagatttcaccagcgaaaccgtttattatgacaatctcgacaaagcaacttggagcggaagcggaaacccctttatcgatcaatgggacggttatataaatgcaacgggaacgggtgccggaaatatcgaatacaccggacgaacagtctctgttcgaaacaattttcaatcttcaggatatacaggagcatctcgtaaaaacgcattctatttcggaggaaaggatgcttatgttacggtcaataatatagagcttcaacccggacaaacaaccttccaactttcgttcggttgttgcaaattcgaaggagatttcgatacatcttccaatatcaaagtatatatcagcggtgacggaagttcgatgaaacctctcacctacaatcgatctgcaacaaactcgtgggctctggcaacggctttgttcagcatacagcatacagttcccaaaacattatccattatgtttgtagccgatgagaacaatattaggatggatgatatcaagctggtgacaagtaatcagccgacagaacaaatattcgatttttccgggatcaattacctgtgtgcagaaacacctaaaaccattaaggcaaatgacaattataaatacgttacacatttcgcagaaacattgacaagccaaaagcatgtgcgcaactatacggcatgttacgacacatatcgacacaatcccatgtgggtcgcttatcctgtacaccaatgttatcatgaaaaagggttcggacgtacaaatccagatccttggcgtcccgacccgaaattctcggcaagtgagcaatctattatctatccgagcgactggagtaactggccttggacagcaaatggcaatgaaccgactgattcgtattattattggacaccttataataacaggaattttaccaaaggacacctgttgcgctcggccgaccggggaggagctgaaagtgaaatgaacatacaaactttttatcctaccaatattgcccccgaagcgtatctttacgaagagcattggagcaaagtcgaagaattgttatccgatacatgggaatgttccgatacgacatacgttgtcacaggatgctattatgcggacaatagttacaaaacatacgatgcgagtaattgggacaatcaatcggctttatccaaagagtgcataattcctacagctcgatataaagtaatacttcgtactaaaagcgggagttcaggcaagtcgattgccgaatgttcatcggaagaagtaatggctatcggtttctggtttccgcaaaatcttaataacgaaaacccgaacacgactcctccattgagtaactatatatactcagtatccgaaatagaacaaatgatcggcggtgaattcgaatttttcccgacagtacctaccgaagttaaaaatcgagtgaatatcaatgactggccgggactaaattaaaggctaaatcgaattttctaacaaagaaaatattatcagtttttttacgttttcttccgagctgtttcattgtttctattcgtcaatagctcgcgaaacataactgagcaaaattgagacgacaagctccaaaactctatcaatgaaaaggcctgcccgacgaatccgaaatgtcgggcaggccttctttatatatcggtcaacaaaaaccctaaaagcctgtctaaattttccaacaaaaaaatattatctcccccaaaaagcatatccattgtccggataataacatcttctcgatactgtatcgaattttataaaaaacatatatcccttattatcaaattttctctatttgaaaaagacaagaacagacaatcgttcagcatgaagcagtagtttctaaaagaaaaataaaacctgcacttcaataaaatgcaaaaagtgacatataaaaaaatggttgtctcccgacaaccaatcttcgttaaccttaaatctaatactatgaaaaacactgtgcaaatataaagaaaatatgttatacaacatattaattgctaaacaaaatattttgtattaactttatttaaactttaaatcattcactacgagtccgtttagattctgtctaaattttgctcgggtcagttttgagagtttctttcgaggatatttttctgttttcaggaagaggatagcgggctatttgacgagggaaaacgggaaaacagaccggaagaaaacacaaaaatgacctgataatatttttttgttggaaaatttagacaggctcttagactttcaaattctatgtaacaaaatttagagcctgttttaaattctcaaataaaaaatttaagcaggctctaaatcgaaacaaataaccatttatacataataaaaatatagcaaaagatgatttttaaccgatatttttcacgattcagcgataacaattcggattttatcgatttttttttgcacaacaatttttctattttatttttgtaacgatcaaaaaagcatatactacctgtacagaatgattttttgattaaactattctatatattttggttactcgacagccattccgtgaggaaaggctgttgtttttatatttcaaagcaacaccgcaacaccaaaaaatcaaagacaacctatcaatcttaatatttcagcaggagaatccacaatatgacaagctccgttttctatcaattcttcacgagagcgaaacccccatgtcacacctacggaaataactgtcgccgctgcagccgtttgcatatctacccccgaatcttcgacatataacgtctctctttccgatacaccgtttactcgaagtatctccttcacgatggtcggatctggttttaccggaattccctcacgctgaccgaatatagcagaaaaaacgatgtctttaaaataatgatgtaccagcttttctgttccttcctgatacttattagaagcaacagccaaagccattccttcatgatccaattctctcaacaattcggggatacccggataaggaactgtcaaacacgtattattttgagtataatgttctaaaaagaaagctctcatccgtcctatattttccgatgtacgttcgccttccggaagtgctcgttcaaaaagtttatttatcccgtttccgacaaaataattataagcatccgtttcgtgttcaggaaaaccacattgccttaatgcataattggtactccccgccaaatcacgaatcgtattcagcaaagtaccgtccagatcaaatattaccagctttatcatcttcttctgttttttatggaacgaaagtaaaaaaaatagatttactatacaaaccgcttctttttatgttttacagcatagtcaattcatatatctatacaaataaaacattaataatcaacatattaatattataaagccattaatgtgtacgcacacacaataaaaaatattataaatacccgatatttttcgctacatttgcaaatcacaaatgtgtacgcacacacaacataaaattgctcatgaccgataaaacaaaaaatgttcgcatttcagatattgcccgtatggcaggagtatcagtcggaacagtcgacaggattctgcacaacagaggaaaagtatctaaagcggctcaggaaaaagtaaaccaagtactacgagaggtcgaatatcgtcctaatctcatggctcggtcgctggctttgaaaaaacaattcaatatcgccgctttgattccggcttttcgatcgggagagtattgggaaaaagctgcagaaggaatagacaaagctgcaggtgaactgaacgattataatgtcgtcgtcgaaaaaatattttttgaccaatatgaccaatcttcatttgaacaagcttgtaaaacggttctttcaaatgaatttaacggagtgttgatcggaacattgttttcggattcggtaaccgaactttcggcttgtctcgatgagaaacagatcccatacgtgtatatcgattccaatattccagaaaacaatcaactggcatatttcggaactaattcttatgacggaggctatattgccgcaaaactgcttaccggaaaaatagcacaaggaagcgatattcttatcgggaaaatagtccgagaacgaaacaacagttccactcaggtaaaaaatagagaaaaaggttttatggaatatctccataaaacaggatttaccggtcatgttttcttttgcgaactgcatatcgaagaacctgaatataacgaaaaagtcttagataaaatattcaaagctaatcccggcataaaaggagctgtcgtatttaattcggtatgttgtgtattggccgattacttagagaagaagagcaaaaaggagataaagctggtgggatatgaccttattgaaagaaatatacggcatctttcggaagggacaattacatggcttatcgcccaacgtcctgagatacaaggctacaacgggataaaagcgttaggtaactttttgacatacggaaaaaaaattcctcgaatcaactttatgccgatagatattctcattaaagaaaatatcggttactatcaaaataataatctttaaaaatttaatattacaattatggcaaatctattcagtgttaaagacaaagtagtggtaatgaccggagctgccggtattctcggccgtacgatatcttcatatcttgccggagaaggagcaaaaatggttatcctcgaccgtaatgaagaagcgggaaacgaactggtgaataacattaaatctgcaggaaacgaagctatatttctatataccgatgtactgaacaaagatgttctattgcaaaataagaaagacattatcgccaaatacggtcgtatagacgtattgcttaacgcagcaggaggtaacatggcgggcgctacgattcctcccgaaaagacgattttcgatcttgatgtagaagcttttagaaaagtcgtcgatctaaatcttttcggtacggtattgcctacaatggtatttgcagaagagatggcgaaacagaaagaaggggctatcgtaaatttcagctccgagtcggctctacgtccactaactcgtgtcgtaggttatggcgcagcaaaagccgcaatctcgaactttaccaaatatatggccggtgagctggctctaaaattcggaccgggattacgtgttaatgccattgctccgggatttttcctgactgaacaaaatcgcactttattaactaatcccgacgggtcgctgacagaccgttcccgtgttattcttgcccatacaccgttcggacgcttcggcgaacctgaggaacttgtcggaactatccaatacctgatcagcgacgcttcaaaattcgtaagcggaacggtggctattgttgacggaggattcgacgctttttcgatttaagtacccatttaaattttctgataaaaattacaaatatgattttatgtgaacagacatggcgctggtatggtccgaatgaccctgtcagcctgcaagatataaaacaagccggagctaccggaatcgtaaatgctctgcaccagattcccaacggagaggtatggacagtggaagagatcatgaaacgcaaaaaaatgatcgaagatgctggacttaaatggtcggtcgtagaaagtgttccggtacatgaacacatcaaaactcaaaccggagattttcagaaatatatcgataattataaagaaagcttgcggaatcttgccaaatgcggcatatatatcgtaacttacaatttcatgccggtactcgattggactcgtaccgaccttgcctatacaatgcccgacggttcgaaagccctgcggttcgaacgtgcagctttccttgccttcgacctttttattttgaaaaggccgggtgctgaaaaagagtattccgatgaggaaaaagccaaggcaaaagcccgttatgagcaaatgagtgaagccgacaaacaattgctggtacgcaacatgatcgccggacttccgggatcggaagagagttttaccgtagaacaatttcaggaagctctcgaccgatataaagatatcgatgcagaaaaactacgtgccaatctgatctatttcttaaaagaaattactcctgtagccgatgaggtcagtgtaaaattagtcattcatccggatgatcccccctatccgattctggggttaccgagaatcctaagtactgaagaagattttaaaaagctgattgaagccgttccgaatgaatcgaatggactttgcttgtgtaccggctcattcggtgtacggggagataacgaccttgccggaatgatggaacgtttcggagatcgtatcaatttcgtccatttgagaagtacacaacgagatgaagaagggaatttttatgaagcgaatcacctcgaaggaaatgtagatatgtataatgttatgaaaaacttcttgctgttgcaacaacgtagaggcgtttccatacctatgcgtcccgaccacggacaccagatgatcgatgatctccataaaaaaaccaatcccggatattcttgcctgggtcgtatgcgcggtttagcagaattacggggattggaaatcggtatcgcaaaatctttgtttaaataa

SEQ ID NO: 1032 - DNA, 39933 bp, unidentified
  source 1..39933: mol_type = unassigned DNA
aaatcgtttaatttttcgtgaattaaatgttaatcctcttttttatcaatatatcggttgagtgtctcaactaccgtgttcagattatatggtttcgcaatataatcatcgagcttgttctctaagattcgttccttatcaccaaacatggctctcgctgtaactgcaatgatcggaaggcgcttcttatgctccttctgctcaatctcacgaatctgctgtgttgctgcgataccatccataaccggcatctgtacatcgaacagcgctgcatcgtattccttctgcttgaacagctcaattgctttctcaccattctctgcaatatcataagagaatcctgccataccgagcagcttaccgataacctgctggttgaccggctcatcctctgcaacaaggatacgcgccttgctgtgtgcattgatcgagaatactgcggcatcttctttttcttccatgttcttggctgcttccacctcggctgcctttacaaccttcagaggaatctctgcaatgaacgtcgaaccgatgccttccttactctgcacactgatgttaccacccatcagctctgcaatctgcttggagataaccagaccaagtccggaaccgccatactttcttgtatcggaaccatcgacctgtgagaaccggataaacagcttatccatgttcttctccgagataccgataccagtatcagcaaccgcgatacgcaggttgatattctctttttctgcatcaattgcggcaatctttactcttacacttccctcagatgtgaattttaatgcattggaaagcaaacaattcaaaatctgctggattctctgtccatcgccctttacaagctttggaatattgttaccaaatgtgcagtcaagggcaagtcccttgtttgtcgctgtcggtacctgtgcagctaccgtctcctcaatggctgcacgcacatcgaagatctcttccttcagattatatttaccagcttccagcttactgatatcaagaatatcgttgatcaggcgaagcaggttatctgcacagccctttgcagtgagcaggttatcgcggtaatctgcctgcagatcatctgccatcagcgtaagctgcagcataccaaggattccgttgatcggagtacgaatctcgtggctcatgttcgcgaggaactctgcctgtgtcttatatgctgcattcgcatcttcgattgctgcagacagcttgttctccgtctccttctggtctgtaatatcaataacaaccatgttgatatagtcagcctcagacttgtacataactgtgttaaataccttgccaagcttctccatcgtgatctccacgtccatgaagtcgccctctttggttccagaggtattatacgcagtaaaccatgcgttaatatcctgtaacacttcgatcttactctcaccaagaatcttgtcctgataatcagatgcatccagattgaagtaacttccgaaccgctcatttgcttcctgaatgcagtacccaatgctgttcccaagtgaatctgtgatgatctttgcctgtgcaaatccgatcggaagattcatgaacagcttcttgtatttgtcaccctttgtgtggcctgccacaacgccgccaccaagcgcaaatacaatcactcccgtgacagccgcagccagcacgccaacgatgattcccgccggaaccgccttaaagatcgcaccaaatataattccgagcacgatatccagcgccgctgcaatgatgattagtttctgccaccctaattttgctagtttttccatgtgcataacaccccctatttatcaacattttactatacattttcgagattttcaatatctgtctcgacctcttctgcaagtttttcgcctggtttttcattctcttcgcgtgcgttcgccttctcgattctccgcacctccaatttcttctccacctgcagggaaaccaacagtaacaccatgcagatcacggaaatcgcaatgcccaaaagcataccctgcggcatataggaaaattcaaccgtatgcgaaccggcaccgatatccacaccgataaatgcgcctgccaccttgtagtaatccaccttttttccatcgacctttaccgtccagccttcatcataaggaatgcttgtgaacagtgtcttatcctccggcatctcgatcgtgccatagacatagccatcctttaccgtttcaacctccagcatatggttcgtcaattcccgatatacattttcaaacacatcctgatggaaggttgccacataaaatggtgccacttcggagccactgacattgctgtattcgtattcaatggaaatgtaatcgcccgcttccagctgtcccagatggaaaatctggatctgataacggtcataagcgatttcctgtccgttcttataaaaccggatcttcgtcacataattaccacggcagttcacgtaataatcgcctgcatgatccgcagtaaagctcaacataaaacacatcggtccagatgcatttgctgtgaagctgacctgattattctcatagctgactttcgccgtatcactcgtcacactgatcgccggatactcgtcctggaagaatccgccatagccagtcatgtcatatgccagtgtattctgcgcgatcattgcagagtaacggctctgatcccagtccttgacattgttgctcaccgcaaatccaatagaggtcgggtatggattctcatagatggatacattatccaccgtttctttataattataatcaaaattattcagatctcccggtcgttccagcagataccggatattaaagattgcatttgtaaatggcgtatagccacgatacaaaaattcatttgcgcctgtataaaatccaagcttgcccatcgtggtgacaaccggtcccataaccgttgaattgaatgtgctgacgctcggcatgttatgccagcttgcctcatccagtaccgtgtaattcatcagttccgaacgataaaagcctgcctgttcttcctctgccatctcccgcacgcgcacattcgcttctgtcactgccggactcgtcttgtaatatttcttgtaatgacaatacccattttccgaaaatccatatgctgcatttgccacaagctcgaccagacagacacttccaatcaccgaaatgtaagtcgcatgcgtgatcttcttcgacgtccgcagacaacaggtcacgccgtagatcaccagcagcacaagactcgccggcaatgtatatttgccaattgtcgcgcctgcctgctgtttacaggcaaatgcaaacgcacctgccagtaaaattgacgaaatcacaaaataaatatcgatttctgtaatcgactgcactgcatcatatgccataacgagcaacacaaaaataaacacaaatgaaaaccgattcgggattccatactggtcatgcatgccatgccagatatagtttaacgtcccatgattgaagctgatcacaagcagcaccaacagcacatatttgcggaacttcttccacggatgttccttcacaaacagatacaggaacatcgtcagaaccgccagcatgccacagtacagattcacaccgccatcaaagatctgattcgtaatcggctttgtaaatacaagcagctgccgcagcatcacaaagatatttccataccatgttccttttgggattgccatatctcccgctgccgtcgccatgattccatgatatgcaggaagcaggataaatgctgccataccaccggataacagggaatacactgcaaaccggaatccatttatgaagaatcgcttcactgtcttatgctcatagacaaagaaccacagcacaagaaacaggcaaatgatatatccaatataataattacaatagagcgcatagaacagggacagcacatacagctttggatctctctcctcaagcatccgctggaagcccagcatgataagcgggaagatcataatacaatccagccacatcgtgttccagttgtaaccgatcacataattactgaacgcataggcaaccgagatcgccacgatcaggaaattgcgtttcttctcgccatccttgtagcttaggaaatgtaccattgcaacggctgtgagtgcaatctttaagcacatcaggaagcaggtaaccgccgcaatctgttccttgccaaatagtaacaacagcagattaaacgggctcatcagataatacgccgcaagcgatacgaaattcgagccaagtgctacattccatgtataaagaagacttctctcatgcagaagcttgtctctgagttctgagaaaaacggcagatactgatgcacactgtctaccagcgtcagggaattctctccaaacggtgcaatcttttctgcgatacagacaaccagcatgacgactgcaacgattgcaaacgacagataatagcaccagttatcctgcatattctcgtgaaatggtttcttttccttgaacacaatcagcttgctgaacacatagttcaataccagtacaatgacctgtacaagcagcttggatgccagttcatggattcgaaatgtatcacacagaatcgccagtccaagaatttccacaaccatggacaccagacgggcgcctacaaactgcaccgactctaccagagttgcataaaatcccttcttcttactctgaaatacaaaaaatttatttgcaaagtatgcaaaagcaatagccatagcgatcgctatggcattgcatgtatttcttgaaattggtgtaataacgcgcagcaggaagaatgttaccaggttgacagctgtcgtacagcctcccgcaatcagatatcgcattttctcattggcaagaatcttctttataaaacgaatcaatgtactaccctaatccttttcttttaatttaaacctgtaagcagatagatcagtggagaattccagtaaatcgttacctcattacatgaatagcactgctcattatctacatatgcacgtcccggtgcgatgccatataatactgcatttgcatatggatcgtccaagttattattcgcaccacccaccagcattccaggcatagtctcctttaatacctgtgaaggtctgtggtgtgttgcattcggggtgagggatccatagccggtcacatagcagtatccggttgggttcacaccgaagatataatcacgcatcttctgcgcatattctgtatacttggcatcccctgtcaggtttgcagcagccagaagctccatacccttgttggtgatcgtcatattacttccccaaggatatgtcacacccatacctgtaaagaagccctctgactctgctttcgaaagtgtctcatccgcatctgcaagcagcttttccttcgctgtctttgccacatctgcatccacgccctcggtctttgcaagatcatacagcgcatagcttccgatatctgcccagccaaaacctgtcagatagttgctgtcaagtgctgtctttgtcgcagttaaatattttgcatcctttgttgcaatatacatctctgcagaagcccaaagtgtctcgtctgcaagatgtgtatcatcgtatgcacctgttacaaggtcttccggattctcatatcccttcatatccggatttgcctccaaaaatgcatacgcgttcgttgctgcatccagacagctctttgcaaaatctgcatcgtattctgcatagagtacagatgcctttgccataacagccgcgaaatcagccgttgctgcataggaaatcggcgcaagcaccatatcatccgtctcatcaaccgcaagtaccgtctccgggaatacaagtgcggttactttatggtagacgccaccgcttgctgcatcctgcatcttgagcatccagtcaagctcatactttgcttcatcgagaagatccggtgtcttgtttccgctctctggaattccaagatcatcggcagtctgaccataatcctcgtaagcaaggaagagatcctgtaccgtcttagcaccagacacaacatatcgtccgtaatcaccggcatcatgccatccaccagatacatcaatctttgttccagatgtatctccgtaaacagtcgcttcctgcatatgacatgcctcatgtgcgaaatctccagcgatgtcctttgtcacctctgttccgcagcgctgcttgtataacatcagtacaacatccttatacacatcatcatacagatcatccccgatggagaactcatatgacgcgccagatggactggaaataatcttgtatgtaccaggtgtcttaaactccgtgaaatcaccatgtcttacgtttgattccgcagacttgtcatacgaaagctctccgtatgcaccaacaaacattgtctcatctgtcttcgcatctacgatcttgaatttctcatcgtccttggatgtcacaatcaccgtctttgtatcatccggcttgtaaccaatctgatttacctttacctgaatcggctgtggtgcaccgacaatcttctccgcattggaaccgtctgttacaaacagggaaatattatcgaagtaaatcttgtgtgcctctgtaacctcagtctgtccttcctgagttcccatattgacaacaaatcttggagccggatcggaattttcttccatcgtaaactcctttgtaatcgtctgtgtctctggtccaactgtgatgaaatcactcgcataggcatggtagtctccaccattgatctgtacacgccactggatcacacgttcaatatcacttctgacatcaaaactcatcgtatagacacagccctttgccatcgtaaatccatcgtaataaatctggcagctatgctcaagcggtccactctttgtaatgtcacaaacgagttcgccattttctgcggacattgtaaagttaccattatttatgtaactcgtaaaaccatctgtaccatcatcaaatgtcacgccgatcgcatctgcgccttccaccgtcgtgaaacggtcatcctccacaacttcctgttccgtcgttgtccagtcgccatcatcctcgatggttgacgctgttgcatctgttacggttgcaccgccaccagatatctgttctgtcgtcgccttgtctgtctttccgccacatgcacataacgaaagtgcaagtgctgccgccgcaacaactgcggctgtcttcctgaattttctcataaaccctcctatcgtttttgtccctctttttatcgttttattgtagtcccacatgggtactacgaacaaaatttcacaacctcatcgtatggtaatgcaccgccgaatatatccagtgcacttcccaccgtcacatcaatgcgatcctgtccacattgcttcaagctctctaaatcatcaaagcttccaactccgcctgcataagtcatcggctgtttgccccatgtgccaagcatggttgcaagctccgtctcaatgcctgccgctttaccctcgacatccactgcatgaatcagatattcgctacagtattctgccagcttgtccagcgtctccggtgtaacaacttcgtctgtaaattcctgccagcggtcggtcacgatataatacctgccatcctttttccgacaggacaaatcgagcaccagatgctccgcaccgatcagactcgacagccgtttcagattctcgtaattgattcttccatccttaaatacataggatgtcacgattacctgccgcgcgcccatatccagaaactgctctgcattgtctgcgttgatgccgccaccgatctgcaggccctgtggatatgcagcaagtgcaagcttcgcctgttccagatctgcctcatagtatgtactgccagccggattcagcaggataatatgtccgccgaccagtccgcttcggcgatacagatcagcatagaaatctgccttcagctccgaaacgaagttatccttggcaaaatcagcctcatccttcaggctgccgccgacaatctgcttgactgcgccattatgtatgtcaatgcatggtcgaaaccgcataatacgctccttttacatcggcaaatttgaagcggagaaacatctcctccgcagtcatacatggaacaatcatgaatacccatagaatgtattgcaaccagaaagtactaagtgttctaatatactctttttctaacgtacgggatcgtcgccgattcgccgtccatggctcaacggcgacttgtttgaacatcgtgttcaaacatccctgatgacttaatagaacactaagttctttcaaggttgcaaacatatcctatgttgtattcatgattgctccatgataatttgcggatatacgctacccgaccacttcaaattgccgattgtcttccttttccttaatatttcttcagactacacttggttcttatcgtaccatatttccctaccttgttcaatatatttcgctttacgtgaaagtgtttttgcggtatcatttacccaaggtaaattgaacgaacacctgtaaaactttacaggggcaaggagaaaatatgttaaacgatttgaagaaagaaatcacggattgctacatgtacggtgagatcatctgccaacagggttttggtccaaaaaccgatatctccatgcatgacatgatccgttttgatctgttgcagtttctggtgtatctgacagacagctccgacggcagcctgtacccggagacacgctttttacacgaatatctcggacaatatttcacattggaatctctgatgcgcttcaagcaggatcgcacagcaacccccgaatttgtcacaacgattccacgttccctgacttattttgtggaagctgaccagtctgggctttctgcctgcacgacgaaaggtttttcaaagtcaagaaatctgtacaacctgtatgtcgaactcggtcaggcatacatttcctgcaacaaccggacaaccgacacagaagtctccgcgctgacggcttataccggtatgatcgaggaatacctgcgcaaactgaaactgtttgagcccggcgagaatccggcactgaagaatcccccgaaaccttccaccccgaacaaggcagcctccgatgccaacacccctgccaaaaatgcatcgacctcgcaggcggctatggctgctatgaaaggcactatcaacaagcaggaagttccagaggaagatatcaaattagatgatctgctaaatgaattaaacgaactgaccggactttctgaagtaaagaaagatattaaatcactgatcaacctgttgaaggtgaagaagctgcgggaagagcgcggcatgaagcagccggaaatgtcattgcacatggtattttccgggaatccgggaactggtaaaacaaccgttgcccgtctgctcgccaaaatctacaaatgtctcggtatcctgccgggtggtcagttggtcgaggttgaccgttccaacttagtcgaaggctatgtcggacagactgccatcaagacaaaggaagtcgtggaaagtgccttaggcggcgtactcttcatcgacgaagcttacacacttaccgcaggcaaagacggaaaggacttcgggcaggaagcggtagataccctgcttaaaatgatggaggataaccgcgataatttgatcgtgattgttgccggttatacggaactgatgcaggagtttgtagactccaatccgggactccgttcgagatttaacaaatacatcaatttcgaggactatagcggcgacgagctttatgatatcttcttatccatgtgcaaaaaacaggaatacgaaccaaacgcacagggaaaagcatatgtcaaagagttactgaatatctgggcaaaatcccacgatgaaaactttgcaaatgcaagagaagtacgaaactatctggagcgttccatcgccagacaggcaagccgtatcgtcgagcttgactctgtcagcgacaaacaattaaagacattaaccaagggggatttaacagagggataatacctgtgaccacaggatttcaaacaaatcccgctctgtacgttccatctgcgcatctacgatggcagcctcgcgcacctgtctgacagaatcaggcagatcgtgaagctgccattttgcatgagcagcatttacaatccgatatccatgctcgcatacacgcagacagaagtcaagtgcggaaagctctgtccggaatttatccgagaatccacccaactgtacaaacactgatcttttcacaagcatacaatgtgccggcacaatcacatattcgcggttcattccatagtaccgcatcgcaccggtctcatcctgccggatcttccgccattctttccatgcatcaaattgtggtaatccgcgatacggatagcggtataaattttttatttccttcagatcaatcgcacgttctgtttccgcctgccatttctgaaccggagactcatatgcccctgcgaattccaagcccgcgcaatacagccgatcccggtcatcatagaccgtcccggctacaattccgacgtcttcacgcatagcgatacctagcatttcaccgagtgctatcgtatcgccaatctccatattcgcatccaaaaataaaaggaaactgccattcgcatacaaggttccaagatttcggcattccgtgctgcttttcccaggctctgcctccaccacagcaatatttcgtctgcggctctgcatctgctggtaatatttctgcaattcctcatctgttcggtcttcatctacaatgataatctcaaaattactgtaccgtgttttctcgtaaaatggctccagcatctgttccatcaacgaacgattcgtatgcccggttatgatcatcgacacgagtggattgcctggtgtatcatattttaccgtatatacgcttcgctgatcagtcatcatgacacgcgccagcaaatgttcccgcgacacatgtgcctccaatgcctctttgcccgccagattctcctgtgcatgctttgcctcccgctccgaagaagttccatcatgaatccgtttgtgatacaacacgcgcggaatatgacagatctcccggttgccttcacagcaacgcaggatcatatcgtagccctgcgcaccatcatactgactatgaaagcctccgtccgccagcataagctctctccgtgccacaaacaaatgggaaatataattatatgcacgcagcaggtcgatatcgaattccggtttgaatcgcggttccagataatgacttccattttctgccatccggtcttcatcggaataaaccacatcatagcgttctctctgcaaagcatccaccacccagtacagggcatcctccgtcaggacatcgtcatgatccagcaatgcaacatacgctccttttgccgcctgcaatgcccggttactgttcccggaaattccaagattttcttccatttttatgtactggattcgcggttcattctccatatattgccagataatgcgctccgtctccaaactatacaccttctccagcaccgacaattcgccatcctctgatacgcgcgcatcaagaaccggcggttctcccttcgcctgactgccatcgaccagacacagttcccagttcccataggtctgatgcagcaccgattccagcattgcacgtaaagaaagctccggtgtcatatacaccggaactacaatactgatacaagggcagtatgaaaacactcgctcccgctgtgttgcaagtgcttcctcatctgcctctatattttctttaaaaaaacgatcatacgccagatccagccccgtcaccatcgaacgtgccttggaaagcgcctccgggattgcagtcgaacgaatatgctcgaagccttttttaattgtatccgcattcaagtctgaaagtcgaaacttcatcgctactgcctcccctttttcttatttccgcacagagaaatcaaacgcatctaacgccagattcatgttgtagtacggatctccggttgccagaatatccacccatcttgactgaaacaactgcatctcgctgtggaatcgcttctgttttttcacagtatcttctttacctctggattttgattcataatgatacagctttgcctgtggaacatacacaaccaatttgccaagctttcttactttcaaacaaaaatccacatcattaaaagccacctgaaattctggatccagtcctccaaccgcatcgaaggtctctctggaaatcatcagacaggctgctgtaaccgcactataatcacacgcaacagaagtccgaagctgatagatgcccgcctgctcatccattgcagaaaatgcatgtccggcaattccgccaatcccaacaattacgcccgcatgttgaatcgtgccatcctcaaaatacaaccgtgcaccaacaattcctacatctttgcgttgacaatacccaagcatctgagtaataaaatccggtgaaatcagttcggtatcattgtttaacaacaaaatatacttaccctttgtatgtgcaacaccaaaattattgattttggaataattaaattcctcctgccaatacaacacctgaatatgcggattttccacaagtgattcatagtatgcaaatgtctcttgttgcacactgttattttctactatgataatctcataattccgataagtcgaccgttgttcaatcgcatcaatacattttttcaaatcatccacatgatccttgtttggaatcacgattgacacaagcggttctccccgaaccagataactcacctgataataccccggagctgctccatccacaacctccgcagccagcccctgtcgcgccaaatgcgcttctatcgctcgttttccagcctcaaacgcataacgttttgctgccggatcttccgctgtcgatgccgcatgtgcccgccaatgatacaaaatcttcggaatatgacaaatgccatctgcctgctccgtgcaacggaatataaaatcataatcctgcgcaccatcaaacgctggatttaacaaccccacctgatccactaagtttttctctgctacaaacatatgacaaatataattattacaacgtagcaaatcaatattaaaatccggtttaaaattcggtgcaaagaaataatctcctgtttcatccaccttatcttcatcggtataaattacctgcacccgcttcgcatttagcgactcaacgcaggcataaagtgcatccggctcaaacaaatcgtcgtgatcaccaaacacaatataatctcccgtcgcaagcgtatatgcctgattcgtattttcggctattccaagcgttccatcttgtgaagctatataatgaattctctgatccttttgcatatatacctgcaaaaaatcgtataaacatttttcttttcttcctccatccgagaagcataactcccagtttccataggtttgtgcctgcaccgactcaattaacgcacgcagaaaatcacaattgctctcatataatggcaccaaaatgctaaacttcggatgatattcaaaatgccgtccacattgttcctgtctttcactatctgtcagccgatgactatgcatccatttattataatccacatagttggaaccaagatgcaggtacttttttaattttgcacatgtattacgccatccgaatgtctttatattgttgattacacggattgcatttatatatatacgtcccatatctgattctcctgctgttttctatatcatctgttgtctcagtatatcatacatacaaaaaaatctcacgaaaatatcaagatttagttgttattttctattatattcgtgtataatagacacgttataaggtttaccattacgaataccattcttatatcaatctttcagtaattaaccatataccttataacgcacgaagaggaaccagcatcaccggttcctcttttttgtatatccaatatcaaggctctgattcatcttctcctgaatcagcctttatctttatattactaggctcttctccgtttccagacagccgggcagaacaacagcatcatcgggaaaatctccagtctgcctgccagcatatcgaacatcagaatatatttcgtaaaatccgtaaaatgtccgaaattcgccatcggtccaaccagagaaagccccggaccgatattgttaaacgtcgctgctactgccgcgaagttcgtgaccagatctttgttctcaatcgacacaagcagtacggataccgcgaaaataaccatatatgtcataaaatagacatttgtcgcccgcagcgtctcatgctcgagtggttttccctcgattttgatcttcttcacggaacgcggatgcagataagaaataatttcttttataaatgacttgcatgcaataataaaccgtgagactttgataccgccgcccgtacttccggcgcaggcaccgataaacatcaaaagcacaaggattgtcctcgaagtctccggccatagattgaaatccgcacttgcaaatcccgttgtcgtgataatacttgctacctggaagaacgcttgccggatgccttccgccggcgcatacaatgcaaaatgccgcagattaataaagataaacactgccgctgcaatcacgatgataaaataaatccgcacctcttcaaacttcagcgcatcccgcagctttcctgtgagaatcaggaaataaaatccgaaattcacaccgaacagcagcatgaaaatcgtaacgacccactgattatacgggctgacactgacgaatccgtcattccagattgcaaaacctccggttccggctgttccaaacgacgttgtcagagcttcaaacagattcattcctccaaagagtagaaaaatcacctctatcatggtcagggcaaaataaataatatacagatatttggctgtctgacgcaccttcggaaccagctttccaaccgaaggtcccgggctttccgccttcatcaggttcatgtggctgcctcccgccatcggcacgatggcaagcagaaatacaagaacgcccatgcctccgatccaatggctgaagcttcgccagaataagctgcccttcgtcaggccttccacatccgatacaaccgtcgcacccgttgttgtaaatcctgatatcatctcaaaaagcgcatctgcaaaatgcggaatatcaccattgatcacaaacggcagacatccaatcacagacatcagaatccacgaaagtgctaccgtcgcgaaaccttcccgcagataaaaccgcatgttcttcggtttccgcaaaataattgctgaacctgcaaccgcactgccaagtgccacccacaaaaaagcaaagccgcccttctcaccatagatcgcagacacgatcccagggagagccagaaatgctgcttcgatttccatgatccagcctaatatataaataacaactgagtagttcataatctgtctccaaaaaaatctcccttactgccatttcaaaatatcgctgacatcggtaaagcccgtgtgcgttgtaacaacgaccacgtaatctccctcgcagatgacatcctgaccacgcggaataatgaccttaccattccggttcagacaggcaagcagaaggttatccttcaatttcaactccatgatcggtttcccgattaccggagaatccttctcaaccttaaactccagtgcctccgcccggttatcaaagatatgatacagtgtctcaatattacttccgaccgaattctgcatcgcacggatatacgccagaatcttctctgctgtaatataacgtggatatacgatacttccgatgtccagactatcaagcacatcactgaatgtgctccgattgatcttcgtgatcacctttgtgtcagagcattttctcgcaaataacgtaagcaggatattctcctcgtcaagtccggtcagcggaacaaacgattccgtactctcgatgccctcctcacggagcaggtcttcgtccgagccatcgccatgcaagatcagtgccttcggaagtaatacgctcagctcctcacaccgtttctcatccaactccagaatcttgacctccacaccggatgaaatcagctgttttccaagataatacgaggtttttcctcctccaatgatcatgcagtttttgaccttatgtgtatcgacaccgatcttcttgaagaaatccatactgtttgtcggtgtcgcaagaaatgtcacggcatcaccgccacgcatgatgaaagaaccatccgggataatcaggttcccatcccgctcgacaccacagacaagcatatcacagtttaactcatgcatcgccgaaatcggcttatcgtgcagcagatttcccttcggaatcttgaacttcacaagctccgcatgtccacgagcaaaggagttgatctcaagggccgacggcagacgcagcagacgtgcaatctcgcgtgcagtctccaactccggattaatgatcagcgaaagtccaagctgatttcgaagatacgaaagctccatactgtaatccgggttccggacacgtgcgatggtagcacagtcaccgacctttttcgcgatcgtacagctgagcagatttaactcatcactttccgtcacggcaatcagaacatccgcatcctgaatacccgcctcaatctggatgctgtagctcgcaccatttccggtaaagcccataacatcgtagtcttccgtaatccgctgaatcacctcattcttctgatcaatgacggtaatatcatgggattccttgctgagcttctccaccagcgtacttccaacttttccgcatccaacgataataatgtttaaaccccgttcttttttctgcgttttctttgaagatctcatatccttaattcttacactccccgtatattcgcaattccttattaacaataaaattgaaactttattgtaccatattcacagtgttactacaagggaatgtcacgcggaaccgcgttccaaaatccggtctggtcaacacgtcaatctgtccatcatgtgcatctacgatccattttgcaatggatagtccaagacctgatccgcccgtctcactgttgcgtgcctcatcggaacgataaaaccgctcaaagatatgcacgacctcggatgcctgcatgccgataccttcatcctgcacctgataatagacgccttgctctgaccgcccgactgtaaaatgaatcgtatcgcccccttccgaatactttgccgcattctgtacgaaaatacgaatagactgtttcagcatggcaacatcgccacgcaccatacagcctgggcaggctgaaaattcgtacggatgcgtctcatcaatcatcatggattcctcgtacacctcctgcacaaggtcatttaagtccacttcgaccggcttcaatgtattccgcccactatctccgcgcgctaagaatagaagctgttcaatcagatccttcatatggtcagattcgttcttgagcgcttcaatcgactcatttagcactgcttcatcttctttgccccagcggtcgagcatgtttacatagccctgaatcacggagatcggcgtccgcagctcatgcgatgcatccgacacgaaccgcgcctgctgcagcttactctcctgcatccgagcgagcagattattcagtgccacctcaatgctctgcaaatccttatccccggtcgatatccgtatatcattcgcatcaacggagacattcgagattgcctgttccagatgctccagatttacctcatcaccgctcatatttgagagtgcttccgcacgcacagcaagatcattcaacggacgcagcttccgtctgatattccgtataccaaagcacgcagaaatgagcatcataagttccaccgcgccaaccacaatgagcggtatagccgcataatccagaacctcatgcaccagaaaattgtccgtgttcttaccgacctgtgtggtcatcgcccatgtggcatatgaatcacccgaccatgtaatatgcaccggcttcgccccggacatccagtctgcatctgtcgtatcaagccgccataccagcaccgccacgaacaacattccgagtatcacaatatcaagtcccagcaacgcaaaaaagcgccggaaccagtatccgacatgaatcttccgggcgatagaggttgtcttccgatttgtccgttcttctctcatccaatcactcctatgactccttgatgcaatatccgactccgcgaactgtctggatcagcttaattccaaaatgatcgtcaatcttcgtccgcagataccgcacatacacatcaatgatattcgtctcgccgacataatcatacccacagacctcatttagaagcttctcccgggtaagtacaatattcttgttccgcatcaacgtgtgcagcaactcgaattcacggttcgtaagctccacattttcgccctgcacagtcacctcgtggcggtcttcgtctaagcagacacccagcacctccagcttatgtgtcggtgcatcctctgtacgcgcatgcttctttagcgcgacgcggatacgcgccagcagctcctcgatggcaaatggcttcgtgatataatcatccgcaccagcgtccagccctgctaccttatccatcacagcgtcgcgtgccgtgagcataatgaccggcgtgtccttctcctgccggagtctgcgcagcacttccatgccatttaatcccggcagcatcacatcaagtaagatcaggtcaaacgaaccggagagggctttgtccaagccctctctgccgtctgccgccttctcgacttcatttccttcatgttttaattccagttcgacgaaacgggcgatgcccgcttcatcttcaataatcaaaatcttgctcatatcgtctcctataaacaggaaaacgattacgtcataatgcttataccagatatgtatagtatccaattacatgcagacgcgctctcgctcacttccacatgtagcggtactaaactcattgcaccagtaaactggcacaattcgttaagtaccgacatgttccaatggtctgcattaaaattggtactatacatatctgaaatatatttttttatacgtaatcgtttcccctatcttataattttcctttctctatgtttcagatttttatttcttgatgtcttctttcactcccgcacaggcatcggatgccttgtcgcaggcgttgttgatgtcctgtactgctttcgcgtcaccctcgaaatggtacctgcagtcgcagaagagtccgatgatcaaaagtggtacacagatccagaatgcgaagatcaaaagcagtatgaatatgatgatcggcatccgcataaaacgctcacccttacgctcaatgatgaagttcttctcgcagcccttcttgatgatatcgcctacccacgcgaagaactcatccatacgctcaccgaatgttttcttcttgcaagactgctcgtaggcagcctgtgcctgtgccagctcgttcgatgtctcctgcggagtcgtcgtataagtgccaacctccggtgccttgatctttccaagcttctctaaatacacgatcgcatcgagcagatcataattacatgcttcgagtgcactcttggcatcctcatagctgacacctgtcttctctctgattttttctaccttttctaactgatccatatctgatatcctccattttctgtaacagcggttttgtgatttgttctttgctgttcttgattgtgtccttatcttacggcaccaaaattaatctataaggtaggaaagattaaaatcagattaaaatttctattattttccatatatctatctgcacttcttcctgttcacatactaacacaagtgtatgcgtatgttcatctattttcttcagaattccggtgtccttcacgtaggcaccgccctcttttttcgcatccttcacaaaatgtacgaccgctacttccgtatccttgtgctccgctaaccactgcagcttccggtttagttccgcaacctcatactcatcaagttcaatctcttcctctgtcagccgtgccgtctcccgcaccgcttcatcatgtcccgtaagcgctgcaaatggggcaaactgcgccgcacgcatcatccgatccatcggcggatgcttcttcgacaccgggcgttcccggtcgatgatatcactgtaatcccgtctcacgccttatgtcctccgatctgattattcctgtcacgcgccgttgcgccctcgcggaaattcattccacgtagaactgcatttttaccgtatttatgtttgattgcaagcaatgcctgctgaatctgcgcttcttttgcttccttttctttctctgcttccttctccttttccaacgccgcataatcggtaaataaatccatctgttcaaatccagaagtctcttccttcacatcttccttccggatcacatgattggctaccacatacatccgccgcacaagcagattctcatccacaatccggtcatataagcgaagcaccgccgcctcaatcctgcttgttgacgatgtataactgtccagattctctgtcccgtgtgcgtgcttcggcaccttccgcccatagcggtcacgcgtcacctcaccgtgatatccatttgctcccccagacagattctcgatatcatagccaactgtaagtaccatctgatttgtgacaagccccttttcaaccagttccagcaccagtccctctgtcatttcctgtacaaccacacgtgctttctcacatgtatacgggcattgcaacacctgccccgaactaatgctattactctccgggcggtacgccttaatctctgcgatcgtacacggttcatagccccatgcatggtcgatcagcagctctgcattcaccccgaaaagcttatacagcagatcttcgttatagtaatcatcttctccgcccagtgaacaccgggcaatatctcccatcgtatacagatcctgtgcatgcagcttcttctggtaacccgcccccacacgccagaaatccgtcagcggttcatggttccacaacagtctgcggtagctcatctcatcaagctccgcgatccgcgcgccacgttcatccggctgcatatgcttcgcctcgatatccatcgcaatctttgccagatacagattcgttccaatccccgctgtcgccgtgattcctgtcgtttcatagacatcccgtatcattgtctctgcaagctgtcttgctgtcatctgataggtattcaggtatgtcgtcgcatcaatgaacacctcatccaccgaatagacatgcatatcctccggcgcgacatatttcaggtagatatcgtaaatgcgcgtactgtattccatgtaatgtgccatccgcggcttcgccgcaatatagtccagcgccagccttggatccgctttcaccttcagattttcatacgacgatccgttaaattcccgccccggtgcaaatgccagccgctgacggttgatctcttttacccgctgcacaacttcgaacaagcgcgcccgccccgatatgccataggatttcagggatggcgaaacagccagacagattgtcttctctgtccggctctcatctgctacgacgaggttcgttgtgagcgggttcaatccccgctccacgcactccaccgacgcataaaatgatttcagatcaattgctatatactgccgcataccgtcactccacatagataaatccgtgtcttatttcacatactgtttttattttagtatagaacatatgttttgtaaataataaatatttcaaacagcatcataaaaccagcggattcgtacgttatttatataatcatttacaaaattatacaaactataaatatttattttgcaacttcgttacacttttgatgcaactttgatgcaattatttggtatgttatgttaacaggggattttaggaaatccggacacatattttcaggaaagacagggagataaatgaacgtaaaaatagactcaagaaaaatcgaaaagggcgacacttttgtggcactgcgcggcatcgaccacgacggacatgcctatatccgacaggcaattgaaaacggcgcagcgaagatcatctgcgaggaaggaagctacgaggtggaaacctgtatcgtcgaggataccagagcatatctggtcaattatctgaaagatacttactacgacaaaatcagcaaactcaagctgatcggcatcaccggtacaaacggaaaaactacatcagcatttctgcttcaccagatgttgaataagcttggcagaaaatgtggctatattggcacaatcggcttctacgtcggcgagaagatccgcagtctcgcgaacacgacccccgatatctatgatctgtacgcgattctgctgcaatgcctgtcgctcggctgtgagtatgttgtcatggaagtaagcagtcagggacttgcaaatcaccgtgtcgagacgttgcagtttgactatgcggtcttcacaaacctgacacaggatcatctggatttccacaagacgatggaacgctatgcccttgcaaagcaggaattattccgcatgttaaagccatccggcaaagcgatcatcaactatgacgattcctacaagcactattttctgcttgaagaaaatgagaatgtaaccttcggctttaccggcggagatttcaaagtagctttggatgccgcagacaaggaacatacagaattctcggtacagtgccctgcatttacccagaacttctcgaccaatctgatcggcacttacaatatctacaatctgatggcttccgttgtgattctgacactggagcagtttgacagtgccaccatcgcacaggcagccgcagcacttacacttccaaagggcagaaccgaatgtatccacacaggaaataatctgatcatggtagactacgcacatacgccagacgccatgagcaaggttctgactgccgcacgtgcacttacctccggcagcatctatgtcgtgtttggatgcactggtgaaagagaccgggataaacgtgcgaagatgtccgcgattgcctgcaagcatgctgattacgttataatgacgcacgacgatcctcattatgaagatcaggcacagatctaccatgatatgacatccgggctttcttacgataactacgaaatcgtacatgaccggaaggacgctattcgaaagggaatctccctgttagatacggacgacattcttctgatccttggaaaagggcacgaagaatttattgtttgccgggataagcggattccattcaacgatatgaatgtcgcacggcaatgcctgtctgaacggaggactcccaccgcagctaggatctgccaatccgcctagcggtcacatgcacaattaacatttatgaacgctaaaagggcggccacatcctgtgaccgcccagtaagagaggggaaacgaaaaatcgtctggctagctattttaaattatccttcgatggcaatgaatttcttctcttccacctgtggctttgcttccttctttggaacagagatcttcaagacaccatcttcgaattttgccttaatatcatcctgtgtgatcgcatcgcccacatagaaggatctgttgcaggaaccttcataacgttccttacggatatatttgcccttggcatccttctcatccttagagttctttgtagaagccttgatgatcaggtaaccatccttcacttcaccggttacatcttccttcttaaatcccggaaggttcatatcaatctcgtaaccgtcttctttctcaaacacatcagtactcatcagattctgtgccggtgcatcatacttatagacaccaaaacttggtgcatcaaagaaatcatccataaaactatttgtaaataaacttggcattaacataagccatacctccttttatatcttactcagtaattgcaatctatgtttcttgacggcatccattcactatttaattgcaattacaatatcaactttccttcccactcgggttcccttctctaggtcttccctcatgttctaggtgtactataacatacttattagcactcgtcaatagtgagtgctaataaaaattgtgaaaaaagtgtgaagtcttgattatacaaaaaacaggtatgccgcaacaatacagcacacctgtttcaaaatcatgttatttacttaaactgattctgctctgcatggcgtttgaagaagtcctttgtctccttcacaaccacaccactcaaagcgaagattgcgatcatgtttggaatcgccatcaatccgttgaagatatcggcaatcgtccatactgcctttactgtcatgtatggtccgatgaatactgccaagatatacaaccagcgatatacaaggattgctttcttgttcttgcctgacaggtattccagacagcgctccgaatagtaatcccatccgaggatcgttgtaaatgcgaagaataccaaacaaagcatcaacaggaacgcagctacctgctcggaaatcggaagtccctcctggaatgcgtaggttgttacctgtacaccctctaagccttcctgctgccaagcacctgtcaatacgatagaaagtcctgtcatcgtacagatgatgattgtatcaataaatgtacccgtcatggaaaccagaccctgacgtaccggctcctttgtctttgctgcggctgcagcgattggtgcagaaccaagaccggattcatttgagaagatacctcttgcaacacccttctgcattgcaacgatcatcgtaccaaccacaccaccggtcactgcctttggattgaatgcgccctttacgattgttacaaacgcatccggaatctctttgatattgcagatgagaagcaccagacaaagcagaacataaagcactgccataaatgggacgacgatctgggatacatttgcaatacgcttgataccaccgatcaacacaagtgccacgcagacactcaggatcaaagatgcaataactaccgtccacgaatatgtaccgattccaggaatctctacgctccatgattcattcggatcgaagaatccctcgacagccgatgcaataccattcacctgtgagaatgttccgataccgaacaatcctacacagataccgaagaatgcaaagatcttcgcaagccatttccactttgtacccatacctttttcgatatagtagaatggtccaccgagtgcatgattgtcttcatctaccacacgatacttaactgcaaggagtccctctgcatacttggttgccattccgaagaatgcagcaagcaccatccagaacagggcacccgggccaccggctccgattgctgttgcgacaccgacgatatttccggttccgattgtcgctgaaagcgccgtacagagtgcaccgaacgaagttacttctccttcaccctcttcctcatttttcaccatccatttcagggcaagcggcagtttacggacctgcagcacacccatacggatggtaagaaggattccacctgcaatgatcaaaatcataagcggcggaccccagacgaaatcatctacttttgtcaaaaagctattaattgcttcccacatgtttcctactctcctttattttattttaacaacatgttctctatattacacagttttccagcttttgacaacatttttccctcaatttataaagttttttactgttttcatattaaatatacggggtataatagagtttatgatatactttatatgtccaaatatggattttaaaaaagaaaggaatacatttttatgaatcttattaagaatatttccaaatcagaagtacatgtattgaaggatcaggttacttatcaggagggacaggttgtcagcaagacactcgcccagaatgacgccgtatctatcacattatttgcctttgacaaggacgaggcgatcagcacacacgagtccggcggcgatgcatttgttacctgcttagatggtgtcggcagaatcacaatcgatggtgttgaatatatcctgcacgaaggtgaatccatcgtaatgccagccaagcatccacatgccgtctatggtgcagaacagttcaagatgctgttagttgttgtattttaattatcttaattcttaaaacggaaaagccgccgagccgggaatccaggtcccagtccgacgactttttttctttcttctattctatatatcggcagatttctattattgctttacattaaatgctttcattcctggatatacagcgcttgcgccaagctcttcctcaatacggagcagctggttgtactttgcaacacgctcagaacgagaaggtgcacctgtcttgatctggcatgtattaagtgcaactgcaaggtctgcaatcgttgtatcagccgtctcaccagatctgtgtgagctgattgctgtgtatccagccttgtgtgccatcttgattgcttccaatgtctcagaaacagatccaatctgattcagcttgatcaggattgcatttccggcgccaagctcaattccctttgccagtctctctgtatttgttacgaacaggtcatcgccaacaagctgaaccttgccaccaagtcttgcagtcagcttctgccagccttcccagtcctcttcgtccagaccatcctcgattgagatgattggatacttctcgcaaagtgctgcccaatgctcgatcaactgctcagcagtatactctgtacccgccttcggaagcttgtagtagccctttcctttttcgctcttccattcagaagaagctgcatccatagcaatcttgaaatccttgcctggctcataacctgctctctttacagcttcgagaattgtctcgattgcttcctcatcagacttcaaagcaggggcaaatccaccctcatcaccaacggatgtagcaagtccgcgctctttcaaaattgcagccaatgcatggaaaacttctgcacaccaacgcagacactctttgaaagatggagcaccaaccggcatgatcatgaactcctgtacatcaagtccagaagaaagtgcatgacatccaccgtttacgatgttcatcattggaactggcatacgatttccagatacaccaccgaggaaacgatacagaggaatgtcaagggatgttgctgctgcacggcaacatgcgatagatactgcaagaatcgcattcgcaccaagcttagacttgtcctttgttccatctgcctgaatcatagcctgatccactgcatagatatctgatgcatccataccctcgattgcatcattgataattgtattgatattttcaactgcctttgttacacccttgccaagataacggctcttatcgccatcacgaagctccagtgcctcgaactctccagtggatgcaccacttggtgcagtacctcttccgatggttccatctgccagataaacctctgcctctaccgttggatttcctctggaatccaagatctcacggccaataaccttttcaatttctaaataatccattgttatgtactcctttcaatttgcattttaacggagtctcttgcttctgacggtctctcctcgttcagaagcaggagttccgaaatgatttacacgtgctaggttagccagacctaactataagttagtatatactaacccggtttaaaatgcaagtgtattttccataacttttatgcaactacaatactcccaaccatacaggcatctccatccgacacaagagatacctcataatgctgtttaggcagattctgctttataaatgcagcctcaaaaccggcaaatgctaaccttcgcttaccaaacgcatcccggacatctggcctgtacaagcgctcggattttacaatgtactgctgtttatcctgtccagttaacacaacactgagagcacctgcccgcaatgtttttcgattcaaggcccaaccactgattttaaccactgcttcatctgtaaactcttctaccttgtattgcagacttccattttcaacaagcctctgctgggttcgctcaggcgtttcgatttcctttactttcaacagccgtaatgagaagttatcactgtttccaatcagatttgggttataacacggatcataccccttaaattccggatgacgatcatacaattttttcatttcccgttgctgtctggcggctttttctggggatacagcgtcatagccacggctgacagattcataatggtataaacggacatctgttcgcacaacattataatatcctgcttctactaaattaaaacataagtcaatatcgttatatgccaccggtaactgttccgaaaaaccacccacctgatcatatttattccggtcaatcataagacacgcaccggtcaccgcactgtaattatattccagcttatttcgtccccaataacaattcaaatcgtcgttaatccgttgaaatgcatgtcctggtccaaccataaaactgacaacacctacatgctgtatcaaattcgtatttgggtaaattaatttacatccaaccgcacctgtatgtggctgctgtgcatgtcccagcatccgttccagccattccgctccctcaacacgaatatcgtcatttaaaaacagaaggaactgtccatctgccagatgtgccccaatgttgcacatctttgaaaaattaaactccattggcgcgtaatgatatttgcactccaattctttacacatttgtgtatatttcgcatgtgtttcttctgcactgccattgtccacaacaatgatttcataattttgatatttcgtttcctttcggatggacgtcagacattgctttaaaatgtcataattatccttagacggaataataatgcttactctgggatttcccacaacttcataaaccacgcggaacatcactatatctttaatatattccagatgccctttaacgcctcttcgctccagggcttcgagcttcgccttctttgtcgtttcaataatatatggctttgccgatatatcatttgccgtagactcttcacgttcccgccaatgataaaggatttttggcacatgccctatacgattcgtcttctccatcacccgcaaaacaagatcatagtcctgcgaaccttccaagcctacacgcaaaccgcccatttcgtccagcaaggatttgcgatacaccgccaaatggcaggtatacatcaaagacataaatgtatctggagaccaatccggcttaaaaaacggattccttctttttgtcccatcctcagataatttgtcctcatcgctgtaaataaaatccagtgtatgatcttcatttagctttttcgcaatttcatacagtgcattttctgcatacagatcatcacaatccaaaagcgcaacaaattcgccctctgccattgcaattccatcgtttgtagttctggatatatgtccattctcactgcggtattttattttaatgcgctccactccttcaaattgccgcaaagtctctctgacacgcgcatcggttgaacaatcatctacaaggcacaactcccaattatcatatgtctgattctgcacagattgaatgcatgccgttaacatctgtggttccacattatatactggcacaacaaccgagatgagtggtttatattccaactcctgttctggctctttatattgctgttcattttgcagcatccacatgtcatattcatttttcttgtgtagacgatgatttaacttataacaaaatacatgccatccttctttacccagacagcgcatcattctttttgaaaaagaaagcactctttttatctgacccatatttttatactcctacttcttctctcatagattgaactatacgttgttcactgcccggaatattgctgttatcacatacatctgtaaaaacaccgtccacatagcagcatattgatctgcatttcctgatacacatgtccgttttgtccgaactgcaagcaaaccaaccacaagtgccggaaggaaatatcttccctgtacacccgctaccacaacaaattgatatggcgtccaatataaaagcatcgctgcaactgccagcccactgacgccgacaaacaccaaaagcatccaaatccggtctcccactgttatcaactgttcttcgttttctttccgcatagaaacatataacagcaacaataaaaatcctattacaaacaccagtggaacttcaatatcaagccatccaagatagcttcccaacatctgctggatatgctttcctgattcataccaaagcgtattgagtaatatttcaaaaaattggatcggattttttaagaaataccccattgtataccctttggaatcggaccatgcaatataagtactgttaatattttctggttgtagccagcgccgaaccacgagaaccagaaccatcacacaagccactacaaatatacctgcaatgacaatcataagcaccttcatccaaggtttaattttctgtttgaccgcatccaccttatctttgtgctgttgcagaattcgagggatcaacatcaacggcaatacaaccaatggcaacagagaaaagcctttacatggtagcaataataagctgctcaataccataacaatattatttacaagcttcgatctccgatttgtttcctgtccgtaaactgctgacattgttgtcgctattacaagaatacataaagcaaacaactgcgaatcataggaaaaagaacatacctgttgcaatgtaattggcaaaagcgcccataccataacgattcctttaccaaacggaatccgctttatcgcataataagctgccgctataaaagcaagcagattcatcaatcgtccaagcaaatacaacatagttgtgctcgcccctaacaaccgtccaattgtaattccaagtccggataaaatatacagataacgcggagactgcgtcgaaacatgtgctgtctttatcagattcgttttttccggtcgctgaaacagcccctcatattgactattgtaatcttccttcgtaataccacgtgcattatacatatgttcgttatccgcctgccgcatcatgacagtttccgcatcgtgcgttcccatcataacatccgacatgtcatatgctgtatatatgtgtacatactcatctggaactaccataatcggaataataagcaaatacaaaaatccaagtacaataatcattggcagaaaaagtttctcaaaagaagtcttccactttgtgccaaacatcgcctgaatgctgacaaacgccaacaatacaaacaacaatccatatgcaatacaatgtaatataaaatacgcatccacaccgttttgattgtcgattttgtgatatgccacatttatcatatacacacccattaccaaggtaatcaataggagtcctataataacgcataatttgattattctatttggatttttctctttcacttccattcttattcccctgtgtttctttaatttgatttaggtagacaaaagagacttttattgtaggaatacaataaaagtctcatgtcctttataatctattatcgattagatgttaagcagatcactgaataccttcaacgcaccatctgtctcgtgtgcaagtaccttctttgcaagtaccttaccaagctgaacaccttcctgatcgaagctgttgatgttccacaggaatccctggaacataaccttgttctcgaaatgtgcaagcagtgcaccaagtgtctctggatcaagctgctcaccgataatgatagaagatggacgaccacccttgaagttcttgttgctgttctcatccttcttaccacatgcaaatgctacgatctgtgcagcaacatttgcgcagagcttcttctggcttgtgcttccctgaatctctacatccgtgccaatctggctgttcttgaatgcgataaactgcaatggaacaatgtcagttccctgatgcaataactgatagaaggaatgctgtccgtttgttcccggctcaccgaagagaactggacctgttgggtaatcaaccggctcaccaaaacggttcacagacttaccattggactccatatcaagctgctgcaggtgtgcagggaaacggctcagtgcctgtgagtatggaagaacagttgttgcagggtaaccaagtacgttacgctcgtaaacgccaatcaacgcatcaagcatagccgggttcttcctgatatctgtattctttgctgtctcatcttctgcggctgcaccatttaagaaacgtgcaaatacatccgggccaaatgccagtgaaagtacagcaccaccaacggctgatgtagaagaataacgaccaccgatataatcatccataaagaaagctgcaaggtaatcatcgctctttgcaagtggagatgtctcacttgtaactgcaatcatatgcttagaagcatccagacctgcctttgcaagcgcgtccttcacgaaggactcatttgtaagcgtctccaatgttgtaccagactttgatacaagtacgaagattgcatgtgctacatcggtagatgcaagaactgctgccgcatcatccggatctacgttgctgatgaacttcgcatccatcttgaatgtgccgttcttctttgcccagttctcaagtgcaagatacattgcacgaggaccaaggtcactaccaccgataccgatctgtacaaccgttgtgaacttctcgccggctgcatttgtgatctcgccattgtgtaccttatttgcaaactctgcaatacggttctgctgctctacgtaaaatgttctcttatccacgccatccgccttgactggctcgccaagctgaccgcgtgtcatctgatgaagaaccagacggttctctcctgtattgataacggcaccattataaagctcctggaacttgtcaacaagctctgcttccttggcaagggctgcaagcttctccaaaactgtgtcatccacttcctttgcagcgaagttgtaagtaagcttctctgccatcggtacgctgtaattcttcgcacggtctgcaccgctctcaccagccataacagttgtgagatctacactgcccttacaagctttgagtgccttgtaagaatccaaagtatcaagatttttccaatttgtcatttttctttcctccgtaatctatttggcgtaggacgccagctcgttttattataacctcttcggcgggatttgtcacttgttttattcttcgtctttcttctcttccctcattttttcataatacgctttatacctgtaaatcgtccgttcactgacgtgatttcgttttgcaatctccaccattgtcataccattctcatatccaacaacaaaatcattgtatattgccatccattttgcattatgtttctgccggccactcattttccgatttttataatattccagttcttccttaagctctgcattctctttttccagcttcttaattctttttactgcatcttccagtgtgatatttttttccatctctatttcctccatttaaaccccataactcctcgtttcatagtttaatatacttatcgccattgtcattttgtctatataataaatctttttgccaatattgtcaatctgattctgtcaggtcattaaaaaaggaacgttttataacgtccctgccttaaatgaaatgtattttaataacaatcgaatcaactattatgcaaagctttaatttcctctatcgaaagttgagtgattgttgaaatctcttcgtccgagaaatcctttttgattaaaagcttggctgcattaaccatctgagccttgccgaagaagatgaggacgagatgaatttctacgatcatcaggacgatgaagaataagaaagagaggacaaaagaatgagaatgatgaataagatcggtatcggtattatggctgcggtaggtactgccgcagcggtgggcgcaggttcaaagatcgttgataatcacagacgcaagtggttcgataacggctataagtccggtcactttgcaggcttcattgacggtgcaaagtcaatggtcagcattgctgaggagactgcaaccctcgctcagaaggtcaatcagaacagcacggttatccgtgagaagtatgaaaagctctgcgaggagtttgaggagcttcaggagaactacgacgatctttgtgaggattactacaacgactgaccgactttgaacccaatggattcaaagttcccgacaacagaacaacgtgagacaatgagaaaagagagagaatttgtctaatgaaagttttaagcctatttgacggcatttcctgcggtatgcttgctctgctgagggcaggcatacccgtggagtgctatgatgcctttgagattgacaaatatgccgtcacggtctcaaaacgtaatttccccgtaatcgttcatcacgggaatgtatatgacggcgactttacgaagttcaagggctatgatctgcttcttggcggttcgccctgtacctattggtctatcgccaaaaaggacagagaagttgactgcaacggcgagggattcaggctctttaaggaatatgtgagggccctccatgaaagtgggtgtagatacttcttatatgagaacaactactccgttcaccagaacatcaaggacgagatcagcaaggctctcggcgtagagcctattatgataaactccgcgcttgtttcggcgcagaaccgcaaacgctgttactggacgaatatcccgtttatttcttttcccgaagataagggcattttgctgaaagatgtgcttgaaagcggtctgccgtggcaggacaagtcctactgtatgacttcctcctataacggtgcggtgctgtataacactctggaacgcaagcagcggactatggttgcagagcctatcccgatcaatacatatcaggatacggacaagtcccgtactgtcatggcaggctatcacaagtacggtgaagcaacaattataaaaaattcgggcttcaacggcggtacaacagcagtcgctatgccgatgggtgccgcccagcgcggacggtatgttgacggtaaaaataccgaacagcatattgaagtgcgtgaggacggaaaatccaactgcctgacaacggttcagaaagattcgctgatctgcactcccgtccgtgtcggacattacggcaagggcggacagggacagcgtatttattccgtgcgcggaaaatcggtcacactctccgcaaacggcggtggtcagggtgcaaagacaggtctgtataagattgatctccctgacggtgactatattatccgcaagctaacacccatagaagcagagcgtttgcagacgcttcccgacaactacaccgcaggcatatccaacacgcagcgttacaaatgtatcggcaacggctggacggtcgatgtgatcgcccacattttgggaggacttcgtgatgaatgaagaactcctgaaaacctgtaccgacaacaataattacactatctatacagccttttgcaaggcacagcgtattttgatgcggtcttatactcctgtttgcagtatcagcagcggttcggacagcgatattgtgcttgacatgatccacaaggtcgatgaggacggcaaggtcaagtatttttggatagataccgggcttgaatactccgcaacaaaggagcatctcgatttccttgaacaaaaatacggtatcgagattatccgcttgaagcccgataagcctattccgacctgtgtgcgtgagtatggtgttcctttcctgtcgaaatatgtctcggaacagatgatgcgtttgcagaaacacaattttcagtgggaagatgaaccgcttgaagtgctgttgcagaaatatcctcagtgcaagactgctctgcaatggtggtgcggagagcgatattccgacaaggacggctatcagaaaatcagcagattcagcatagaacgcaaccgctatctgaaacagtttatcatggcgaatcagccggatttccccatctccaacaagtgctgtgagttttcaaaaaagaaaccggcaaagcgtattgtcaaggagcttgaagctgaccttgatattacgggtatccgacagtccgagggcggtatccgttcggcggctttcaagacttgtttttccgagtgcaagtcaaaggggtgcaatacattccgcccggtcttttggtatacagacggcgataagcgtgactatgaagaaatgttcggcgttacgcactctcggtgctataccgaatacggactgaggagaacaggctgtgtaggctgtccgttcagcaaacatatcaatgaggagcttgcgatcattgagcagaatgagccgatgttgtataaggcggcggtcaatatcttcggtaaatcctatgaatatacagcgaaataccgtgctttcgtcaaggagatgaaagcaaaggagaaagaggaaaagaaacgtgatagactactcagccttaacggaacatctgcctgtgatactggcggtgacagcgatactcggtctgctgttcggagtgccgtatcttctgacgaaaacgctcctgagatcggaaaaggagcgtgatgaagatgtttgatcctgaatttcagcggaaagcactgagccttgttatgggcttcatcatggagttttcgggtacactggcagaactggaaccggtcgagctgacagcggataacctgaatgtatcgactatttccgtatcatgcctgaaagtcacttgggactccgagcctgaccgtgactattatgtgagctgcacggctcatgatgataattacgcctatgctgataatatgtactttgagttcaaatcaaatgacctctgttacataacaggtctgcgtgagggtactgagtacacggtgacggtcgagcctgttctttctgaggaagaacaggacggatataccgtaaaatctgcaagtgctgacggcaggactgaaacggtagaggttatctatgagttccccgatgaagaaggctgggattcgtgctactgtggggagtcctaccacgggcttaccagaaatccgtcatggagtgcaatacaaggctgtaccgtggacaccattacaaacacgggtatcatgcgtgatgagtacggcgactactgctgtgcaatgggcgtgtggtacggatactgcggagacagatttctcgtgaccaatgaggctggacagcagtttaccgtcaagatttgcgacagcaaaggttatgccgatgacggtgaggggcgctatcattggttcggcggtaagggcaacggcaagtgcattatagagttcatttatgatgataattcacttccgtcctgcgtagctttcagcggcagttggggctactataactggaacgggcttgacctgagttctaatatcacaagtatcaagaaaatcaactacggcgatcccgtagaatactaaaaatcatggaggaacaattattatgaacgcaaagaagatcatcaagggtatcgtgaagctcggtgttatgggcggtatcgcctatgctgcgtataagctcggtgagtgcaacggcgaggtcaatgagcgaatgcgtgagaagtacggcgacgaggacgaggacgaggacggcatcggctctgacgatgatgaggaggaagcggacaactactacggcacttgctttgagcctaagtatgtagagccggacgatggctgtcttgctccggcaagtgtagccgtaactccttataacattggcaaagagcatattatcagcgaggtagtttctgctgaaaagtgcgaagttcctgacgaacctcatgaaaaagagaagcctttgccgcagaaggaaaacaaagagtgtgtcaagaaagaagtcgtaccgcctcctgtcaggaagtacgctcctttgagcagtattaaaattcgtggcatttcccgttatgaaatcgaaacgctgctgatttggatgctccgccacggagcgttttataagaccgatctgatctatgtgattgatgctggctcaacgaaaattgaccaaatttgtgatgcgtttctcaaagcagggtatatccgcaaagaagaaaaaagccgaaagacatactgcaatctcacaaaagaagatttttactggctgttgttagaagaataaaagcacactccccatgatgggaaatgtgcttggtaggttggatacgatactcctaattattctcctaacaaattctttctcctaaaagcacggcgtttttaggagaaccgaactctttaggaggaaactttagcataaaagctgttctttccggttccgtgacgttcaatgtattgctcatcgacgagctttctgagagcagcttcaaccgacttttcactgatacttgggcagatattcgcaatttctttcttggtgaactttccgacttttgtgtctaccgctgctttaacgatgtcataggctttgcttttaacagcaacgcttttcggcttgccgcctttgatctcaatggcggtagattcgcctattatctgcacccgttcctcaaattcacgatagcaggcaagaacaacgcccagcatatatttgatgaatggcgtaggatcgtcagtttcctcatgccagccctttgatgcttcttccagagcgtcataatatgcaccttttgttttttcgatatgcttctcgatactgatatactttccgacttcatagccgtttcggtacaaaagcagtaatgtcagaagtcggctcattctgccgtttccgtcattgaacgggtggatacagagaaaatcatggataaaaacaggaataaggagaagcggatcaatcttctcggattgggtagcctgtttataattctcgcatatcgcttcaatacaaggtgcagtttcatagggcagaacaggtgtgaagcggataaattcagaaccgtcggggcgagtctccttcagataattctgcgtgatcttataagtaccgcctaagcctgattcggagtatttagtcaggtcacggtgaagctgaagaatgatgttgcttgtgatggaaatataatcgtggctttcgtgaatggtattcagaacatcacggtatcctgcgatctccttttcatcacggttcttcggtgtggttttctccttgacaatctgaccgatacgggtgcttgttgttatgataccctcgatacggttagatgattccacggactgaacctttgcaacttcggtaagtttttctaattcaacgggcttctgacgggaaaaaagctcttgtctgcccttgtgttcatgtatctgggtgagatagcggagtatttcgttatcccacaagcaattttcaaattttgaataatcgaattttcgcattgtttttctcctactactaaatttttgttctcctatattatactcctatttaggagaaatgtcaacaatttaggagcaaaataggagaaaatatttggtaaatcaattctgtttcccaaaatcgaaaaaatcaagaatttggaaaatagaaatcgaaaggaatgaaaataatgtcaattttgatcgtgggcgaaaagccctccgtttcccgtgcaatcagttccgtggtcggtgcggacaaggttcagaaaggctacaccgagggaaacggctatatcgtgtcatggtgtgtcggtcacttggtcggactgaaatatccgaatggctacggcaacggctgggaacagaagtggagcttttcgcagctaccgatgattcccgaaaagtggctgtttaaggtcactgacagcacaaaggctcaat

SEQ ID NO: 1033 - DNA, 44777 bp, unidentified
  source 1..44777: mol_type = unassigned DNA
tggatcaggctgaggttgaccgccgcatggctgccatcaccgctggcctgaaagaggatctgtgcgctgactgcgacctgatcgttgaggctgctttcgaggatatgaaggtcaagcagaccacctttggcgagctggacaagatctgcaagcccgagtgcgtttttgcttccaacacttcctctctgtccatcactgagattggcaagggtctgagccgtcctctggtcggcatgcacttcttcaaccccgctgaccgcatgaagctcatcgaggtcatcgccggtgtgaacacccccgccgagaccgtcgagaccatcaagaagatcagcgttgagatcggcaagacccccgttcaggtcaatgaggctgccggcttcgtcgtcaaccgcatcctgatccccatgatcaatgaggccgccttcatcaagatggagggcgtttctgacatcgccggtatcgacaccgctatgaagctgggtgccaaccatccgatgggccccctggagctgggcgactttgttggtctggacatctgcctggccatcatggacgttctgtacaaggagaccggcgacagcaagtaccgcgcctgcccgctgatccgcaagatggtccgcggcggcaacctgggctgcaagaccggcaagggcttctacgtttacaacgcagaccgcaccaagacccctgtcgacgccctgtaattcagtaacttacgcgcctggcgcggtcaaaaccgtgccgggccgcgtttgtttggtcgggcagtatagcccggccccagtatatggaggttttatcaatggattttactctgtctaaacagcagcaaatggtccagaagatgtacaaggagtttgctgaaaacgaagtcaagcccctcgccaagaaggtcgacgcggaggagtacttccccaaggagaccgtcgagaagatggctaagctgggcatgatgggcatctacttcccgaagtccgtcggcggtgcaggcggcgacgtcctgtcctacgtcatggctgtcgaggagctgtccaaggtctgcggcaccaccggtgttatcctgtccgcccacacctctctgtgcgcagctcccatctatgagaacggcacccccgagcagaaggccaagtacctgcccaagctgtgcagcggcgagtgggtcggcgcgttcggcctgaccgagcccggtgccggtaccgacgcccagggccagcagaccttcgccgttgacgagggcgaccactggaagctgaacggctccaagatcttcatcacgaacgcaggctttgccgatgtgttcatcatcattgccgtcaccggctttgtcaccgacaagcgcggccgcaagcagaaggagatcagcgccttcatcgttgagcgcaccgatcccggcttcaaggtcggcaagcccgaggacaagatgggcatccgcggttcttccacctgcgagctcatcatggaggactgcatcatcccgaaggatcgtctgctgggcgtgaagggcaagggcttccagctggccatggctacgctggacggcggccgtatcggcatcgcctcccaggctctgggcattgccgagggcgccatcgacgagaccgtcgcctatgtcaaggagcgcaagcagtttggccgctccatcgcacagttccagaacacccagttcgagctggccgagatgaaggcccgcgttgacgccgccaagtatctggtctacgcagctgcccagaagaagcaggctgccatggacggccagaaggtccgctacagcgttgaggctgccgaggccaagctcattgccgcccgcaccgccagcgacgtgacccgccgctgcctgcagctgttcggcggttacggctacacccgcgattaccccatcgagcgcatgatgcgtgatgccaagatcaccgagatctacgagggcaccagcgaagtgcagatgatggtcatcggcggcgcgctgctgaagtaaggaggacagacgtaatgaaagcaatcgtttgtgtcaaacaggttcccgatacgcagggcaaggtcgctgtcaaggctgacggcaccatggatcgctctgccatggctaccatcaccaaccccgacgacctgaacgccgtcgaggccgccctgcagctgaaggacgagaccggctgcgaggtcgtcgtcgtcaccatgggcccgccgccggcagagggtatgctgcgtgagctgatggcccgcggcgctgaccgcggcgtgctggtctccggccgcgagttcggcggttccgataccttcgctacctcccagatcctggccgctgccgtcaacaagatcggcgtcggccccgaggacatcgttttctgtggccgtcaggccatcgacggtgataccgctcaggtcggcccccagatcgccgagaagctgcatctgccccaggtcacctatgtcaccgacattcagaaggacggcaacagcctgaccgtcaagcgtcagctcgaggacggctacatggagctgaaggtccagactccctgcctgctgacctgcatcaaggagctgaacaccccgcgttacatgagcgtttccggtatcttcgagtgctacgacaagccgcttgaggtctttgattacaacgctctgaaggacgatccgctcatcgagaccgacaccatcggtctgaagggctccccgacgaacgtttacaagtcctttgctcctccggtcaagggcgccggcatgaaggtcgaggacgctgcccagctggtcggcatcctgaacgacaagcacctgatttgaggaaggagaaacgaacaatggctgaattcaatgcaatggacaccgccgccttcaagggcgtgtgggtattctgcgagcagcgcgagggcgagatccagtccatcagctatcagctgctgagcgagggccgcaagctggccaatgacctgggcgttgagctggcaggcgttgtcatgggcagcggcctggccgaggctgacctcaagacgctgggcggctacggcgctgaccgcgtttacaacatcgacagccccctgctgaaggactacaccaccgatggctatgccaaggcgctgtgcgacctcatcatggacaagaagcccgagatcatgctgatcggtgcgaccaacctgggccgcgacctcggcccccgctgcgcagcccgtctgcacaccggtctgaccgccgactgcacccatctggacgtcgatgtcgagaagtacaagaacttcctgcgcaccacctccaacattgatgtggacaacaccaagtttgaggagaacaccaacctgaagatgacccgccctgctttcggcggccacctgatggctaccatcatctgcccgcgcttccgcccgcagatgtccaccgtccgccccggcgtcatgcagatgcaggcgttcgaccaggccggtgctgacaaggtcgtcgtcgagaacgtcactcccgctctgaccgcggacgacatccatgttcaggtgctcgacatcaagaagagcgccgagaagctcgttgacctgatcggtgccgacgttgtcgtcgccgtgggccgcggcatctccgctgaccccgagaagggcatcaagctggctgaggagctggctgaggctctgggcggtgttgtcggtgcttcccgcgccgtcaccgatgagggctggctgtctgccgaccatcaggtcggtcagaccggcaagaccgtgcatccccgcatctacgttgcactgggcatctccggtgccatccagcacgttgccggtatgcaggattccgagaacatcatcgccatcaacaagaacgagaacgcccccatcttcgatgtttccacctacggcatcgtcggcgatctgtacaaggtcgttcccgagctcatcaaggagatcaaggccgccaaggcttgattccgcccgtaatcaacaagagccgtgccccgcaaagggcacggctctttgttttttgtatcgctcagtctgccacagccggggcggacagcagctccgggggcagctcactctcgtcctcattgacgagggaatcatcgacatcaaatgtcgcaccaaaggcctttgcggcagcatccgccaacagatcggcatcgaccagctcactgtctgccatgacatacagcagcttatcatcaaagctgaccacgcgggccttatctgcctccacgcagacccacttgcgcatactgatgttttcctccatcgaatcggcgatctcgcgggcatcggccttgtccttgaggcgcagcagcaccaggctgtacgcctggcttccggtcatcggctcgctgactactgcggcatccaccttgtccacattgtccgcggtcagccccgccagatagccgtaccagctctcgtcggtcaggtcgatggccaccgtctccatgcccatcaggtcaaccggctggacgttataaatagcatccaccatctcgctcagctccgcgtccggctgcggctcggcggtctcaccggtatcctcgtcgtcaacgctgaattccgggtccagctccgcgccttcctcgggtcttgtggcaggctggttcgcaagatcgttgctgtcagccttttggctgccgcaggcagacaggaacagggcggtcaacagggctgttgcaaaaagcagctttttcatcgtaaaattcctttctcggtcagaatattctcgggcgcaaagcgtgcgtcccagtcgtcgcagggcagctcgtccagcagcagggcctcggggcagagcagcagccccgctcccttatagtgtgccagaaatcggtcataatacccaccgccgcgccccagccggaccccgtcgcggctggcggccaggcaggggacaagggccagcgctgcggcgtatcccgccgggtcggcggcgggcaggtcggcgggcggttcctgaatgccgaacgccccgggccgcagcaggcgcaatgccggtatctccacccagtccatctcggttttgctccgcacgcggggcagcagcaggcgcttgccgtcggccagtgcgcgtcttagtattttcgccgtgtccggctcatccggcatggccgcaaaggccagcactgccccggcactctgccattgcggcaggctgaacagcgcctgcgccataccgcggcccacagccgccatatccagttccgcgcgccgggccttggcccatgcgcgggcttcgcgttttgtcattctgcacaccaccttccgggctatcataccatatctgcccttcacttaacaagacggaaaagccgtcctgttgttacagcagcgacaaaatttttccgccatcttgcccggcgcagtgaaatagagtataatatatcctgtatcgctatgtattagacttatgaaatataaaaaggagattccaaaccatgagcaagttcaatttcatcaagaccgatattcctgacgtgcagatcatcgagccgactgtttttggcgatgaccgcggctatttcatggagacctaccagatcgacgagttcgccgcagcgggcatcgacaaacccttcgtgcaggataaccagagccgctccaccaagggcgtgctgcgcggcctgcacttccagaccaagcacacccagggcaagctcgtccgcgtgaccctgggcgaggtgttcgatgtcgccgtcgactgccgccccaacagcaagaccttcggcaagtgggtgggcgcaacgctgtccgccgacaacaagaagatgctctggatccccgagggcttcgcccacggctttgtcgtgctgtccgatgtggccgagttctgctacaaatgcaccgatgtctacgatcccacagccgagggcggcatcccctatgacgacccgaccgtcaacgtccagtggccggactgcggctgcgagcacaagaccagcgccaaggacaaggagcacacccccttcgccgaccagaagttcgattatttcgagaagtactgaactatccgtattgggtacggtgtactttttattagaatatgtttaaattataaattttctttatgctaattgtacaaaatattttcacgcttgttccctctactttttcttcttaaatttattaaagaaatatatttcaatagacatcaatcatttgaccaatcgttattgagcttttcccattcactattaaaagcaacgagaacattattttgatcttgcagataaaatgcccgccaattatttttttctttttatagtatataacattcaacccgatctttttaatacacacggaaggaacatctagcatgagctttacacatatagactgctttagtggccccggtggtatctgtacaggattatgtgcagccggatttgataccatcgtcgctattgagtatatcaaaagttgtgtcgacacatactctgccaatcatccatctgtccatatgatccattctgatatcagagcggttactcctgatgacatcctcccttatgttccatctgacggtgtagatctcgtcacatccggaatgccgtgcgaaactttttcgactgctgggaatacttcccgttcattttatgatgaccgacagtttttatttagagagggcattagaattgcaaaaatcgccagagcaaagcttcttttgttcgagaatgttcccggtataacaacaaagacggttgaaaagaaatcaaacgccttgattgtggatttgctaaagaaagaacttatagaagctggatatggcaactatatcgaagtcgtccttagtgcagacaaatttggcgttcctcagcgcagaaatcgtttttttatcttggcaagcagtaatcctgatatcaaattaagttatccaattcctaaaaaatgtaaaatgaccactgtaaaagatgccttcgccgggttgccaaatgtgatcccgaatagcggtaaagaagaaaagcagtacactggtacagaatctgattattcccttttgctgaaaaatgattctttttggaaaagagtttccaaaagcaacaacttaacttaccaaatgcctatgaaacatagaaagtatactttggaaagatttgcgctactacgtcccggcgagagtctaaaggatctatttgaacgatatgagggcaaagaacgcgagtctcttcaagcacagcgtatacttcccaaaaaaatgtttatcaagcgtaattatcgtctcgtcgaagacgaacccgctcccaccgttactagccattgtctggatgaatttgtccatcctaagtataatagagctttgactgtaagggaatgtgctcgtttgcagtcatttcctgactcatacgatttctgtggtgggccttatataattccccatataaatcgagaagttcaagataagtatgagcaaataggtgatgccgttccacccttgctcgcatacgcttggggtaaagaaatagataaaattttaagaggtgtaagcaatgcctgaaactcctaattataaagatttctgtagagaagtatatttacagacttatgaatcaacctatccaattgaacttagagacggtgtttccgctgcagcccaacaggctgctcgcctcagtgcgcaaaggaaagctattgatcgagccttagtagagggacttttgcatttttctccagaagtatcggaaagagaaatctgggaggctataggtataacgcataaaatcaatgttgcaaatcttagtgactttaatatagccgagcaagatcaagaacctgtaataaataaaagtatatctgcacatcaaagttggattaaatcaagcggccactcttttgaacgttatatctctaatattgatagcgcagatttacagcataatgaggttagattcattttgcaatccgatttaaccaaaatgattaaagaaaatcgtttagctaacaccgccgaagacatcgccggcttgcgttcttggggaaaagattttgacttgtatgccattcaggcggttcatggagagacacacgtttttggctgcattcaatctaaaaccagcataagggatcgtgttggacgagacgtcaccttttcacgaaatgcaatggaggggttattttggtctgctgcggttacattagatggtgcctttcttaatatgcctgaatttattcacatggttaatggcggcgggtcatattcttcaaatggctggcacgggatgtatgcaatgtctggcattcaagaatcaaatggtcgcatatataaagtagatgattctcttaacttatttgttgctcacgctatttctgctgctcgtcagtttatttctgaccgaagaatgctaaatcatgaatggaatgcttaacggccttaatggtaggtcggctagatatactacgtctccacgtgatttcagtaatctgtaccaagcaatatacctaaaattgtttaaattccaactcaaccataaggatacatcatggagaacctgaaaaacaccttcgcgggtttctggaaataccgctacctgctgcaaaacctgatttcccgtgatttcaaactgaaataccgccgcagcgtgctgggcgtggcgtggagcgtgctgaacccgctgttgacctgtctggtcatgtgggccgtgttcggcgcactgttcaaccagcgcggtcagggcatcgaggactttccgctgttccttatcatcggccagctgatgttcaacttcttccgcgagagcacgaccatggccatggagagcgtgctgaagaacggcccgctgctgcgcaaggtctatattcccaaatacatcttcccgctggaaaagtgctgctttgcgctcgtcaacttctttttcagcctcgtggcgctgtttatcgtcgcgctgctgacctggtcacacatctcgatcgggactgtgctgctagccatttatccccttgtgatgctgtttattttcagtctgggcatcgggctgattttgtccacgctctacgtttttgtgcgtgacatcatgcatatctgggaggtcttttgcacactgcttgtctacggcagcgccatcttctacgacccgcgccagatggaaagctggatgcagtacgtcatcaacctgaaccccatctactggtacatcaccgccgtgcgttcctgcgtcatgtggggcgaggggctgacccccaacatggtgctgattccgttcctctgcgccgcgctgagcctgggcctcggcatctgggtgttcaaaaagaatcaggacaagttcgtcctgtacatgtaagggggcatcgaaatggcagagcagaaacccatcatctccatcgaccatgtttcgatgcgcttcaacctctccaaggaaaagcacgaaagcctgaaagagtacttcgtcgcgctgctgcacggcggtgtgcggtttgacgagttcttcgcactggacgatgtatcgtttgatattatgcccggcgatttctacggtctcatcggcctgaacggcagcggcaagtctacgctgctgaaagtgatttccggcgtctacaagcccagcgctggcaaggtcacggtcaacggtacgattgcgccgctgatcgaattgggcgcaggctttgacatggacctgaccgcacgggaaaacatttatttaaacggcaccgtgctgggctacacacccaagtacatcgactcaaagttcgacgacatcgtcgaattcagcgaattgcaggagtttctcgacgtgccgctgaaaaactactcctccggcatggtcgcgcgtctggcgttcgccgtggcaacgataacgaagcccgacatcctgattgccgacgagatcctgtccgtcggtgacttcctgtttcaggagaagtgtgaaaagcgcatggccgagctgctgtccggcggcacgacggtcattctggtcagccactccattgaccagatcgagcgtatgtgcaacaaggtagcctggctcgaccacggccatctgcgccgcatcggcgcgacgaaggaaattaccgccgagtaccgaaggttcgagaaaaaggacgccatgccggccaaagtcaccgaggaataagctatgtccgagaacacgaaaccgaacaacgagcgccccgccgatctggccgtacaggacagtgtcggcggcatggcgcggcggcttttgaatcccgcccacctgcgggacctcgcgggacgcagcgtcaagaccctgcgggagcagggggtcgagcagctctggcgcgatgtgaaattccgcgtcgggctggcgatgcaccacgacgactggcggcaccgcgccgacattccgctgcgccgggagctgaaggcccagcgcgccgcgcacctgcaggggccgaagatcagcatcatcgtgccgctgtacaacacgcccgccaagctgtttgacgagatgctgcaaagcgtcgtcaggcagacctacacaaactgggaattggtgctggtggacgcatccgacgccgacaagcggctggagcgccgtctgcccaaggctgtgcccggcacgattgtgtatgagccgattgaaaacggcggcattgccctcaacacgacccgcggatttgcgctggcgcacggcgagtacatcacgctgctggaccacgacgacgtgctctacccgaacgcgctgtttgaggttgtgcagacgatacaaaacaccggagcggattttgtctatagtgatgaaatcgttctctccgccgatttgaaggagctgggcggctaccacttcaagcccgactttgcgcccgactacctgcgtggggtcaactttatcacgcatctggcggtgttcagccgtccgctgctggacgcggcgggcgcgtatgagtcgaaggagtttgacggtgcgcaggaccatgatttgatcctgcgcctgacagaaaaagcacagcgcatcgagcatatcaagaaggtgctctacatctggcgtgccgcggccggctccaccgccgcgggcatggaggccaagccctacgccgtcgcggcgggggagcgcgccatcgacgcgcagctcaagcgtctcggtctgccgggccacgccatggccgtgcccgacgcgcccggcgcatttcaggtgcggtacgagctgaccggccacccgaagatcagcgtactgatccccagtaaagaccacattgacgacctggaccgctgcctgacgagcctgtacaaaaacgcgggctacgacaattttgaggtcatcgtcatcgagaacaactccaccgacccggcaacgtttgcctattacgaaacgctgcccagccgctttgccgactgccgcgtcgtctactacaagggcgcgttcaacttctcggccatcaacaacttcggcgcgacgttcgccgagggcgagcacctgctgctgctcaacaacgacattgaggtgttgtcgtcggacttcctgcgcgagctgctcagctacagccagcggcccgacgtaggcgcggtgggcgccaagctctactaccccgacgacacgatccagcacgcgggcgtgctgatgggcatcaacggcagcgcgggccacagccataagagctacccccgcaccgctgtgggggacatgtaccgcttggtcacgacgcagaattatatggccgtgacgggtgcctgcctgatgacaaaagcgtcgctctaccgcgcatttggcgggctggacgaggaaaagtttgccgtcgcctacaacgatgtggattattgcttaaagctgtggcagaaggggctgttgaacgtttacaccccgcgcgccgaggcctaccattatgagagcaagagccgcggccttgataccttaagcgagaacgccaagcggtatgagcgcgaaaaggcgaatttctacgcgaaatatcagcagtatatcgacaattacgacccctattacaacccccatttcaacaacctgtttgagaatttcggattgaagtgatggaaaccgtattgccgaagcgcaaatctcaccatttgcagggttacgattacagccaaaatggcgcctattttatcacaatatgcacgcaccaacgcagaatgttgtttggcccgaaccgggctcccgtaggggcggattccatatccgcccgcatggcggtgcgcgttttccgagagatcatcggccaatatccggcggtccagtgccgttattttgtggtgatgcccaatcattttcacgcgttggtcgagattgaacgggcacgggcggatatggaatccgcccctacgattatcagcatcgtgcaggcgttcaaacggtattctaccgtcgagtacatccgtcttgtcaagcgcgggcaagccgcaccgttcgataagcacctttggcagcgttcctttcacgaccacgtcatccgcaatgaaaccgattaccgcatgattgcggaatacattcaatccaacccccgcctttggcacaaagactgcttttatgaggagccatcccatgagccttgaaacgaaacgcatcaaagaactgttcggctatgcgcggacgctgacgaaagaacagggcgtcggcgtcatggccgggcgggccgtcggcttttttaagcggcggttcttcggcaaaaaggcgcggtatctgccgtcgaagcatacgctggagacccagcgcaccgacgctgccgcccgcgccgacggctggccgaccatcagcattctaacgccgctgtacaacacgccgccgcagtttttgcagcaatttttggacagcgtgcaggcccagaccgcgccaaactggcagctggttctggtggacgccagcgacggtgcccaccccgacgtgggcgagacagtccgcacccgcgccgcgcaggacaagcgcatcgtctacgccaaaatcgagaacaagggcattgccgccaatacgaacgaggccgcgaagctcgcagcgggtgagtatctggcccttgccgaccacgacgacatgctcgcgcctcatgccgtctattgcatgagcaaagcgctggccgaaagcggcgcggcgtttgcctacagcgacgaggccctgtttgagaaaacgcccgagcacccgcgcgtcggccacttcaagcccgactatgcgcccgagtacctgatggccgtcaactacatctgccatctggccgtgttcaaaaaatcgctgttcgacgccgtcggcggtgagcgcccggcctgtgacggcgcgcaggatcacgacttattcctgcgtctcatcgacgaaatgcagcgccgtgaccccgcagccaagccactgcacatcccgcaggtgctgtattactggcgcgtgcacgcggcgtccaccagcggcggcacggcggccaagccctatgtggaaaaggctgcgcaaaaggccgtggccgaccatctggccgccacagggcggcagggcagggtggagccgggcaaattcccgggcacctgccatgtggtgtgggacattcccgagccgcagccgctcgtgtcaattttgattcccaacaaggaccacaccgacgatttggaaaaatgcctgcacagcatctacgccaaaacgacctacgagaatttcgaggtcatcgtcattgagaacaattccaccgacccggccacagcggcctactacaaaaaactgccggagcggtatgaccgcgcgcgggtcgtgacttacaaaggcggcttcaacttcagccgcatcaacaattttggccgtaggtacgcggcgggcaagtacctgctgctgctcaacaatgacgtcgaggtcatcaacggcgactggctcacccagatggtgggcgagtgcagccagcccggcgtcggcctctgcggggcaatgctctactatcccgacgacacgatccagcacgccggcatcatcacggggctgggcggctacgccgggcacagccacaagtaccacaagcgcggcggcagcgggtatatgttccggctggccacggtgcaggatttctccgccgtgacagcggcctgcctgctggtgcgcaccgccgtttacgacgagctgcacggcctggatgaggagttcacggttgcctacaacgatgtggacttctgcctgcgcgtgcgcgacgcgggctggcgcattgtctggacgccctacgccgagctctaccactacgaaagcaagtcccgcggctccgatgagaacgatcccgccaaaaaagcacgctttgacgccgagcatgaacgtctctacgccgtgcacgggcgggagaatattctgcacgacccctattacagcccgtcgctgtcgctggattatgaggatttccgcgagagcggggatttgcggaatctgaaatgagttgattgccttcccccgtgggggaaggtgcccgaggccccgaccgagggcggatgaggggcgggtttgccctattgcccgtcagtgggaaattcccggtaagtttgcccctcatcagtcagcgggcggggccgctgacagctttccccctctggggaagccatactgacaaaaaatgcacgccgtaaatttcacggcgtgcgtttttattattcctttttatccggcgggaactcaccctgcttttcggcttccaggcggctcaggcgggcttcgagctcggagatgcgctggttgacaatatccggcagatcctgctgatccagatcgtccgccgggcagcacttgatattgccgacgcggacgatctccgcgggtacaccgacggcagtggcgttggcgggcaggttcttcagcacaacgctgcccgcgccgacgcggacgttgtcaccgatgtagaccgggcccagcaccttcgcgcccgcgccgatcagcacattgtcgcccagcgtcggatggcgcttgccggtgtccttgccggtaccgcccagggtgacgccgtggtagatcgtgcagttgtcgccgatctccgtcgtctcaccaaagacgatgcccataccgtggtcgataaagagcttgcgcccgatcttggcgccgggatggatctcgatgccggtcaggtggcgcgccagctggctgacaaaacgggccaggaagaaacaccggtggttgtacagaaaatgtgcgatcttgtgcgtgaccagcacatgaaagccggggtacaggatgatgacctccgccacattgcgcgcagcggggtccttatcgcggatattttttgcatcttcccaaaggcccatagttcgttcctcttcctatttaccatacttattataaatataccacaaagccggacaaagtgcaatgctgtacgcgccgcgcgcggatttttgcggattttgtcaaatcctccaaaagtcagcgcaaaaatctataaaatccttacttttgcaaaaagcccgtttgcattgacaccgccgcccctgcatggtacaataagtaaaacgtaggtaaagccataggaaggagtgtgccgggatgatgcgttttatttctgtctttaaaaatcacggcgcagtgttctttcccgttgctgctttgtgtgtgactttttgacttttcccttttgggaaaagtttttttttgcaaaaatatccctgcgggatgtttttgcatggggctttgtaggggcgagcattgctcgcccgcaggccgtttgcctcatgcgcggctttcccgcagaagctcaaccacgcaaagttgacgggcgaacaatgttcgcccctacactctcagctatgacaaagtttcctatttttaaggaggttcccaccatgctgatccgcaacgcaaaggacagcgcgggcaaggccattgaggtctggctgcgcgacggaaaaattgccgctgtcggtctggggctgctcgtcccggaaggggaggaggtgctcgacgcgaagggccgcacggtcctgcccgccttcatcgacacccactgccactggcgtacccccggctttgagtacaaggaggacatctccaccggctccgccgcggctgccgcgggcgggtacaccttcgtcaacctgatgcccaacacgaagccggtctgctccagtgccgagatcgcccacgccgttgaggccgaggccgcccgcgtcggcctgtgcgacgcaaaccagaccgtctccatcacgaaggatttcgacggcaaaacgctggatcatctgctgaccctgcccgaggacatcaagttcatcaccgaggacggcaacggcgtcatgaacaacgccgtcatggcccgcgcgttcgcgattgccaccgagcgcggcctgaccatcatgtcccacgccgaggaccgcgagatcagcccctgggactaccgcctggccgagaacatcgagaccgtgcgcaactgccatctggccgagtactacggcacccggctgcacatgtgccacgtctccaccagggaatccgtcgatgccgtccgcatgagccggatgcgcggtgcgcgggtcagctgcgaggtcacgccgcaccacctgtggtttgacgacagccgcctgacctaccgcgtcaacccgcccatccgcaaggcggacgacgtgaccgcgctgatcgacgccatcaaggacggcaccgtgacctgcatcggcaccgaccacgccccccacaccgccgaggagaaggagaagggcgctgccggtatggtgggtctggaaacggccttcggcgtctgctacaccaagctctgccgtgagcagcgtctgccgctggaaatgctcagcttcctgatgagcgccggccccgccgccgtgctgggcctggccgaccgcaagggcatgctggagccgggctacgacgccgacatcgtgctggttgaccttgaccacatgtacgaggttcacgccgacgagctgcacagcaagagcaagaactgcccctacgacggtgcactgctgtacggaaaagtggtaaccacgatcaaaggcgggaaggttacgttccagattgaagaataacaccccttcacgcacaaaacacccgtaggggcacactctatatgcgcccgtgcaggctgccgctggcacagtcctgcgggcggatatggaatccgcccctacgattcccaacattatataatagataatagagccgcaatttatatacatcaaacggaggaatcagcatgcttaccaacatggacaagctctacgagagcgtcgcagcaaacggcccggtctgcgtgggcctggacaccgagatcagctacctgcccaccaccgacaccgccaagacggcgggggagaacgtcgtcgcgttcaaccgtgcgctgatcgacgccaccaagggcgtcgcgggctgctacaaggtgcagatcgcctattatgagtccctgggcctggacggcatgcgcgcctacgccgaaacgctgaagctggcccgcgccaccggcctgcccgtcattgccgacatcaagcgcggcgacattgccaagaccgctgaaatgtacgccaaggcgcactttaccggtgatttcgaggccgacatcatcacgctggccccctacatgggccttgactccatcagcccatatctgccgtactgcgccgagcagggcaagggcgtgttcgtgctctgccgcacctccaaccccggcgcgaaggactttgagtacaaaaagctcgacgatggccgccatgtgtacgacctcgtcggcgacagcctgaccgcccttggcaaggactacatgggcgagcacggctattccagcatcggtctggtcatcggcggcacccacaccgaggaggccaccgccatccgcgcggcctacaaggacaccttcttcctgatccccggctacggcgcacagggcggcaaggcggcggacatcgcgcagtacctgaccaagggcaacggcggcgttgtcaactccagccgcggcatcctgctggcttacaagaagcagcccggcgttgcctttgacgaggctgcctacaacgagtgcgtgcgtatgcgggaggatattcagggtgaatgcaacaagctgtaatctgacggtcctgcgccaggaaaccgtcgcagaggatattatgcgccttacggtccagtggcaggaccgcagccgcgagccccacgccgggcagttttacatgctgcgcgcctgggccgcggacgccacgccgattctttcccgccccatcagcgttgacgactttgacaaccagaccggcgcactgaccttcctgtatcaggtcaagggcgagggcacccacaagctggccgcgctgaaaaaggacgacacgctgaccgtgaccggcccctgcggcaacggctttgacactgccgcactggccgggcagtacaagcgcattgccgtggtcggcggcggcatcggcaccgcgccgctgctgctgctctgcaaggagctctgccgcgcgggcgtgcgccccgacctgttcgtgggcttccgcgacacgacctacggcatggaccgctttgtgccctggtgccgcgacatctacgccgcaaccgactccggcaaggagggacaccacggcctggtcaccgacctgctggacgtgagcaagtacgacattgtgctgacctgcggccccatggtcatgatgcgcggcgtggctaagctctgcgccgccgctggcgtgccctgcctggccagccttgaaaagaagatggcctgtggtctgggcgcgtgcctgggctgcacctgccatacgaaaatcggcccggtcaccgtctgcaaggacggcccggtctttaacgcacaggaggtgtttgactgatggcagacctgcatgttgattttctcggcaagcggctggccgggccggtcatcgcggccagcggcaccttcggcttcggccccgagtacgcgggcattgaggatttgcgcgtgctgggcggcatctccggcaaggggctcaccctgaacggccagcccggcaacgagggtgagcgcctctacgagacgccgtcgggcctgatgaactccatcggcctgcagaaccccggtgtgcagcactttatcgaccacgagctgcctgccatgcgccggtgcggcaccaccgtctgggcaaacctcggcggccacacgattgaagaaaacgtcgagggcgtgcagatgctctgcgccgcgggcgtggattttattgagctcaacatcagctgccccaacgtcaagcagggcggtctcgcgttcggcatccgcgcggcagacgccggcgaggtcgtcagcgcggtgcgcaaggtctgcaccgtgccgctcatcgttaaattgagcccgcaggccgaaagcatccccgagatgtgcaaggccgttgaggctgccggcgcggacgccatcagcctgtgcaacaccttccaggcgtgcgcgatcgatctggaaaagcgccgtcccgtgttcaacaacacgtttgcgggcctgtccggcccggcggtgcgtcccatcgccctgcgcatggtctggcaggccgtgggggccgtcagcatccccgtcgtgggactgggcggcattttgacgggtaaggacgccttggagttcatcatggccggtgcagcggcggtacaggtcggcaccgcgaacttcctggacccgaaggcctgcacccgcatcacgaacgagatcggccagtggatggacgcccacggcgtcaagacgctggatgagatcagagggtgcgcacggtaaatcaccgactgccttcccctcagggggaaggtgcccgaggccccgcccgagggcggatgaggggagagtccccgcaaccgcccgttcacgggctataacggcaagcccggccctcatcagtcggcgggcgggccgccgacagcttcccccgcgggggaagccgccccaccatatacgttttgcttgcatttttatacaaaatatgctactataagttgaataacatacaggaggaacaaattatggcacgcgaagcacttgaagttttaaaggaatgtgaagcatttttagaggggcacttcctgctttcctccgggcgccactccggcgcttactgccagatggcatttctgcagcagtaccccgacaaggccgccgaggtcatggccccggttgccgagaagctcaaagagctgaacattgacgtcgtggtcggccctgccatgggcggcatcgtctacgcctacgagctgggccgccagatgggcaagcgcgccatcttcaccgagcgcgtcgacaacgtcatgaccctcaagcgcttcaggatcaacccgggtgagcgctgcatcatcgccgaggacgtcgtcaccaccggtgtttccagcctcgagaccaagcgcgtcatcgaggaaaacggcggcatctgcgtgggcattgcctgcgtcgtggaccgcacccgtgccgaggccccgtccccgattcccatcgtcgccagcgccctcaagctcgacctgcccaactacgcccccgaggaatgccccatctgcaaggagggcaagctcccgctggtgcacctgggcagccgcaaaatgaaggaagctgcgaagcaaaccctgtaaaagataggagataggagatgggtacagtttgccttttctcctctctcctcactccatatcttaaatgtaaagtgagaggctaccaactatgcaggcatatctgatattggccaatggccgggtgttccgcggcgtcagcgtaggctgccccggtaccaccatcggtgaggtcgtctttgcaaccggtatggtcggctttgaggaaaccctgaccgaccccagctactacggccagatcatcacccagacctatccgctcatcggcaactacggcatgaacagtgaggatgtcgagagcacgaagatttgggccaggggctacattgtgcgcgaggcgtgcaagaccccgtccaacttccgcagtgaggaaacgctggatgccttcctgaaaaagaacggcatcatcggcattgagggcatcgacacccgcagcctgacccgcaccctgcgggagagcggcgttatgaacggcgcgatcaccaccgagttcgaccccgacgccgagcccgagaagaaggctgcgctgctgcccgagatcgccgcctacgccgttgtcgacgccgtcaagaccgtcacctgccgcgaggccgtgacctatgagccgacggctgccggtgcatggggtgacacgccgctgcacgtggcgctgctcgacctgggctgcaagaacaacattgtgcgctgcctgcagaagcgcggctgccgcgtgaccgtgctgcccggcacgacgaccgctgccgagttggccgcgctcaatcccgacggcctcatgctctccaacggccccggcgacccggccgagaacgtcgagatcatcgcgaacatccgcgaaatgctctccaccggcatcccgaccttcggcatctgcctcggccaccagctgaccgcgctggccgcaggcgcaaagacctgcaagctgaaatacggccaccgcggcgcgaaccagcccgtcagccacatcagcaagagccgtaccttcatcacgagccagaaccacggctacgccgtgatggcggacaccctgcccgaatccgtcggccagatgagctacttcaacgccaacgacggcacctgtgagggcgtcgactacttgaaatggaactgcttcaccgtgcagttccaccccgaggccaacggcggccccaaggacaccgaatttctgtttgaccagttcgtcagccgtatgctggccgcgaaaggagtaatcaacaatgcctaaagacccgcgtatcaaaaaggtactggtcatcggctccggccccatcatcatcggtcaggcggcagagtttgactactccggcacgcaggcctgccgtgcgctgaaatccgagggcgtcgagaccgtcctcgtcaactccaaccccgccaccatcatgaccgaccccgacattgccgatcatgtttacattgagccgctgaccgccgaggtaatcgagcgcatcatcgagaaggagaagcccgacgccatcctgccgaacctgggcggccagatgggcctgaacctgtcgatggagctggcccgcaacggatttttggaccgcagcggcgtccgcctgctggcctgcaagcccgacacgattgaccgcgccgaggaccgccagctgttcaaggacacgatggaaaagctgcaccagcccatcatcccttctaaggttgtggaagatctggacgacgcgctggactttgccgaggtcatcggctaccccgtcatcgtccgccccgccttcacgatgggcggcaccggcggcggcatctgcgaggaccgcgagaagctgcacgaaattgccacgaatggtctgcgcctgtccccgatccatcagatcctcgttgagaagtgcatttccggctggaaggaaatcgagtacgaggtcatgcgtgactccaagggcaacgtcatcacggtctgcaacatggagaaccttgaccccgtcggcatccacaccggcgactccatcgtcgttgcgcccagccagaccctgtccgataaagagtaccagatgctccgcaccgccgcgctggacatcatcaccgagctgggcatcgagggcggctgcaactgccagtttgccctgaagcccgacagctttgagtacgcggtcattgaggtcaacccccgtgtgtcccgttcctccgcgctggcctccaaggcgacgggctacccgattgccaaggtcgcgaccaagatcgcgctcggctacacgctggacgagatcacgaacgatgtcacgggcgagacctgcgcctgctttgagccggccctcgactatgtcgtcgtcaaatacccgaagtggccgttcgataagttcgtctacgccgacaagtctctgggcacccagatgatggccaccggcgaggtcatggccatcggcaacaactttgagcacgccatgatgaaggccgtttcctccaccgagctcggcctggacacgatgacgctgcccgatttcgagaagctgacgacggaagaagtcatcgagcacctgcatgtgcaggactccgagcgtgcgttctgcgtctacgaggccctcaagcgcggcgtggcgcacgacgtcatttatgacatcaccaagatcgactggtggttccttgacaagctgcagcatctggccgacattgagatgggcctgaaaaacggcgagctgacgacggaaaagtacctgaatgccaagaggttcggtttcctcgacaaaacgatcaagcgtctggcgggcgtggacaccctgcccgaggccccgaaggccgcgttcaagatggtcgatacctgcgccgcagaatttgccgccaagacgccgtatttctactccacctacgacgaggacaacgaagcgaagccgttcattgccgagcgcagcgaccccgacaagaagaaggtccttgttttcggctccggccccatccgcatcggtcagggcattgagtttgactattgctcggtccacgcggtctggacgctgaagcagcacggctgcgaggccatccttgtcaacaacaaccccgagacggtctccaccgactttgacaccggcgaccgcctgtactttgacccgctgaaccccgaaagcgtcgaccacatcatcgagaccgaaaaaccggacggctgccttgtgcagttcggcggccagaccgccatcaagctggccaagcacatggacgacatcggcctgccgattttgggcacgcccgccgacgccatcgacgaggccgaggaccgcgagcgctttgacgagctgctggagcgctgcggcatcccccgcccggagggccgcaccgtctttacgctggacgaggccctgcaggccgcgcaggaggtcggctatcccgtcctgatgcgcccgtcctacgttctgggcggccagaacatgattgtcgcctacaactccgccgatgtcatcgagtacatgggcgttatcacgaagcacgttgacatgagccatcccgtgctgatggacaagtatattctgggtaccgagtgcgaggttgacgccatctgcgacggcagcgattatctggtgcccggcatcatgcagcaggtcgagcgcacgggcgtgcactccggcgactccatctgcgtctacccgccgtacaccttcagccagaaggtcattgacacgctggtcgattacacgggccgctttgcccgcgagctgaaggtcgtgggcttggtcaacgtgcagtatgccgtccagaatgatcgtgtctacgtcattgaggtcaacccccgctcgtcccgtaccgtgccgtacatctccaaggtcaccggtgtgccgatggtcgacctggccgtgcgctgcacgctgggcgagaagctcaaggacatgggctacggcaccggcctgtggcgcaacggcaagagcccctactacgccgtcaaggtgcccgtctacagcttcctgaagctgcacggtgttgacacgatgctcggccccgagatgaagtccaccggtgaggtcctgggcattgcgccctccttccacgaggccatgatgaagggcctggtcgcggctggctaccagttcaagacgcccggccccggctcctgcgtcatcatctcggtcaaggacagcgacaaggctgaggccgccgagcttgcctggaagctgcacgactacggctacaagatctacggcacgcccggcaccgccaggttcctgaacagcgagatggtgccctgcagcgttgtgcgccagatgagcggcgcgcgccccaacgtcatcgacctgctggagagcggtctggtggattacatcatctcgacgagtccgcatggccgcgacccgcaccgtgactccgtcaagttccgccgcaaggcaacggagctgtccatcccgaccatcacggccatggacactgcccgcgtcctcgtcgacgccctgcgcggtgaccatgacatcagccagatggagctggtggacattgcgaacctgcaccgcgaagcggcgaaaggggaataagtaagcagcaaacaaaccgcgtccgcaaggatgcggtttgtgttttttcttggccccttctgcgagtgggctccgcccgcaggcggtgggggagagaaccttttccccggtgactacgactacatcaggcagggccgcgggcacaacgtctgcctagccgtcagccgcgacggcgcagggcaggccgtggacgtctgctttgacctgactgccgccccggcgggcgacttctcgctggcctttgacggcgggctgacgctggcttatgccgatgcggaccgcacctgctacctgaccttcaccgacgacgccatgtccggggccgcaccagccgatacgtcaagctggatgcgtcctgccgccgcccgcatagagctgtaagactttgcccgtcaagaatatttttgcgtggaacgtgcattttttgccaaatgtcactttttaacgagatgaacgtgaaaattttatagtttttgccgaaaaacgtttgatttccgaaaaaactcttgattctgcgcacaattttctctataataatagcgtaataataccgggcaattgtgtgcctataagaataggagttaaaaatatcatgacgagatctcagttgattaccaaggttgccaacgacaccaacatgaccgctgctgaagttgagaaggttatggacggcatcttcggcaccatcggcgatgtcctcaagagcggcgacaaggtcaccatcgcaggctttggccgcttcgagatgcgtgagcgccagaccaagaacttcaccaaccccaagaccaaggtcaccagcaagctggagccgacggccatccccggcttcaaggccagcggccgcctgaaggagaaggtctccggctgatttcgtctgtattgatatgatttggaaggacccgcggaaatgcgggccctttttgcgtctaagcctcccttgtcaaagacaggctcccccgctccgggggagatggcgcgtagcgccagaaggggatctggtggcccgcagggccggagggattccgacgggcttcccgggtaacctcaacacccccgcggcggcatgagggcatgccgccctacatctgtccgcggagtatacgtagggtggggtgccctcaccccgccgggtcgtgtgcggccaccgcaagcctcccgggtcgtcgaggacgccgacccctacagcagcaaaaaacggagcgccgcattttcatacggtgctccgtttttattttttcaaaattacagatgaatatgccgcggcacgccgttgatgtagatcggcgacagctcagcctggataagcgggcgggcgtagcgctcgaacttctcgttgacgtgcatcccgtcctcggtgatccagtcggcggggaccttcttctcaaagttcgcgaccttcgtcacatcgaccatctcggtctctacgcggtagggctggtcgctcaggcgcttgatggcggccatcttggcggtctcgccgcgcatggcggcctccaccgccgcgccgccgacctggtaggcctcggtcacgtcggtgcggctggccagatggctggcacagcgctgcagcgtagaaaactcgatagcgcgggtcttgcagcccagtcggacgcggatcaggtccgccagatagcggctcgtgccgctcaggatggccttgtggccgaaggcatccaactgacctgccgtggagaccaagtcgcacaggaaaacgccgtccttgttcttgacgccctcgctgaccgcgataataacattgtggcgctctttttccagctcggccacgcgcttgaggaacgcctcctcgtcaaaggggcactcgggcagcaggatcaggtctgggccgttgcagtccggaccggcagccaaactggcggcagcagccagccagccggtgtggcggcccatgatctcggccaccgtcacgctgcgcaggtcgtagacgctggaatcgcagatgacctccttcaagatcgtggcgatgtacttcgccgcgctgccgtagccgggggtgtggtcggtcagcatcaggtcattgtcaatggtcttgggcacgccgataaagcggatttcgctgttgacggtcttgccgtaggcgctcagcttggagatcgtgtccatcgagtcgttgccgccgatgtaaaacaccgcgccgatgtcgttctgccggaacagctcaaacagctgcacaaacggcttctcgtcaacggtggggtcgggcagcttgtggcggcagctgcccagaaagctggacggcgtgcgcttgagcagctcaatgtccatcttgtcgcccagcacggtgtccagatcgatgagcttgccctcaagcacgccctcgatgccgtactgcatcccgtagacatggggtgcgccgcaagccttggcggtctcatagacgcccgccagactggagttgatgacggcagtcgggccgcccgactgaccaaccagaacatttttcataaatttacctctcgtatattttattttgattttacaatacgtatttttctatagtcgctgccacaccgtcatgattgttgtcatccgtcgtgacatcggcaattttcctgatgtcgtcggtggcgttgcccatggccacccccagacccgccgcttcgatcattgcgcggtcattgccggagtcgcccacggccatcgtctgcgcgcgggtcaggcccaggtgtgccgccagcgccagcagaccgctgcccttcgtcacaccgggggcgttgacctccatgttgcggggcaggctggacgtcaactccacgccggggcaggcggcctcgatggcacgccaagcggcgtcgcgctcggcctcgtcgtggtagatcatgctgtacttttcgatctcgtgcgcgtgggtgcgcagcgtcgcgtgcatgtcgtctacctcaatgcgggtcgtgcggaagtagcttttcaggttttcgggcaccacgtccatgtggttctcggcgtttgcgcgggtcgtgtagcttttgccgccgatgaaaatgctcatcatgccgccgccctgctcaagaagatcgtaaattttcaatgcctgctcggtcctgaacggctggttcaccagctgctcgcccgttgtcaggtcaacgacgctggctccgttggaggtcagcgcgtaccgcacgccggggatggacgtgaacgccgcggggatgccgctggctgtacgcccggtggcgggcagcaccgccacgccgcgtgcacaggctgcgcggatagccgccagcgtgcgcggggtgatctcttttttatcgttgaaaactgtcccgtcgaggtccaacgccacaaggcggatgtccttcataccttcacactcccttatctgatttattgtaccgcaaaacccgcgcgattgcaagccgcgcgcgggtgtgctagaatagtgttacagtaaatctttgggaaagaggcggtaaaatgcccgtactgcgcaccaaaaccagccgtatgtggctgcccgacgccctgcgcgggctggcgctgctgaacatgctggcctaccatgccatgtacgactgggtgtatgtgttcggccacgaaagcagctggtacaacatctgggcccccggctgccatgtgtggcagcaatatatttgttggagctttattctgctgtcggggttcagcttcccgctggcaaagcggcctgcaaagaatgggctgatcgtggcgggctgcgcggctgtgctgacgtttgtgaccgcggtgttcatgccgtcggaggcgatctggttcggcgttctgcacctgaacgctgccgccgtgctgctgacatgcctggtctatccgcttttgcagcacctgcccgcgggcgcgggcctggcggcgtctgcggcgctgtttgcgctgacgaaccagctgcccgaagggtatttgggcttcgagaattggcggctctgtgcggtgcctgcggggctgtaccgggccaacctgttctggctgggcctgcccgacctgacaaggttcacgtcggcggattacttcccgatccttccgtgggtgttcctgttctggtgcggtgtgtttctggcacggctgtggcgccccggcaggggagagccgcccgccgcgctgcgtcctctgtgtgccatcgggcgcaatacgctgctggtctacatgctgcatcagcccgtaatctacggtgtactgtgggtgtggcacacggtgctggggtaaagggtcctaaatatgaacaatataaaaattttcattttagcgaaaattgttgttgacagacagggggtcaatatagtataatcttttttactggttaatagtatttgaccggcaaactcctgtctcaggtcaagggagggaagaagatgtcggagatccgtgtcaaagagggcgagtccctcgagagcgctctgcgccgttttaagcgcagcactgctcgcagcggcgtgttagctgaggtccgcaagcgcgaggcttatgagaagccttccgttaagcgcaagaagaagtccgaggctgcccgcaagcgcaagtttaagtaaggtatcttacaacgaacgactgtgcaggttcgcgttacgcgcgggcctgcacttttattttacgtgcaggcgtcggtgcggcggggtgagggcaccccgccctacgtcctgcggaattgtgcatcgtagggcggcatgccctcatgccgccgctggccgctgccgtaaccactcattacccttataaaggtcaccaccatgattctaacccctgaatacatcttcaaaaccatcgagtgcatccacccggattttctcgcggcacacggcatcaaagccctcgtgctcgacgtggataacaccctgaccgctgacaacagtcaggtgctggagcacaccgtgcaggcgtggctggacgagatgcgcgcagccggcatacgcctgaccatcgtgtccaacaatacggccaagcgcgtgcgcccctttgccgagcgcatcgggctggactgggtgccgctggcctgcaagccgttcaccatcggcctgcgggttgcgcgccgccgcctgggctgcaaaaagagcgaaatggccatggtcggcgaccagatctttgcggaccggatggccgccgggctgtacggctgcccgtgcctctacctgatgccccgcacgaaccacgacaagaacaaatttgtgctgttaaagcgcaagtttgagccgtactggatcgacaaatactatcagaagggcggcaagctgtatgaatgataccccgcgcttcggcacagccggtctggccgacagctacacagtcaaaaagtttgaccccgccgccatcgccgcctacacggcgggctttggcctgacggcatttgagtaccagtgcgggcgcggcgtgcggctggcccacgacaaggccgctgcgctcggtgccgcctgtgccgagcgggacattgccctgtccgtccacgcgccgtactacatcagtatgtcgagcctcgaggaggacaagcggctgcacagcatcgactacctgctgcaaagctgcgccctcgtcaaggcgctgggcgggcggcgcgtcatcttccattccggctcctgcggcaagcagagccgggaggaggcgctggaaaaggcgctggatacgatggcccgcgctgtcaaagcctgcgacgaggccgggtttgaggactgcatcctctgccccgagacgatgggcaaggtcaaccaactcggcacgctggacgaggtgctggctctatgcgaggtcgacccgcgcattacgccctgcatcgactttgggcacctgtacgcccgcagctgcggcgtgcagtttgccgacgccaccgccgccgcggactacgccgccctgctggacacgctggccgcgcggctgggggatgaccgcgccgtgcatttccacgcgcatttttcccgcattgcctacaccaagggcggcgagaagtgccatctgaccttcgcggatacagcgttcggcccgccccacgcaccgctgctggcgctgctcaaggagcgtcatttggccccgacgatcatctgtgaatccgccggaacccaggccgaggacgccgccgcgctggcccaggggtacgcagcgctgtaaattggacaaaaaatatcaattttcccgcaaaaaagtccgaacaggacttgcaaaattgcttttcatcctgtaaaatataaacaggtatgtataatttatttatggaggaatttctatatgatttctgcaggcgaattccgtaacggtgtcaccttcgagcaggacggccaggtccttcaggtcgttgagttccagcacgtcaagccgggcaagggcgctgccttcgtccgtaccaagaccaagaacgtcatcaccggctctgttgttgagaccagctacaacccgaccgccaagttcccgcaggctttcatcgagcgccgtgaggtcacctactcctacgaggatggcgatctgtaccacttcatggatgttgagacctacgacgacattcctgtcggcgcggctgacgtgcccgataacttcaagttctgcaaggagaacgacacctgcaagctgctgagctacaagggcaaggttttcagcgttgagatccccaacttcgttgagctggaggtcaccgctaccgagcctggtgtcaagggcaacaccgccaccaacaccctgaagcccgccaccgttgagaccggtgccgagatccgcgtccccctgttcatcaacgagggcgacaagatccgcatcgatacccgcaccggcgagtatatggagcgcgtgaactgattaggttctctttgccgggcatggccgtaccgccgcgcccggcattttttaacattagggaggattttgactatggctatggatctgaatgcaaaggccgcctacatccgcggcctgatgactggcatggattttgacgcagactccaagaacggcaaggtcattgccgccatgatggacctgctggaggagatggccgcccaggtcaccgagcacgacaacgccctggatcaggtgtacgacgagctggagaccctcgaccaggatctggacgacgtcgtcagcgacatctacgccgatgaggacgaggatgacgaggaggacgccgaggacgacagcaccatgtatgaggtgacctgcccgaactgcggccagatctccacgctggacgaggagaccctgatggaccccgagggcgatctggtctgcccgcactgcggcgcgaccttcgacatcgagcttgaaggcaccgaggacgactctgccgaggagaccgacaagcaggaccactaagcagtaaatctccgttctgtaggggcggatgcccgtcatccgcccgccccgttttaacatcaagtgcaaaagccccgcagccgtttggctgcggggctttgtgttttgtgtggggcaggggagacgcttacttcttccgcagcgcgccctgcagcatgatgtcgccgaaggacagcgcgttgtacaggccgactttgttggcctggcgggcaatgcgctctggcagggacttgctctcgtcggtggaaagcagcacgatgtggaccttgtcggccacgtcgacgccgttttccttcttggtcgagagcacctgcaggtagacaacgaacgggtccttcatcgagccgtagtaaatatcgttgccgcagcgcaccagcgggcggcccttataggtcagtttcggggtataagccatatctgaaaccttctttctctttagtcaatactttattatagcatagttttggggggaatacaaattttaattttgcgcacccccaagggggaagcctttttcacaggtccagcttatcccgctccgctttttcctcgttcagggcgacctgctcggtcaggatacggaccttgctgtcgagctggctcaatttgatggacataaagaactgcttggccagcagcaaaaagatgatgacaacatagacaaagttgatgggactcatgaagcccagcaggtttgcggcccaataggcgatgccggggaagatggccaggatcagcagcgccgcactgaacatcagccagaagatcgtatcctcgatctggacctttgcgtgccgcacgcgccgcaggatgtaccccgccgtgatgaagctgcccaggatcaggcagacacgaatcagcgtttgatcgaacatttcacaggctcctttcggggtagggcgtctcggtgtcgcgcttgcggaaccactggatcaacagaatcgagatggacattttgaccatatactgcacgctgcgccagaaggtcaggtagctctggcccgccagacgttcgcccatttcgacctgcacctccttgaccgtcgcgccgtttttgatcaggtagctgattgtgtcgggctcggggccgtagttcaggttctgggcaaactcctcgaccatggcgcggttaaacatccgcatgccgctggtcgggtcgcagatggcgcggcccgtcgtcaggcggatggaccagctgatgatgtagctgcccagcatccgcagcgtcttgggcttcttcacggtcaggaagcggctgccgatgacaatgtcgttgccctcctccagcgcggccagcatcggggcgatatactccggcttgtgctgaccgtcggcgtccatctgcatggcgcagtcgtagccgttctccgcggcaaagcgcagcccggtctggaacgcgcccgccagccccaggttgaccggcaggtcaatgagccgatagccgtgggcacggcaaagcgccgcggttttgtcgcggctgccgtcgttgacgaccacgtaatcatactgtggataaccgcgggtcagctcctcgacgacctgcacgatgttggcttcctcgttgtgcgcggggatgacgatgagtaattttgacatcttagctccttttggcagacgttacggcttccatcattgtagcaaagacagcctgccatgtaaagtggctgcaaaggttttggcgggtgttttcggcgcgggtgcgggccgcagcggggtccgccagcagcgtttccagccctgcgcggatggtctcgggcgcggcgtttgccaaaaacaccgcgtagtcgtcccctggcagcagctcgtcggtgcccgccgtgcgggtcgtcacgatggggcagcggcaggccgccgcctcgagcagcgtcgtagggaagccctcggcgtactcggtgggcagacagtaggcgtccgcctgtgtcagcagctggacgatctgctcatgcggcagcgcccccagcgcatggataccgccgcccagcgcggccagagcggcctcctcggggccggtgcccgccacggccagcgtacagcccggaatgccctgcacggcctgagccagccgcagcgcgcccttctccgggatgagccgcccgacaaaggcgacgagcctgccgcccgcgggcacgttcagcctcctgcgccagtcaaccgcgttgtccgcgtgggccagccgttccagctcggcagggtcaacggcgttgggcagtcggcccgccgcctggatgccgaacgtttccagccagcggcagacatccccggagacaccgtagaacgggaatccgcagcggcggatgctgccgcaggccgcgtgctcatacgccttgcccagcgccccggccagcccgccgtgcagcatataaccggtggagtggtcgatgaccagcgccgggatgccgcgccgcttacactgccgtgcggcccagacgctttgcgtgtacatccgggtctggatgaccgcaaagtcgatgccctgtgcccagaggtcgtctgcatcggcaaaaggctttaacacggggaaccgcccgcccatgacaggccaggacggcagacggtagatttcgatgccgtcggcatcacgctcccgcgcgggcaggcccggcagcgacgccgtgacgacaagggcacgatgccctgccgccacacaccgccgtgccagattccaggtataccgctcgaccccgccgggggtggggaggtattgcgttgagaagaaacagataaccatagtacagccttttttagtatctattatcttttatctaatatcttatttttatcttgcaataatcgccagcataatattcacgaccatccccgcctgtaccagtgcaagcgcggccacaaggcgggtctgggcggtgtcctcgtcaggcacggcggccagacggcggggcaggcaggtcagcagaagcagcggcagcacgggcaggaagtaccgcccctgcaggccgtacagcgtgtcgtaatgggtgggtgtccacaaaaggcacccggccacggccagcaggcagcagagcgccgccgccgcgcagcaccagccgcgcgccttaccggcgggcttcatcaccgcgccctgcacgggcagcgccgcgtaggccagcagcaggtacagcaccgcgacccacccccaggccagatcaacggtgtagtagctcaggctgccgcccaccagcgtgcggatgtaatggtcgccgttttccacagcgctgcgcacaaacagcagcaccgtgtccacgggatggcgcaggatgtagcccggcgtgtaggtggctttgtcggcctcgtccgccgtgctctgggtgctgcgggtcgcgcggacggcctcgacctcctgcgccagcaccgtgcggtccagcgggatgcggtcatccatcgtgccgacgtccacacccagcgcggcgaagctctcgacacagctcgtcaggttgaacagctgcttgtaggcctgcactgcgccgccctcggcaaaatagggcaggtaggcgtccgcgttgccgtcggtcacgtcggtgcccagcagcgcataggaggccatcgtgtaaaatgcctggccgtcggtgtagttgttggccctgtcgggcgaaaagaggaaactctgccccagcaccgccgggctgacgtcgccctcctgcatggcctgcacccagaatgcgacctcgcgggccgcggggctgcggttgtcgtccacgtaataatacagccgtttgacgtagttttccagcgtactctcgccgcagatctcggcctcgtaggcttcgtccggctctgcggggcggctcttgactgtgcggtctgcgtcctccgccgccgtggtctgcaccgcggtctgcccgctgcgcagcgtatcggtcagaaggcccgtattcagcagcagcgccagcgccagacaggcggccagataggcgcacttcttcgccctggcgtggtgccccagccgcgcggcgggcaccagcagcagcagtgccgccagcggcagatagacgagcttgcccggggccagcagcacgccgcagaacagcagcgccgtcagccgggcaggggagagcgcctttttctgattcgggccgaacgccgcgtccatcagcagcgccgtgaacacaaagcacagccccagcagcggcgcgtcccggctgaagctggccgccaggtgcagcgtcatgggcagcagcgcggccacggtaaagacccgcttgccgaacggcgcggtcttgaccgccagcgccgccagcgccgcaaagagcagcagatttgcaagccgccccaaaaacagcgcgggcgcaaagccaaaatgcagcacataggccagaaatactgccgccgcactgacgacatacagaagcgggttctggtcagtctgcaattcattatattcctgatggctgtcaaagggctggtctgtggtggtgaacagctgggaggtgaacgcctcccacgtaaagaccgtcgtgttctcgttttgcaggtcggcgtcctcgtcaccgacgcggcggaagctcgtcgtcgtgggcaccttacccatccgccactcgtcgtgggacaggtcgttggcccagcggcaggccagcgtaaagctctggttgatgtggtatttctcgtcgggcgcagcataaggcggcagcacaaagctgtacagcagtccaaagccgagcaccagcacaaaaacaagacggtgcagtgccagttttttactaagcaccgcccacacggccagcgcggccagcaccgcggccagcccgcccacaagcaggaagaaccgcgtcaggtagccgccgatgcgctggtaggtgatctgcatcgccatcgtgccgtcgatcacccggtcatccacggccatctgctccttccagagcgcgacgccgtcgctgtggccgatggccaaaatcgcgtccgtcgcgtagtgcggcgtgacggccagcttgtagcggcggccctcctgcccggtcacggcggggtccatccccagggtcgtgtactggtcgggcacgatgtagtccatcgtgccgacggagcgggacagctcctcgccggtgtcggcgtcgtagagcacaacgtccagcgcaccgcaaggctggtcacccggcaggtaaaattcaagacctatcgtcaaaatatccttgtcgtaggtaaagacctgcgttgcggtctggccgtcctgtaaaagctcggcccgcaggaagtcggtgacgatctcactgcggcccttgcccacatcgggccggaccttcgccagccagatcagcaccacgcccgccagcagcacgacaagcgttgccagtgccgccagcaggggggtatgttttttgtttttcatgaaatctccttccgttaggccgtaggggcggatgcccgcatccgcccgcgggtcgatgcaagcatcgacccctacagccgcccgcaagtttagcgttacaattccacctgaaacgcctttttcacagcgtcgttccagcgtccgtccccgcgcaggatcttctccaccgctccgcggacggccccctcgccgccgcgctgggggcagatatagtcggcgcgcgcccgcacctccggcgcggcatccgccgggcaggccacaaagccacacagcgccatggccgccagatcgttcaggtcgtcgccgcagtaggcgacatcgtcccgcgcgtagccgttttcagccatgaaatcccgcaggaacgcggcttttttgccaacattctggtagatgtcggtgattttcaaatctgcggcgcggcggcgcacggcctcgcactcgcgcccggtgcagatcatcacgcggatgcccgccgtgcgcgccagcaccagcccggcgccgtccttgatggcaaatttcttcagctcattgccggtggcgtcgtagtagacgccgccgtcggtcatcgtaccgtccacatccagcaccagcagtcgtatcatcgtcagaccctctcgtactcgctgggggtgataaattccacgggcaggcccgccgcgcggatggcccccgccatctgggcattgtaggccgcaccgcgcccggtgtgggtgtgcaggccctcgtccgcgtaggcggcagtgcccggcctgtagccgtcggcaccggccagcagcacccgcgccgcgccgcactggcgcagcagacgcagcagcatcagcacgctgttgccgccctgcgcgtcggtggcggagagccggtcatagttgaccaccgccgcgtccttgtcggcgcgcaggttgctggtcaggatcagcgggcaggggtaggcggcatccacgtcaaagcgttttgcgttcgtgaaaaacgcatagtcgggcgtcacaaaatccggcacaaagttggccgagactgtcacgtctgcctgcgcggctgctacagcggcacggccagcctcggcagccaggctgccgccgggggccagcaccagcacggtcttgcccgcaaaggccttctgcagggcggccagtgcgcctgcgtcgtcgatgcggcggttcttgtactcggtgtagagcgtgtcggcgtaggcggcatcaaacacagtctttttgtttggcgcgatggccgccagaatatggttgatgtcgcggttcgtcagatcgcccttgccaaggtaatgctcagcatagttgcggtgcagattgaacctggccgacaggaagtacgccggggtatagccccacgcgcagttgcccttgatgggcgcaatgtggtcctgaatggcatccatgaggtcgtcaatgttgtagtggccgccaaagtactcgttcatatagtcggcgatcagctcaatcggcaggttgccggggatgcggcccatgcccatcaggctgccgtccacagccaggtcgcggcgcagatgcttgtcgagaaattcctgcgccaggcagaagctcagtgccatgttctcatgcaggtgcagcgccaggcggatgtccggggctaaattatggtcagccatgctgacgatgcgctccagatcgcggcggcgcatgctgccgaaggtatccacaatggagaactgccacggatgaatttcgttgacctgctcaaagatccagagcaggtccttgtcgctgtagcccatgatgttgatggggttgatggagaccttgtagcccaattctttgatgcggcgggcaaagtccatgccatccttaatgtcgtaatcatgggcggtgatacggatgatttcaatgccgcggccgtcgtagggggacagcttggcaatgtcgtagttggagcgcatcgccatgccggagtacatcgtgtggccgcgctggccctcgtcgggcagcaggcggttcagctcctcaatcgtgttgcagaccgtcacgtcggggtcgtagccgtccacattgcgcagaaagccgacctcgacgacgtccacgcccgcgcgggtcagcgtctggatgatgcggcgtgccgagccgaagccccactgccagttgttcacatagccgccgtcgcgcagggtgcagtccagcagtttaatatcagccatgctgcttctccttcaaaatttcattgaccagcgccagatccttcggcgtgtccacgctgaccgtcttgtacgggctgacgatggcgtgtaccttgtggccattctcgataaagcgcatcatgtcgttttcctcggccttttcaaggatggatttcggcgtatcatggtagaatttcagcgcctgcttgctgtacagctgaatgccggtgaccttctcgtactcgaaatccagcgtgcccttcgggtaggggatggggctgcgggagatcagcaggatctcccgcgcggcgttcgtcacgaccttttggttcgagaagtcgatgacgtcggcggggtgctccataacgttcgtcagcaccgcgacgtaataggggtcatcgggcagcgtgtcaggcaggatcaggtcgaacgccgcggggttgacgagcggctcatcgcccatgagctgcaggtagaggtcggcgtcctcgacggtgctgacctcccagatgcgcccggtgggggtgtcgtggtcggggctggtcataatataccgcatatcgtaggttttgcaggcgtcggcaatgcgctcgtcgtcggtggcgatgagcacatcgtccagcttcgggcaggccctggcggccttgtagacccagtagatcatcggtttgcccagcacatcggccagcggcttgcccggcatccgggtactggcgtagcgcgccgggatcacagcgattgttttcatggttgtacctcgcttacacggcggcctgaacagccgcctctatcgtttggcatacgccgtcaaagtggcggtctatgtccaaattggtgaaccgcagaaccctgatatggttctgtgcgaaaaactctgtgcgcagactgtcggtctgctgttgctcgggcgtgtaatgccgtgccccgtccagctcgatgacaagccttgtttttgcgcagtagaaatcagcgatatagccgccgatgggcttttggcgctggaagcgcggggtgaaggtgcggaggaagcaataccacaatttacgctcccatggggtcatatctctgcgaagctgctttgccagcggtacgttttttcgattgtagtaaagcattgcacatatcctttcacgggtgcctttgggaaggttctctccctccggcgctccgcgccacctccctcacagagggaggcaaggcgccttagccccctctgtgagggggctccgcccgcaggcggtgggggagagaacctcccggccagatgccgttttccccgcgcatcagaccagtttcctcgcctcctccagcgtcagcaggatcttctcatccgccgcggtgaagccgcgcaggacgaagctctgcacggtgacggcacgggcgaaatggaaggggaggcagaagttcagcacctcgctgggcatcgtgcgctccaaaatgactgcatcggggaacagggcggcgtaatccgtcgtgtcccgcgggtgggtcttgataaagagcggcccaacggcgtatttttccgccaccgctttgaacatcgcgtcctgctccgcttgggtcatcagcccatcggccacaaagctgcggggcagcaaaagcgtcgcaccgtctgccttctcgggcaggggctgcgtcaaaaatacgcggcgcaccatcgctttttcgtcgtcggtcaggctctctaacagtttggccttgctgtccgtcaccatgcggtccgccgaaaacagcgtacaccgtgcggcgtcctcactctcgacgcggacgcaccacgggctgtcgccccagtacaggtagccttttccgcgctgcttcgcggcaaaatccgccgcggcgcgctggtcggtcacaagatgctggtcagggccgagcgtgctgccgaacgtgtcctcgcacagaatatacccggcgcggcaatcctgcaaatagcggcccagcacactccaatcgttgtggatatagacattttcaaacgctgcacggttcaatttccagccgcacagcttctcaaaggcgcgggccgcgcgccggtgggcaaacagccccgtcacggtcccgggccagcgcgtctcgtccacaaggacagtcttgaccacgcccgtcgcgtccagacgtgccgccagcgcggcggtgtcgggcacggaggctgagagcaccatcgtgtggggcttgccggcgcagcgcccggcccgcagcagatcgaccaagacctgatacgcggtgtggcagatgtacaaattcggtttcatgcgttactcctgcacgagcttgaccggcgggaagtggatgcggccccagccggacgcccactcgggcatcgtcaggtcgctgttcgtcacctcaaaggcgaactcggtcacgggcttgtccaggcagaccgcgtgggccagtgcgccgtcaaaaatgtcgagatagaagaaatactgtccctcgcccagcagactcgggtcaaattcaaacacagaggtgtagattttgcccggctcggcggggccaaggtcgacgggatgggtgatgccgacgggcgtcgaatcccgcgcgtggaggttcatcttcatgtggatgcccgcgaacggctccgaaacgcgccaggtgattttcacccgcatcttttcggtatcggcaaacacgctcgactccttgccgacgaaatccagcgtttccagccggaaccgcttgcccgcgctgcccgtcatgcgggcgacgtcggccaggtcgtagtggacaacgttgacgtcggtggtgtccatgtagaccgcgatggcctgctccacgtcgccgtcaaagatgaccctgcccttgtccagcacgacgcagcgggtgcaaagctggcgaatggtcgacatattatggctgacatacagcaccgtgcgcccgtcctgattggcgacgtcgctcattttccctaagcatttctgctggaatttcatatcgccgacggccagaacttcatccatgaccatgatctcgctgtcgagatgcgcggccacggcgaaggccagcttgacgaacatgccgctggaatagcgcttgacaggtgtgtcgatgaagtcgccgcactcggaaaattcaatgatctgcggcagctttgcgtcgatctcggcgcgggtcatgcccagaatcgcgccattcatataaatgttctcgcggcccgtcatctcgttgttgaagccggtgccgacctcgagcatcgaggccacgcggccacggatcttgatttcgccctcggtgggggcggtgatgcgggagagcagcttgagcagcgtggatttgcccgcgccgttgcggccaatgatgcccagtgcctcaccctgatagacggtcaggtcaacgccgttcaacgccataaacgtctggccgaacagccgctggtcggtgccgatgacggtgttcgggtcctccttgccgcgcacacgggcccaccagctttgcaggtcgtgggtcagcgtgccgccgccgatctggccgagcttgtattgctttttcagccccgtgacctcgatgacagggcgtttttcatttgcagacatagttacgcgcccctttcttacacggtatccatgaaggtcttttcaatgcggctgaacagcacaacgcccaaaaccagcgccgcagcggtaaaaatcaggctgtacacgatgccgaacgtcgtgaccgtgccggtgcccaaggtagccatgcggaaaatctcaatcggcgacgtcatggggttgagctggacgagcacccgcaggcgcggggagttgtccagcatcgacagcggatagacgacgggggaggcgtacatccagagctgcacgccgaagccgacggcaatcgccagatcgcggtacttcgtcgttaaggacgacacgatgatgccgacgccgagacccagcagcatgacctccagcacgacgaacggcacagccagcacccacagcgtaaaggtgacgccgctgcccgtggcaaagaagtacacccagaagatcaggtacatgaccgcctgaatgccgaagttgattaggcttgtcagcacctggctgaccggcatcgtcaggcgcgggaagtacaccttgccaaaaatctgtgagtttgtcacaaacgtattggctgtattgttgacgcagttggcaaagaaggtccacaccgtattgccggccatgtagaacaaaaagccgggcacgccgtcggtgggcatgttggccatgccgccgaacacgacgttgaaaatcacggtggtgatgagcgggttcagaatgatccacgcggggcccaggatcgtctgcttgtacagcacggtaaagttgcgcttgacgaacatcataattaagtcgcggtagcgccagagctcctgcaggtcgatgtcgaaccagccggtcttgggccggatgaccgtagtccagccctcgtcagccgggcgggtggtttgcagattttcagccataaaaatacctgttccttatgtgtaaaatcgtggttgcatagttatccatagtaatagtgctattttaccacattttgcgcaaagaatcaacttgccggggcgtatataatagtagcagaatatcgtgcgcggtgaaagcgtaggggcggattccatatccgcccgggggcgtccccgcaggcaaaaaagcggtctgccgaaaatccatcggcagaccgctttctatacaaatttacagcacctttgacaaaaatgccctcaagcgctcattttcggggttggcgaagaactccttcggcggcttatcgaccttgacgatgccctcatcaatgaagatgatgcggtttgcgacctcgcgggcaaagcccatctcgtgggtgacgcagaccatcgtcatgccgccgcgggccagctccttcatcagctccaaaacctctccgaccatctcggggtcaagggcggaggtcggctcgtcaaacagcagcacgtcggggttcatggccagcgcgcgcacaatcgcaatgcgctgcttctgcccgccggacagcatgttggggtaggtgtcggccttgtcggccagaccgatgcgctccagcagctccatggctttcttgtcggcctcaggctgcttcatcaggcctagacgcacgggggccagcgtgatgttcttcttcaccgtcaggtgggggaacaggttgaaatgctggaacaccatgcccatcttctggcgcacatggtcaatgtcgtggtcggtgacttccttgccgttgaagatgacatggccgccgtccggctcctccagacggttcaggcagcgcaggaacgtggattttccgcagccc

SEQ ID NO: 1034 - DNA, 28547 bp, unidentified
  source 1..28547: mol_type = unassigned DNA
aaatcttaattattcctgtatacgataaagcctcactcagatcctttaagagttctttgaaaggtggaagatagtcgggatacaggctatatccacgaattattctgcttccttcgaacgtgtctgcagaatggcatggacgaactgaattcatgacaatagaaatgctcgcagagcgtacattctattgttttacgaaactgtgcgaatgcttccttgagttatgcagaaaaataaattaaaatagaacatggtactattataaaaagaaatgtttatcaaaaaacaacgtatgatagaactgcagaacgtaaatctgcgtctgcgggcaggagggaatgtgaagaaacgaaactggtatctgatccttggtatgctgcttttggtgcagctgattgcgattttttattttggaagtaaaaaagcagggttccattatgatgaatattattcctattattcctccaacgtgtcgatcggtctggtgccgaccgaccgggagtggaagccgggcagcgagattgcggacgaattccgggttctgccggggcagcggtttcagtatgggacggttacgcgcatgcagacctatgacgtgcatccgccgttttactatctgctgctgcatacggtatgctcgctgtttcccggaaggttcagcaaatggtcaggaattggactgaatatagtgcttttcgttctgggctggagtgtgctggcgaagctgacgcggcggattgtgacgggtgcgctgaggagcgcggctgcgcctggtgggaaagcgcagacctgtgtaacggcggcggacgttccggagcgtatcacgcgagtgatgattttcggagtgtgcctcctgtatggttttaacccggcggtttattccggcgttatgctggttcgaatgtatatgcttctggctctgtggattttgctcgtgacctggctgcatgtaaaaagcctgcaggagagaaaacgcgggttttccttttatctgccgctgatggcggttgtttatctcggttttctgacgcattactattttgctgtttatctgtttttcctggcagcggcaatggagctgtatctgctgttggaacgtgcagagcagaaaagctgggggcagaaatggaaagactgcctcatttatgcgattgctgtgatcggagcgatggtacttgccgtagtcagctatccggcgtgtctgagccatatttttcggggataccgggggacggaagcgatgggtgcgttcttcgaccttggcaatacgcttggaagatttcggttcttcgcaggactgctcaatgaatatgcctttgggtcgatgctgtacggatttgttctgctgcttgtcctgatggcgctgacggtctggggaattggacggatgaaagccggacggaaagctgtcgctgcgactgtgcagaaatccgggcagcaggcagcagagtacgcagccgcgcaggaaaattcgaaccggcaggctgacgcttcccgcgaatcattctgggaagtacggcgtgttttctggattccggcggcagcagtactcggttatttccttgtcgtgaccaaaacagcgctcctgacggcggaggaagcgaaccgatatcagattccggtctacgggctgattttgctgctgatgatggttatatttgtactgctcggacagaagctttttgtattgactatgagaaaagggactgctgtaaaaaatgctgcggggaaaatcagcgataccagagatacatctgctccgggaaaacggtccgtgcacgataaagcagccggctatgtacttctgatggtatttctggtgttggcaacaggacagattcgagggctggcggatggaaaggtgctgtttctttatgaagaggacacagaaagtatcgcgtttgcgcaggagcataaagagaaaccggtcgtttatttttataatcccaacctgacctggatgatctgggacgattcactggagctgatgcagtatgatgaaatttattttgcgagccttgcagatgtttcgactgtggaggatgatacaatccggcaggcggatcaggtgcttgtatatgtttccagaatggagcagactgaggaggcgctgcaggctgttgcagatggaatgggcggtgatgtgaagatggaaaagatcagagagctgctgtattgtgacctgtatttgatagcaagaaagtaatgcatgctctgtgagcatgctattatcaggaataaaaagactcccgttccggtggcaaatgaagaaggaatcattctccatttgtcaccggaaatgggagttttttcatgataatcgttttactcagcagcgctttccgcctgggctgcttccccatcagctgcagtgctttacgtgccagccgcatctgtttcttctgcagcgctttctatatcagcggtttcttcagaggtgctttccgtatctgtgtcctctgttttggctgcggtactttcttctacagtgccttcttctatagtgccttcttctacagtgctttcttcagctgtagttgtttcgattacgctttcgacagtggtttctgtttctgccggcgtctctgtcttgggagtatagtggcggtaaattgcaaaagcaatcgcaagtacgattactgcaagtacgaaataactgcagatgcgaaggagcttttttcgtttcttttccttctccagacgttctttgcgatgcgctttttcctgtttataacggtctactttttgttggctcattttatgtcctccatcaaatttcttagttatcactatacagaataactgtgaaaattctgtgtcaggagggcagatttttacgggaaaaaacgttataacgcagatgcgccttcctacagacacgaaagttgtctgcaggaaggcgcaagcagataaagatttaaccgaggaacaggccgtacaatacggcgatcaggatgccgagcagcgcgccgacaaacacctgtaaaggggtatggccgacgaattccttgagcttttcttcgtaggagatcggctgccccatcttttcccagaattccatcatttcattgatgacctgtgcctggagaccggtttcccggcgcacccctctggcatcatacataacgataatcgctacaatagcggcaatggcgaattcaaagctgccgccgccgtattgcattccggatgcggttgcgagtgcgcagacagtggcggaatgggagctgggcatgccgccgcttccgactaaacgttccggatcaaagcgtttggtgatacaggtataaatcactgttttgatgacctgtgcagcgaaccaccccgtaactgcggacataaaaaccgtgttgtgaatcagtgcgttaaaaaagtccataaaatacctctttctctttggaaactaaattaggcaaaatgccatcccctgattttttattttacactttttttgtcagttttacaacgtttcccatctcatttttgcagacgggaggtttgaagacggcaatacggcagcgcaatgaaaaacggcgcggcaaggatgagcggataagcgtagcgcagatcggaggcgacaggagttgccagaagcagggtaagtacagttccgataaacggtacaaagagcacgagaaaccgccgctgtccgtataaaaactgatatgcggcaaaatacaggacagcccagaagtacgcgccgatgctccacaaaataccgtaaaccggaagcatatcaggaagctttaaaagaatttcactgattttgaccggaaactgacctcgcagaagatgcggccaggaaagtccgatttcgttcggagaaatcccttcattcgtgcgtaaagtagccggggcggggaaccagtatccttttgtctgatcgataaaggcctggagatagtcgcccgggtaagaaataccgagctgaatccagagggtgaaatattttgaaggattccggatgatcgcatcggcatggttgtaggagacgagtgccttgatgggatcggagatcaccggattgtaatactccggaatcagggaagtatcgactacatcatcgatgagcatttcctgctctgcgctcagctgtcgaccgttagaaacgacacaggcaatctgctgcagaggaatggagagggattctgtaaaggaagcgcgctcaacatggcaggcagtgtatacagggccggtgatgaccagggataaaaggagtatgccgacctgcacggcaaacatttttttccatgcccggcgaaatgcgaacagaacaaacgggagggtgaacaggaagatataaagcccgtttgaacgcagggtgcagacgaaaaagccggaaagggaaagccctgcccaaatgcccggacggttatccgggttgcagagcagttcatataaaaagcaaagatataacagcataaatccggaaaaaagaatatctttccagacggttacggcaaaaattgcgtgaaatggaacgaacccccagaaacaaaaagacagaatcagccagaggcgtgaagcgcctgatcttgcgaggagggatagcgtataggtttcaatagcggccatagtgcacatctggaacaatacataacaggcgattccggtgtttatgcttccggtcagaaaaaatccgatatggtaaaacagggagaacaaaagcgtgtgcaggatcgggtggtggttactgagcgggatcaggccggtagcctgggaaaactggctgatgctgtccggggtcagaacaccggggaactggtacagaaaccagaacagccagcagaagagcagaccgaagtaacagagcagcttctgtttgcgggacagagcatgcgctgcagatatggctgggggtacaggacatgcaccgtcaggctgctgcaaagtgttttgggcaaaacgccgctgctgtctggatgcaagaaacagcatggacagttcacagaatcggaagaatataaaatacagaccgataaccgcagccgccaggaatgcaagtctgaatatgcggctgtcaaagctgccggacagttcagcatgctttgctgctgcataaaataaggtgtagagaactgcgagaagtctgcatattggataaaaatggcgcggaagcacagaagaagctgctccgatattcgtcagcctttgcgtcagcgttggagaaaaaaggaggagcatacctgcaaagatcaggacagaaaaaatatctgccggatggatggaaccgatatcgcatagtgcaaaggctgcaaaaaacgctgcagtaatccgagtgataccgggcttctggaatgaaattatatttgtcataagatgggagtcctcctggaaagcaatgaatgattttgatctgtatatggattcagtttagtgtcagtgagggaaaaaagcaagaaaattacccggaaaatggagcacctccatttccttgacatgaaatgggggcaatggtacatttaatgcatcagacaggggtatcaaaattatgataatgattttaatggaatgggcgtatatggcgacgttgtcgtttctgatgggctttgcgtgtcttgcaccgtttcgaaaaaagggcggttgtcagattcatagcgcagtaacctatatgatggcgggtctgctcgtattgaatgtgtatgcagagtatttcagcctgtttgccggcgttggcttctgggcaagtctgattgccgtttttgctgcggtcatcggcggaatgctgctgcgtcgggatttggcggattttttcaaaatttcgaaaacacaggcatgtcagaaaaaaaaggaaagaagcgacgaagggattgaaaactcaaaaagcctttggcgcaaaaaaaacaaagccgtctggctgctgtatgccggtctgacgcttttatttgcatacggctcgtcgaggggctatatgcactacgatacgggactgtatcatgcacaggcaattcgatggatcgaagagtacggcgttgtgccggggcttgcgaatctgcacagccggttcggttacaacagcgcttcctttgcactcagcgccttctttagcgagacgtggctgatcggacggccgatgcactgcgtggctggattttttgcgctgctgtgcgcgtgtaaatgcgcggcagggcttatggcattttggaaacgaaaaaaagtgcgaatatcggattttttatctatcggcgggatcttttatctgatagcagtgttccgggagatggtttccccggcgtccgattattttgcaatgttggttttattctgggtaataatgacctgggtggaactgtgggagcaggaaagggactgtcccatcggggaaaagcaaactgtgccttacgcactgctgagtctgtatctggtgtatgcggcgacggtgaagctgtccacagcggtaattttgctgctggtcctgtatccggcggtgctgctgcttaggcagaaaaaatggctgcagattgcaggctatattgcgctgggacttctgattgcatttccgtatctggcgcggaatgtgctgatttccggctggctgttttatccgtttacgttcttggactggtttccggtagactggaaaatttccaaaggctatgcggacagcgacgcaaaggaaatccaggcgtatgcgcgggagatttacaatgtttatcagctggatcagccgttgaagcagtggctgcagaactggtttgcagcgcaggctggattcgataagcttctggtgctggcaggctgggcagcgatcccggtgagtgcagtgctggcggtgctcggagctgtgcgcgcagtcagagcaggccaggtgacagttgcgccccatgtggacggcgctgtgtctgaacgagaaatcggcgcacccttgcccgcccgccgagtcgcacatcttacgcccttgtgtttttccctgcttcagctgtgtgcagtggtcggttttttcttctggcagctcggggcgccgctggtgcggtacggatatttttatgtgttgtttttgccgctgacggtgtttggaagcctgtattgtatggcggcagaaaagctggctgattcagaacagggacacaatgggcgtaaatggttgaaaaatgccggatattgggcatttgtgggattgctggtagcattttttacctataaggggtataatctgatacagatggttcgggagctggcatatgagccgtattatctgtggcagcaggattatgtagatggatctgcagagatgtacgaggtggatggtgtgacgatctatgtgccgacggacagagggcagatcgggtataacaaattcccgtcatccccaatcgtacaggatatcgagctgcggggcaactcgattcggaacggcttccggaaaaagccgaaatgatccggcaaaatagaagcgatccggaaaaagccgaaaaggatttgtaaaaatgcatggaatgggctgacggaagcgcagcacttcagaaaggaaatacaacatgaaaacctatggcgtaattatggcaggcgggggcggaacccgtttctggccgctgagtacaaaggcagagccgaaacagtttttaaacctgtccggcaaagatattctggttaacgagacgatcgacagacagcatgacctgatggatcagaaggacatttttattgtgaccaatgagacacaggcaaagatgatgaaggagcgcacagcaggcagaattgcggcagatcatattctggcagagcctgcggcgcgcaatacagcagcgtgtatcggttatgcggcgatggaaattctgcataaatacggtgacggcgtgatgtgcatttttgcggcggacgcttatattcgcgatgaggcggaatacacccgcgtgatgaaggaagcggttcgtgcagtggaagagacggacgcacttgtgacgatcgggattcatccgacgtttccctcgaccggctatggctatatccgcagcgtgggagaggctggaaaagtatggcgcaaggtagaagaatttgtggaaaaaccggatttggaaacggcgaaaagctatctggcatccggcagttatgcgtggaacagcggcatgtttgtctggaaagcctccacgattcttcactatttcgaagaacttctgccggatgtgtacgcctgtctgaaacagatcggggcagcgctcggcacagaaaaagagcaggaggttctgcatgaggtttatccgaccatcccgaagatttccgtggattacggcattatggagcgcgcaaagggtgttctgatgctggaaggagatttcggctggaacgacgttggcagctgggatacgctggatgcagtgcgcacccgggatgctgccggtaacatcagctccggcgatacgctgcttctggatgcgaaaaactgcgttgtatacggcggtaaaaagctgatcgccgcagtcggcgttgaaaacctggtcatcgtagagggcagggattcgattctggtctgccctgtcgatcaggcacagcgcgtcaaggaggtcgttgagacgctggaaaaagaaggcaggacggaacggctttaaacggcgaaaaaacgcgaaatatcacgacccttttccgtttggtttccaaaatctgagtgttagaataaagtagaaagcagcggcagaatgttcacagtgcggtcacactgttggtgcggaaaaaagactcagaggaggaatcagaaatggctgcagaatggaaagaaacactcgaaacggagcgggagatatcggcgtttatgctggaacttgggattccggcgcatttgaggggatattattatctgagggaggcggttttgctggctgtctcggatatggaactggttggcagcgtgacgaagctgttatatccggtgatcgcaaggcgttacaaaacaacgcttcagcgggtggaacgcgcgatccgaaacgcggtggaggtgtcctgggaacggggcaatccggaggtgtttgaggatctgttcgggttcagccgggagacgggcgcgccgaggccgacaaacagcgaatacatagcgagaattgcggacaagataagaatggacgcaactacaggagagaaacatgttactgagcgtaatcgtaccttgctataatgaagaggaaaacgttccgattttttatgaggaaatgatgaaaaattccgcttttttggagcaggaaaaactggagctggaaattatttatatcgatgatggttccaaggacaataccgcagcggaggttcggaagcttcacgaaaaggatgaacgggtgcatctggtgtccttttcccgcaactttggcaaggaagccggaatttatgcgggcttccagaaagcaaagggggactatgtcgtgatgatggacgctgatctgcaggatcctccgtcccttttaccggagatgttttcctacattaagcagggctacgacagtgtggcgacaagacgtgtgacccgaaaaggcgaacctccgatccggtcgttttttgcaaggatgttttaccgcatcatgaataaaatttccaaaacggagatcgtggacggcgcacgcgactatcgcctgatgacgagacaggttgtggattcgattctttcgatgtgcgaatataaccgttttacgaaaggaattttcggctgggtcggctatgagacgaagtggctggagtatgaaaacgtggaacgcacccacggcgagacaaaatggagcttctggaagctgtttttgtattcgctggatggaattaccgcattttcaacagtgccgctggcaatttcgtctatcatgggcgttgtgttctgcatcgcagcgtttgtggcgatcatcgccctgattatcaaaaacctgatttaccatgatccgacgcccggttggccgtcgatggtatgtattattctgttggtttccggcgtgcagcttttctgcctgggaatcgtgggacagtatctgtccaagacctatctggaagtgaaaaagcgtccgatttatctggtaaaggaagaactgtaatgaattatgagaacctgatcagcattgtgatgccggtttttaacgcccaggcgtatctggaggaagcgctggaatcggttcgccgccagacatggacggactgggagctgctggtggtagacgatcattctacggacgggagcgcaggtcttgtgtcagaaatctgcagaaaagacgcgcgaattcggcttctttcccagacggacggggtaaagggcgcggcaaatgcaagaaatttcgggacagcacatgcaaatggacgttatctcgcatttatggatgcggacgatatctggcgggtggacaagctggaacgagaaatggattttttgcgggaaaaagacgcagcctttgtattttgctcgtatgaatttggagacgagcatgcggtcggaaccggcaaaattgtgcgggttcccgatcagctgacttatcagaaagcactcagccggacggtcatttttacaagcacggtgctgtttgaccgggaaaaaattgacaaggcgcttttgcagatgccggacgtgccgagcgaggacacggcgatgtggtggcagattttaagaaacggacacgtcgcttacgggttaaaggaaaatctggtgatctacagaagaccggaaaaatccctttcctcgaacaagctccgggcgattacaagaatctggggactttaccggaaacaggaaaaaatgtcggtgatcgcaagcgcagcatgtttttgtatgtgggcggtgcgcgctgtgtggagaagaatatagcgggagaacggaagatgaagaaaaacgattctgtcaagcggctgattatcctggcgcttgggttgattgggctgtgcgtgctgactgctttttatgcgcacgactggttcgcctattattatcatcatattgcatggaaaacacataaccgttttaatgtaaacggtcatttgctgattgttgcactgtatttcatattgctctttttcttttccaatacttatggagcacttaaaatcggctatctgaaaccgctggatattttcctgtctcagctgttttcccttctgtgcgtcaatgtaatcagctatgcgcagctgtccctgatgtatggctggtttatcatcggcggggggcatatggtgtcgatgatgctgtatcagctggtgtttgcagggctgtggggctggctgtgcaatctgatttaccgtcgcgcgtttcctccgcgggagctgcttttggtgcacggtgagcgcccggtagaggatatccttgggaaatttgcaggacggaaggataaatatcatgttgcaaagtgcatgaacatcaaagaggggtacgatgcggtgatccgcgaggtcggaaagtatgacgcggtcgttctctgggatattcatacgatggacagaaacgtgctgctcaaatattgctacagccattcgatccgcgtttatatgatgccgaagattccggatgtgctggtaaagggaagcgagcagctgcacttgtttgatacgccgattctgctgacgagggaatatgcgctgaacgtagaacagagaattgcgaaacggtttatcgatgtagtatgttcgctgatcctgattgttgtgacatcgccgatcatgctgattacggctgtggtgatcaagctgtatgataaaggtcctgtgctgtacaagcaggtccgctgcacgaaggatgcgaaggaattttatattctgaaattccgcagcatgcgcgtggacgcagaaaaggacggtgtagcgcggcttgccgccaaaaacgattctcggattacgccggtgggcaaatttatccgtgcggttcgtatcgacgagctgccgcagctgttcaacattttaaagggcgagatgtcctttatcggtcccagaccggagcggccgcagatcatccgcgaatatatagaagaaatgccggagttcgcataccgtaccagagtgaaggccgggcttgcgggatatgcgcaggtatacggaaagtacaatacaacgccgtatgacaagctgaagctggatctgttttatattgaaaattattccgtatggctggatttgaagctgatgcttctgacattgaaaatcctgtttacgcccgacagcacggagggcgtggacgagaagcaggtgaccgccatgaaaaaacaggtgcaggaggaagaaaaataatgcctctgaaaagagatgaagcattttggaaagagggcatggacgaaaaacgctttgccctctgttgtattcataaaatatggatctgtctggcggcagctttggctggcgctgtttttgctgcggggatttatcttggtgtgcggcagctgacgatggggccgaagcagtatcggtcggaggttttatattcgatcgtctatgacatcgacgaggatgacgaggttttaaaagaatttatcaacgaatataacgcctatacctggggggatatgatgcgctccgaccgtgtgatggatacggtgcttttgcagctgccggacgtggaacggtccgtgattgaggcttcgatcagcacggaaattgcgtctgacccggaatttctgacggcgtactttacgacaggggacgcagcactgtccgaccggattgcagcggcctataactgcgcgatgacggcatttggacagacgatgcagggacgcggtctgacggcaattgaagtatggaaaaccgtttcggcacaggcggtgcttccggaaaataaagtgaaaaatgcggcggcgctcggtctggtgctcggactgcttgtcggaatcttgggcgtggcaatctggtatgttctggacgattctgttttgctcagctcagacgtggaaaaacgctgcgcaatcccggttctgggctaccgaacagcaaagcccgatgaacagttcggtgcgcttctggatgcgcagctgagagccaaagcgtctcagaccgcttttcaggaaatgtcgctggacacggtgctttccgggacgatgggacttggggaagaagaaaagattccgcttatccttttggttcgctggaacacaccctgtattaaaaaactcggacttgcccttgatttgcttgctcagcgggagatcgcggttgtgggcgtgatcctcacggacgcggacgcacggtttttgcacgcttactacagagtgtaggctgccagttcactcgtggcagcctgtaggcagattccatgctcgcatgaaaatttgcctacagactgctacgaagggagcgcccattttatgagcaaaaaggagctgcgaagcagcggaaaacatcgaagatgcgattcatgacaatagaatgttcgcggagcgtgcattctattgtattgcgaatggcgcgggtgaactggcgcacgattacaagaaacaaaggagacggctcatgaaactgcagattctggtttcctccctgaatcaggaggtcaagtcgctggcagagaaaatgaatctgcaggcggatgcaattctcatcaatcagtgtaacgaaaaccgttacgaggaatggacgcaggacggtcatcggatccgctgctatcatctggcggagcggggggtcgggctgtcgcgcaacaacgcgcttctgcgtgcggacgccgacctgtgcatcttttctgatgaagatatcgtttatgacgacggtgcagttgagcggattatcgaagggtttgagcagcatccggaggcggacatgctgttattcaatgtgcgcgtgcaggagagccgctttacctactggaattcgttttataagcgggtgaagtggtataactgcggtcgttatccggcatacagctttgcgctgcgcacggcgaagatgcacgaaaagaatttgacctattctttgttgttcggcggcggcgcgaaatatgcaaacggagaagacagcttgtttatccacgactgcctgaaagccgggctgaaagtctacagtattccggtcgaaatcggagaagaacagcccagaccatcaacatggtttttcggctttgaccgcaaattttttcacgacaggggcgttttgtatcatgtgctgtacggaaagctggcggcggtgatgggatttcgcttcctgctgaaaaatagatccaatatgaattctgagagctgcccggaggggctgacttttgatgaggcgaaaaaagcgcttctgtccggaatccgcgaagcaaagggagggctgtaaatggtattttattttctgattacagcggttacgattgtgctcgcggggctgatggacgcggtctggacgcgctcggggcaggaggcaggcagtgctgggctgtgcgctggacaagccgccgagagtgcggcatccgggaatggcaggcacgcctgcggcatctcatcatccggcggcttgtttccggcgggcgtttcccgacgccgcgccttcgacatcgtgtgtctcgctgctattttcctgattctggcgctcgtgagtgcgctgcgtctggaggtcggtaacgattacggcaaatatgtcgagaatttccacgaaatctgggcgggaaccgatcaggcgtatgtggtgacggaagccggattcaatttcgtggtatggctgatttatacgatttccgggtatgaaaattatctgctggtattcgcggtattcggcgcggttacggcttttttgtttttaaaggcgttgtatgagcagagtgactgcttctggcagagcttcgcgatgttcatgctgctgggcgtatattttcggacatttacgacggtgcgttattatctggcacttgcggcagcgctgtatggaatccggtttgtactgcgcaggcagtatggctgtttcgtgatctggattggcattgcggcgctgtttcataaatctgttctgatggtgcttccgctgtatttgttggctgtgcttccgtggaaaaaatggattgcgccggcgctgactgtgatcggagggatcggttttgttttccagcgtccgcttttaaatctggcgctgacgtggtatcctacatacagggacaccgtatatctgtcacaggatatcggtctgaaagcgaatgcgtccggaatcctccggtgcgtgctcgtttttatgctggcggcagtggttggcaggtgtggaatggaaaaggagcagaaccgtttctgcctgaaattaaattttttcggactgctgttttatacctgcggttcgtttttgccactggtatcgagaatgtcctattatatgattacgccgcagctgctgctcgttccgggactgcttggctgcgtggagaaccggaagcggaaaaatattttaacagcacttgtggggatcgtatgtctggggtattttttgtggtttttaaaaacggcatccggaagcgggatgcgcgtgcttccctataagacctggatttttacggataaggagtggatcaatggcgcagatttcttttagcattgtggtagtatgcttaaaccccggcgaaaagctgttgaagacggtgcagagcgtattgaaccagaaatacggaaattatgaaattgtggtaaaggacggcggttcgacggacggctccctggaacaacttccggcggatagcagaatccgggtttatacaagaccggacagtgggatttatgacgcgatgaatcaggcgatgtcctatgtgaccggtcagtttgtccagtttttaaattgcggagatcttttacacgacgatatggtgctggaacggcttgcagctgtgatggagcgcaagcgcggcaggggagccgacggggaaggcctgggacataaggaaaaagagcggattttttatggaaatcaatatcatgaggcgtggggcagcgtgatctattctgcaccggaggtcaatgattttacctgttacagaaatgtgccctgtcatcaggtttgcttttacgacgtccgtctgtttgcagagcgtggttatgacgtaaaataccgtgtccgcgcggattacgagcatttcctgtactgcatttatgatcggaaagcggaagcggtttatgtggagatgattgttgcggattacgagggcgggggcttttctgagacaagggagaaccgtcggatttccgaaaaagagcatgctgaaatcacgaaacgctatctcggacgcgacaaggcgctgcgttataagctgctgatgcttctgacactggcaccgcttcggacaaagcttgcagaggacgaaaaatattccgagtggtacaacgggatcaaggcgaaaatttacggaaggtgcggccataaggacgaaccgggggagaatcggaaatgagagtgttatgggtatgcaatatcatgctcccggtaatcgcgcaggcgctttcgcaggagtatagcgtgcgggagggctggctgtccgggatactggggcggtatctggagacggagaacggcgcagagctgagcgcagcggacgtgacagacagcgctgcatcgcccggcggacggcagcagggagccgaaactgcggctgcactgacgctcggcatcgcatttccggttgcaccgggcagggaggagctatcgcagcgtctgcagcttggcagctataaaaaagaagtcgcctgctatggctttgcagaggatttggagcacccggagcgctatgacagcgcgatggaagcgcgttttttgcagattttagaggactttcagccggatttggtgcatatcttcgggacggagttcccgcatggctatgcctgtgcgaaagtatttcacagaccggagcggacgcttgtgggcttgcagggactttgtatttcctgtgcggacaactacatggcagatctcccggaaaacgtacagaacagcaggacactgcgagatattttaaagaaggacagcatccggcagcagcaggaaaagttttatcagcgcgcggaaaacgagaaaaaactcctgttgtcagtcggacatgtaacgggacggacgacattcgataaaacgatcagtttggagataaatccatcccttgtttatcataccatgaacgagacaatgcgcctacagttctacagcggatgctgggagatcgaaaaaactgtgcccggagaaatcttcatcagtcagggagattacccgctaaagggctttcactatctattgcaggcgatgcaggaaatcctgcaaaactgtcccgaggcgcatatcaaggtggcgggcatcagcgtgctcggcgtaaacggaataaagagcagaatcaagatttcggcatatggaaaatatctgcgcaggctgattttgaagaatcgcctcgaaggaaaagtgcgtgtgctgggaaatctttctgcggaggagatgaagcgggaatatttgtccgcgcagatagttgtgtgtccgtctgcggtggaaaattccccgaattccgtggcagaggggcagcttcttggcgtgcccgtggcggcgagcagaaccggcggaatcccggatgtggtaaaagacggcgtaagtggtctgttgtttgaaaaaggaaacatacacgagcttgccgcgtgcgtcagccggattctgacagataaacagctggcaaaggagttgtcggcttcggaacgggagactgcggcgaagctttacaacggtgaaaacaattatcaaaaactgatagaaatttatcaaagcatcgaatgaacgaagctgctgaccggagcaggaaagcgggaatggaggaaaacgtgaaggctgtttttatttccaattatatcaatcatcatcagattccgttttccaacgcactgtatgaacaactgggggacgattaccatttcatccagaccgagccgatggaagaagaacggattgcgatgggctggggactggatgcagcgactctgccatatgttgtttgggcggatcgggaggaagaacgctgccggaagctgattgaggaagcggatctggtgtttgcaggctggacgaagcggctggatctggttttaccgcggctttcctcgggaaagctgacgtttcgggtgagcgagcggatttaccgcgaggggcagtggaaagcgatctctccgaaggggctgcttgcaaaatataaagaacatatccggtttcgaaaccagccggtgtggcttttgtgctgcggcgcgtatgtggcgtcggatttttcactgatcggggcttatcccgggaaaaagctgaaattcggctattttccggagacgctgcgctgtccgcaggaggaattgtttgccaaaaagaatacggataaactgcaaatcgtctgggcgggacggatgatttcgttaaagcacccggagtttgcagtgaagttggctggaaaattacaggaacaggggtattcgtttgagctgcactttgcgggaggcggtccgatggaagaggcgctgaagcaggaagcagcagcgctcggagtggcagagaaaatcgtttttcatggatttttaaagccgcaggaggttcgaagcctgatgaaacgctgtcagctgcatgtgtttacaagcaactatctggaaggctggggtgcagtagtcagtgaagcgatgaacagtggctgttgtgtggtggcaaaccgtcagatcggcgcggttccgtttttgattgaggacggcgtaaacggtaaaagctacccggacggctcttatgaagcctttgagcggacggtattggagctgtgcgcgcagccggagcagatcacagcgctcggaaaagaggcataccggacgattacagaaaaatggaatgcagaatgtgcggcgcagcgctgcctggaattttatgaaggctggaaagccggaaagctgccggagtgggaggatggaccgctctctgccgcgccgaagctttccgcacgctggagctataatgagggaacattggatggagaataaaacagaacaaaactgcctgatcagcgtgatcgtgccggtctacaatatcctggactgcctggagcgatgcgtcaacagcatctgcgcccagacctggaaaaatcttgagatcctgctggtggatgacggttcgacggatggaaccggaaagctgtgcgacctgcttgccgaaaaagatgacagaatccgggttttccataagccgaacggcggttcttccagcgcgcgaaaccttggaatcagtatggcaaagggaaaatggatcgggtttgtggacagcgacgactggatcgagccgcagatgtatgaaaggctgtatgaagctgcgaccgctgcaggcacttcaattgcgcaggcttcgcgggatgagatcgacgaggattaccacaaaagaccggacgtctgtacgccgccggaacaggaagttacctgcacggcagaagattttctgaaaacgctgctgctgcatcagggcgattgctcgttctgtacgaagctgatcaaaaagagcctgtttgaaggtcaccgcttcccggagggaaagttaaatgaggatttccgcctgctggttgagcttttatgtgagggcgaaagggtgcggatcttgccggagcagctgtatcacgttttttaccggatcgggagcaatacgcgccggaaagataaaaacgatttttcgagagtgtttgaggatatcgtagaaaatgcggattatatggagcaactgacccgggagcgctacccggagcttcgggaatacgcagtgcgcttcgcactcgttcagcgcctggattatctgctgcacatcccggtgggacggatggtggatacggatgtgttttacaaatcggtaaagcagtatctgcgcgggcatttttcggatacgcggaaaaatccgctgctggataaaaagagcagaacctatctgacgcttctgacgattgcgcccaaaaccgtgcgccgcgtgcacagctggacgatgaagctgcggggagtggagtgaaaaaaacgccgtaacatcaatctctattgagacgattttacggcgttttggcgtttgaaatttatgttacagttcactcgcgccattcgcaaaagcgcgtcttcgacgctctccgctgcttcgcagctcatttttgctcataaagtggcgctccctccgtacctttttgtaagcagattgtcatgcgagcatgacaatctgcttacaaaaaggtacgagtgaactgtaacgaatttattttacaggctttgcgcctgctttttcctgcagtttttcgatgtttctcttgaaccagttcttctttttctgattctcgggctgtaccagcgttccgcggaccgccttaacacttgttaagtagatgccgctgacggttgccttgacttcttttttcacaggaaccaggtcgaaaatcttctggtcgcagactaaggtaacgatctgcggaccgacttttgccttgacaatcggaagcttggaacggcgcatcatcttcggcgtattgtcgatgactgactgcggaagtccggcttctttgagcttcatgattttcttgtcaattacaagcatggtcacattctgcttataggcttcaatctgctgctgctgttcttcctgttttttctgcatctttcttccaagaaaataaagaacaacgactgcgacgatcagaatggcaaggatgaccagcaataccactgcccaggttttcatagtggtgaatcctcctctttctttgtactgcacagcggcgctgtctgtacggtgtgtccgcttagcattcttatagaacattctagcagaatttacggtattgtacaaggagttttgttgaagttaatagccacctggggtataatgtatccagcacgaaagaaaaacaagcgacgccgaaggcggcatttgtttttctgttacagttcactcgtaccgtttgggggcagatttcatgctcgcatgaaaatctgcttacaaaaaggtacgaagggagcgccactttatgagcaaaaatgagctgcgaagcagcggagagcgtcgaagtgcagttcatgacaatagaatgctcgcgaagcgtgcattctattgtattgcgaatggcgcgggtgaacagtaacgtttttctcgtgcggatagcgagcggatggcctgcgaagcaggcaaagaagcgcggagcgcgagtccgcgagcgttggtgaatgaggacagcgccgccttcggcgctgctgacaggaaggaacaggcagtaatgacgacgtgggtgcagttttggcaaacatttcaggaaatattccgctacacatgggcacatatggtatggatcaatctggttcttgcgattattattattttcttccagagaaaggaagcaaaatcagcgtgggcgtggctgctggcgttgaatgtgctgccgggtctgggatttttaatgtatcttctcgccgggacggacatgcacaagcggaagatgttcaagatcaaaggaatcgaagagcagataaacgatgcggtgcgccgccaggaatacagcgtcaaaagccgcgagctggagcaggaaaacccggatttgaaggatttttcggatctggtcttttttaacctggaaagtgccggatgcatgatttccggagacaatgcggtagagattttcactgacggcaacgacaaattcgatgctctgatcgaggatattaaaaatgcggaatcctatatttttttacaatattacatcataaaagatgacgtgctcttccagaggattcgggaggcactgctggaaaaagcggcacagggtgtagaaattcggatcttgtatgatgcgatgggctgtcggagcgttggaaagcacttttggaaagaaatggaaaagcagggcatccatgttgcggtctttttcccggctctgtttggcagactgcatttgcgtgtaaactacagaaatcacagaaaaattgcagtgatcgacggaaaagtggcttatgtcggcggctttaatattggcaaagagtatatcgggctggatccgaagttcgggcactggcgagatacccatctgagaatctgcggcagcgcagtcggtggacttttgctgcgctatattcaggactgggactatgcagcgagagagaatctgtttgaaaatccgaagtatttcatcctgccggaagaaaaagccggtaatgtcaaaatgcagatcatttccagcggaccggactccgaactccagagtatccgggacaattacctgcggctgatccacaaggcaaaaaagagcatttatatccagacgccatattttataccggatgaatcgatccagacggcacttctgatggcaacgatgtccggcgtggaggtcaatctgatgtttccgtgcaagccggatcatccatttgtgtattgggcgacactttcctatgtcggcgagctgatcatggcaggggcgaactgctacacctatgataatgggtttttacatgcaaaaggattgtccattgacggaaaggcgtgctgctacggaacagcgaacatggatatccggagtttcgcactcaactttgaggtcaatgccatgatttttgaccagaatatcgcaggggaaatggaacggattttccgggaagacttaaagtgctgtacgcggatcacaaaggaaatgtacaagagcagatctgtctggatccggtttaaggagcaaatcagcagactgctgtctccggtcttgtaacagcccgccaagtgtgataatatataggatattgcaattctatttactatggattttatgtccgtaagatgatgaggagatcaatttatgaaaaaatttatgacagccgttacggcagtgtctctgtctgccatgatgctggcaggctgcggcaaggcagatgtgcaggagacaactgtgcaggaaagcacaacagctgagacagaagcagcaacagaaaccgaaagcgaaaccaaggtatacccggatgaagcatatctggatggtatcaaccttggcgactttgtagagctgggcgattacaagggcgtcgatgttacggttaccaaggcagaagtaactgacgagatggtggatcagtacattcagagtgttttggacagcaacaaaaataaagaagaagtagaccgggctgtaaaggatggcgatgttgttgatatcaaatatgtcggcaaaaaggacggtgtagagtttgacggcggttcttccgacagctacgagctgaccatcggctccaatacctttatcgacggctttgaagacggcgtgatcggcatgaagaaggatgagacaaaggatttaaaccttactttcccggaggattacagcaatacagaccttgccggtgcagacgttgtattcacggtaacggtaaatcatgtttatgaagaaactgacgcggttctggacgatgctttcgtagcagcccgtaatattgacggcgtaagcacagtagcagaatatcgtcagtacgtttacgataacctgatgagctctgccaagagccagcaggaaacagagctggaaagaaatgttctggaggcggtaacggcaaatgcaaccttcaaggaaactcccgaagagatggtaagccgctattatgaccgtctggttaagaacctgaccgctactgcaagcatgtatggaatcgatctggagacctttatgtcatacagctacggtctggctgcggatgaatatgaagacgagcttcagaaatctgcacaaagcgcagcagagcagattatggttatgcaggcgatcgcagaaaaagaaggtctgaccttaaccgatgaagagctgcaggcagatctggaaagcagcgcatccgaatatggttatgattccgtagacgcttatcaggaagcgattggcgacctgcgcggctacaaagaatatctgatgtctgaaaaggtaaccaagtatctgattgagaacgcgaacgtaaccgaaacagaggcgtccacagaggaagcgaccgaagagacgacagaaactgaaaccgagacaacaacagagacagcgaccgaagcagaataagccgaggcacagctgacgcacgaggcgagtgaggagagagagcatggaactgacaagtgtaagacagttattcagagaaaaagaacagtttgccggtcagaaggtgacagtaggcggctgggtaagaagcaaccgggattccaaaaattttggattcctggttgtaaatgacggtaccttttttgagccgctgcaggttgtatacgcagcggacaagctggataattatgcagatattgccaaaatcggcgtcggagcagctgtcattgtaacaggtacgattttagagacgcccggtgcaaaacagccctttgagatgcaggcagacgaggttgtagtggaaggcacatgcggaccggattacccgctgcagaagaagcgtcacagctttgaatatctgcgtaccattgcacatctgcgtcccagaaccaatacgttccaggcagtgttcagagttcgttccctgatcgcttatgcgattcatcagttcttccaggagagagatttcgtctatgtgcacactcctctgattaccggaagcgactgcgagggcgcaggcgaaatgttccaggttacaaccctggatttgaacaacgttccgaaaaacgaagacggtactgtggattattcccaggacttcttctgcaagcccaccaacctgaccgtaagcggacagttaaacggcgaaacctatgcgatggcgtttaagaatatttatacgtttggaccgaccttccgcgcagaaaactccaataccacccgccatgcggctgagttctggatgatcgagccggaaatcgcatttgcggacttaaaggacgacatggtactggcagagtccatgctcaaatacattatccgctatgtgctggagcatgctccggaagaaatgaatttcttcaacagctttgtggataagggacttctggaaagactgaaccatgtattgaactccgatttcggacatgtgacttataccgaggcgatcaagattttggaagagcacaacgacgaattcgattataaagtatactggggctgtgacctgcagaccgaacacgagcgttatctgacggagaaggtgttcaagcgtccggtatttgtaacagactatccgaaggaaatcaaggcattctatatgaagttaaatgaggatggcaagaccgttgccgctatggactgtctggttcccggcatcggcgagatcatcggcggcagccagagagaggatagcctcgagcttctggaacagcgcatggacgagcttggactgaacaaagaggattacggcttctatctggatctgagaaaatacggctccgcaagccatgcgggctttggtcttggatttgagcgctgtgttatgtatctgaccggtatgggcaacattcgcgacgtcattcctttcccgagaacggtaaagaactgcgaattataattccagtgaactggaataaaatgttacagttcacccgcgccattcgcaaaagcgcatcttcgatgctttccgctgcttcgcagctcatttttgctcataaaatggcgctctcttcgtggtttcttgtacacagattctcatgcgagcatggaatctgcctacaagaaaccacaagtgaactggaataaaaatattgtcgagcgggatgaacttttgggtttatcctgctctttttttgttgtatactgtataaagtggaaactagtacatcgttttcgaaataactataccactcacttgcctgtgaatccgattgcacaggtataaaagcctcagcgtagcccgctacgcctgcgtttttatacctgcacactcgaatccacatcctacgcgattggtatagttatttacgaaacgctgtaccagaatacagaaaaaggaagatacggatgggaaatcatcactggaaaaaaatagcagcagttatgcttgcggcagcgatcggaatacagcctgtctatgtgcaggcaaagacacgggaagaaattcagcaggaacgagaacagaaaaagagcgagcagcagggcacgcagagtcagtataagcagagccagagcaaggtcagcagtctggaagggcagcaggacgctttggaggaagaaatacaggagctggattcccagctggtagaggtcatcgccagcgtaagtctgatgcaggatcagatcagcgataccgaaaagcagatcgtaaaggcgcaggaggactatgatgcggcgaaggcgcaggaggatgcacagtatcttgcaatgaagaagcgtctccgttacctgtatgaaaagggcgataccagctatatcgagatcctgagcaacgcctccaactggagcggcatgctcaatcaggcgaattatgtggagaagctgtatgagtacgataaacagatgctcaaccgctacatcctgattaaagaagaggttgcacagaaaaagaacgatttggaagataaaaagagcgacctggaaacgcagaaatatgagctggaagaggaacaggcttccatgcagcagatgatcgatgagaaaaagtcccaggcgaacgatttcgacgcgcaaattgcgaaagcgaagcaggaagctgcagcatataaagccttaatcaaacagcagaattccgagctggcaaggctggatgaggaagaaaacgcgatcatcaaggccgaggaagagcgtcggaaagccgaggaggctgcgaaaaaagcggcggaagaaaaagcaaaggcggaagccgaggcgaaagaaaaaggtgcaaagagcagcgattccggctcttctgacagtagctccaatcgatcaagcagctccgacagctcctcttcctcaggcagcagctccggcagttcttcgggcggcggcttaaagaccgttcctcctgcgagcggatcaagtggaagcgacattgcggcgtatgcctgccagttcgtcggaaacccgtatgtagcgggcggaacgagcctgacaaacggtgcagactgctccggatttatctgggcagtgtacaggcaatacggatacggcctgccgagaaactctgctgctatgagaagtgcaggacgcgaggtttcctatgaagctgctcaggcaggcgacatcgtctgctatgcaggccatgtggcgctgtatctgggcggcggacgaatcgtgcatgccagcacagcgagaacaggaattaagtatggatatgcgaattataagccgattctgacaattcggagaattgtgggataaaagaaaaaatgttacagttcactcgcaccattcgcaaaaaccacgagtgaactgtaacttttattcatgacaatagaatgctcgcagagcgtgcattctattgttgctttaaagactctttttcagaaacttgatcgtttcgtcgatcagctgggatacggacagatcggcggttccgatgatgtggttgttgcagcggttgaccggaagcaaaagcttctgggcatggctctgtccgacggcgaccgccatggcgggcgtcacttccccaagcagagagtctgcggacaaaatgccgaggggaccgatgataaaatccgcatcccggcaggcaacaagcacgggattttctccggttgcgccgaagtcagccccggctttgagcatggcagcggttgcggttgcgttggtgccgatggcatacagttcacagttgggcagctgctctttacagaggcgggcagtcacaagactgccgattctgccgccctgaccgtcaattactacgattttcataaatcctccatttagagacattttgcacagaaaaaataggagctgaacaatattgttcagctcaattttttatctggctcagtcgtcgttatctaaagccagtccttttttatactttgcgacagcagcctggatcttatcgttgggatcgagcagatcgctgatggaagtatcatggttcaaggtatcgatcagataagcaacgtatttgctcatatcacagttgacgtaccactcccgctttaacagctcttcaggctgataaatcaggttggtggtcaggacacggttgatattgccacatgcataagccttgtcgaatttctccataccgcttgtgaacagaccgaaggtggtgcagatgaagatcttacgggcaccgcgctgctttaatgcggatgcaacttcgagtacactttcgccggaggaaatcatgtcatcgatgatgatcatatccttgccttctacgctggtacccaggaattcgtgagcaacgatcggatttcgtccgttaacaactctggtgtagtctcttctcttatagaacatacccatatccagaccgagtacgtttgcaatgtaaattgcacgtcccataccgccttcatccgggctgataaccatcatgtggttggaatcgatctgcaggtcgggctcggtgcgcagcaggtttttgatgaactgataagaagcctgaacggtttcgaagccgtttaacgggatggagttctggactctcgggtcatgggcatcaaaggtgatgatgttgtcaacgcccatctgtacaagctcctgcagggcaagagcgcagtccagagattctctggcggttctcttatgctggcggctttcgtacaggaaaggcatgataactgtaattcttcttgcttttccccccaca

SEQ ID NO: 1035 - DNA, 15598 bp, unidentified
  source 1..15598: mol_type = unassigned DNA
ggatgcccagcacccaggtgatgaggatgccgtacaggatgccgcccttgacctttttgaccagcaggatggcggtgatgagcacgcccaccagcgcgaggatcgcacccacgccgatgctgtggaaggtctcgcccttgaagtgctgataggtaacaagggtggaatcgctgttcacgatcagctttgcgttctgcaggccgacgaatgcaacgaacagaccgatgcccacgctgacagcgctcttcagggtcatggggatggcgttgaagatggcctcacgcacattggtcaggctcagcacgatgaagatgatgccctccacaaaaacggccatcagggccagctgccagctgtaacccatggtcaggacgaccgtgtaggagaagtaggcgttcaggcccatgccaggagccagagcgaacggatagttggccagcagagccatcagggcagtgccaacgaacgatgccagcgaggtggcgatcaggaccgcattggcatccatgcccgaagcggacaggatgctggggttgaccgcaaggatgtaggccatcgtcataaaggtggtaacacccgccatgagttcggtcttgacatcggtgtggttttctttcaggtgaaagatcttttctaacatgaaagttcctcctgtgttatcagaaaaataaaaaccgccgcgtgggaaccggcggaaacaacagctcccattgtagcagaactgtttttccctgtccatgggcgaaatacagaaaattcacgaaaagttcaaactttcttgtatgggtatgacttatccgagggctttttggcgttttatggaattttttctttccagttatggagtttgtgcatgtcggagaaagatttgagtgtcatttcatacggctcactttgtgttccatgagatattccgcagttttgtcgtcagcgtaatcaggctgcgcattcaggcgggcaatatcctcttctgtgatgttggcatagaatgcacgctctgccttgagatagtcctgatagttttccttcgtcagcagccctaccccatcgtgcatccaccggagcatggcactgttgacccattcaccgtagtgaatcgtatccttatagttgttcaggtctgtggtcagggcggtatcattgttgaacgaatacagatgaatgttcggatgctccagaatcagttcaatgatatactgttctgcttccagctgccggtaaagagttccttcattggtgatactgttccaccacgcaatgctgtatggtgagaagaaatagtagaagtccacatccgggtactgatcggccaatgaagttacgttctctgtgatcagctgtgtaatggtctgcttttcctcttcggtcagatgcttttcttcggcaggaacagtatagacaagaccgttcggtgccaccgtgtcgatgccaaacgtataatactgattccatctcgcgtaatcatcgaacgaggtgatgcccggggtaaagcccggtgcatcattttgcctcatcatggcataaacacggccaaagagcacatctttgttatacgcatattggacatcattgaacgggttttcgtcataaagataggtcggatatttgcctagatcctcccgcatccggttcggggaatcgaaaaaaaagcccatatccaggcagcggacaatggttttcaggttcgggttatgccgcagggcaattttcagattgtcgttcatctccttgtaggaaccgccggaataggaaaccttgacagagtggacatcgaagatctcatcaaactccgaagtcttaaaattttccgtcatagaggttccggtgatcagggcgttataatcaaagtgcttgctgataccgtcattctggctgcgctggttgttcagcacatagtaataggcgccggtatccggcttgtgataatgaaaataaggatcgactttatagacctcatatccgatcagaccaagggccgctaccacaagaacagcccatccggccagccatgtttttgctttcatgcaagattcccctctcctcagaaattgaaataaacgaatacagattccgcactcaggcagataaagctccagacaaaggcaactgccgccaacaacatcgtaaaaccagagttctgcatccgtttcttataattgttttcaggaacaaggcagagtaacagggagccaaaaacaaacaacagcatccagaagccgtgtattccgttggtcagtctgccgatatggagcacatctgtcaggaagcctgcctctggtagaacaaagctgttgagcagaccctcactgatcgaggtgctgttaaactgtgcaatcgttttgatgatctgcttccactgtccgatggaatctgagcggaacagcagccagaggacgttgacgcagaaaaaggaaactgcccagcggacaggctcaaaaatcttttcctccagctttccgaatatccggtcaaataccatcatcaggccatgcagaatgccccagagcaggaacgtccagttcgcaccatgccatataccgctgataacaaaaatgatcatggtgttcagatatgtaaagaacaggcctttccgactgccgcccagtggaatataaacatatttcgtaaagaacttcgtcagcgagatatgccagcgcttccagaaatcacggatagacagcgctttgtagggcgaatcgaagttgatggggagatcgatgttcaacatcatggaaacaccaacagccatatcactgtaaccgctgaaatcaaaatagatttcaaacgtataaaacagcatcaccaaaagccagtccattgccgtggccacgccaaggttactgtacccccatgcgacagctgcagcaaaggtgtcagcaagcatgaccttcttgaacaggccgaagctgaaaatttttacaccgcaggccaggttgtcccagttgatcttttttcggtcaagatcattgagctgctccacaaagtccaccggttccatcagcgggcccatcagcagcttgggaaaatatgtgatgtaggccagataatcgatcaagtctgctttgagcagttccttacggtacaccgagacaagatatgcgatttgttggaacgtgaaaaaactgatgcccactggtaaaagcagagttttcagggcatggtctgtatggaatagtgcattgtaattggtgattgcaaagttgaggtacttaaaatagagcaacagcgcagcattgatgcagaccggtactgccaggaaaaaacgccgccaacggagcttttcgctctcaagcagttttgaaaagatataattgaccagcaggctcagcccaaggggcagcagtgttctcggttcagcatacgcatagaaaaacaggctggctccgataagcacaaatttgctccatacaggatggacacgccccagcgtaaaatagcccagtaggacaaggggcagaaagcacaggatgaacagaaacgaattgaactgcatagattcctccggatttcaagaaagtgtacttttttgaaatccacggcatagaggatacttccgtgcaagtgcttgcaaaatcactcaatatatgtagattttagagaaaactgtgctataataatcattgtttgtctgaaaataaccacttgcggaaaagtacacttttttagagaggcttctctttctcctgctttttcacccgataataaaagctgctcacaggcatactgcacgcttctgcggcttgcttgccggaaagttctccttttttccaacgttcgaccgccagaaaaaacgacttcggcaacggctttggcggtctgcccagacgaacccctctggcttttgcagcagcaattccctcagcctgccgctgacggatattggagcgctcgttttctgccacaaaggagagcacctgcaaaacgatatcactcaagaatgttcccatcagatctttgccgcgccgggtgtccagcagcggcatgtccagcacaacgatatccacctctctgtctttggccagatacctccactgcgccagaatctcgtcgtaattgcggcccagccggtcaatgcttttgacatagagcacatcgtcttttttgatgcggcgcaaaagtgcctgatactgtggacggtcaaaatccttgccggactgcttatcaaagtaaatgttctgctccggaattccgaaggcgcgcagcgccagtttttggcgcgcttcattctgttcccgcgtgctgaccctgatatatccatagtctgtatttgcgataaaatccaccttctattcacaagaaagcgcccccgctcactgcgatcttacagtgaacgggggcgctgtgcttttcagggaactcagtcgttgatctcagggaagccttccagcttggaggtgcactgggggcagcgcacggccttgatggagatctcgctctggcagtaggggcagatcttggtggtcggctccgcaggagcttcctcggcctcttccttcttcttgttgaacacggcgttgaaggccttcagcaccaggaacagcacaaaggcaacgatcaggaaattgatgatcgcgctgatgaaagagccgatcttcagatcgacatcgccgatcttgacaacaacttcagagaagtcgttgttgaagaacagaccgatcagcggattgatgacatcgcccaccagagaattcacgattgccgtgaatgccgagccgacgaccacaccaactgccatatccagcacgttgccgcgcatggcaaaggccttgaactcctcaaaaaactttttgacacccttgatcttttgttctgccatattgcaataccgctccttttcacaccccgcaatgggattttattggttctataataatagaaaagagcggattttgcaagaaaaaatctccgtaggcccgagaggcttacacctgatgctctgcgatccactggcccatctgctgggcgatggccttgatcgagccatcctcaaagggaaccttcagcccggcggtctgcatcagctctgtgtagctggccagaccggcgcggcgcaccagcttgaggtagcgctcccaggcatccttgtggtccttgaggctcagcaggaagaactgcagcgcggccatggtggacaggcagtaatcaatatagtagaaggggcactcatagatgtggagctgacgctgccagccggcaccgcggccgtagaagggcaggttgtcgaagtcgatccaggggcggtacttgtgctccagttccagccagacggcgttgcgctcatccggggtgaggtcggggttctggtacatcctgtgctggaactcgtccacgatgcagccataggccaggaagaggaagctgtcctcggcgtggagcagggcgtatttctcagtgtccttgccaaaaagcaggtggtgccagggagccgtcaggaactccatggccatagagtggatctcggcgctctccatgccggggcactcgaggtctgcggggaccttggggtcacgctcggccacatagccctcaaaggcgtggccgcactcgtgggtcagcacgtccacatcgccggaggtgttgttccagttggcaaagatgaagggggccttgtagctgggcaggctggtcatatagccgccggacatcttgccggggcggctctccacgtcgaacagctcattgtcctgcatgaagtcaatgaattctgcggtctcggggctcagctcgtggtacatggtgcgggcggcggccatccgggcatcgtagccggggatgggagaggggttgccgtcctgaaacgccacaggcaggtcggagaaggtcaggtgggagatgccggtgcgcttgcagcgcagctcgatcacctttttcagctcgggcaccacatcgctggccacctggtcgcggaacttccggatctcggcagggccgtagccgatgcggttcatccgtacataggaaagctcgctgtaatcgtggtagcccaggatctgcgcctgtgcgttcaggttcttgacgatcttagtgtacaggccgtccagctcgtcacggtgggcatcgaaatacgcggcctcggcctcgtaggcggcgcggcggacggcagggtccaggttctccttataggggcccagctggggaatggtcagctgcttgccgtcaaactcgaccagtgcgccgccgtacacctgctggtactggctgacaagggcgttgtactccttctgcagctccacggtgcggtcatccatgcccagcacggcattcttcataccggccacgcaggtggtgccaaaggcttcggtcagcgcgtccacatgggcgttggccagaaatgcccggctgatctccacccgtgcgttctccacggcgggaccgttggcatcaaagaagtcctgctcggccttccaataagcgtcacgggtgtcgcaggtgtagtggatgcttgccagctgtgcggcggtgctgtaatcggcaaaggcgcggctctgctcgtagtaaacattcaccagctcctcgccgctggcggccccggcggccttggcggccagtgccttgcactggcccagcagggcatcaatgtccgggcgggtataactcatttcgctgaatttcatgggatccatcctttcgttccttcttgtctgagtgctgaacccatattagcacgtttggggaaaaagggcaatggaaaagaggaactgcccctgtggaggaaagtgtgtcagaattgtaaaagataaaatattttagctattattcttgacttatccgacgattcagatataatggtcgtgttcgcaagaaacctcaaactttttagataataaaaatacaaaccaatcaaaggagaatattaccatgacgtttgaagaaatgaagaagatcgttgttgacaccctgaactgcgaggaggacaaggtgaccatggaggccagcctgactgaggatctggaggccgacagcctggatgccgtggagctgaacatggcgctggaggatgcctgcggtgtgtccatcccggacgaggagctggcaaagctcaagaccgtgggtgacatctacaactacatcaccgcacatatctgaggaaacatgcgatgaatgatatccgagatctgctccccaaccggatgcgggagcgcactttccagctgaaggccaagcgggatgccggagctgtctggcacgagccgcagtttgtggagtgcaagcagtgcggccgccgcgctgcccgcaccctgtggggcaaaagcctgtatgtctgccccaactgcggctatcacatgcccattggcgggtattaccggctcagtctggtgctggatcacggcagtttccgggaactggacgctgaccttgatccgcaggatgtgctgaacttccccggatacggggaaaaacttgcctccgcccagaacaagacaggcctgcacgaagctgctgtcaccgccgtcggccgcattggcggcgtggcctgtgtggcagccgtgctggacagccggttctttatgggcagcatgagcacggctgtgggcgagaagatcacccgcgccgtggagtacgccactgccaagcgcctgcctctggtcatcttttcggccagcggcggcgcgcggatgcaggagggcattttcagcctgatgcagatggccaagaccagcgccgccatccagcgcttttccgcaaagggcgggctgtacgtcagtgtgctgacccaccccaccaccggcggcgtgaccgccagctttgcaagcctgggcgatatcatgctggccgaaccgggggcactcatcggctttgccggcccccgtgtcattgagcagaccatcggtgaaaagctgcccgccgggttccagcgcagcgaattccagatggaacacggctttgtggatcaggtggtgccccgcagtcagctgcgggatacgctgatccaggtcctgcagcttcatgccggagggaaacacgaatgataaaagatattttggagcagctggccccgctggacgcacagatcgccgcgctgaagggcagcggcagtgacatggaggccattaccgcccatgcgtccgaactggcagagctggcggtggaagaggacgagatcctgcgctcctgcggcccgctgactgccgaggatcgggtctttctggcccgtcacccggagcgtccgcacatcgacgagacgatctctgccctgttcacggatttctttgagcagcgcggcgaccggcagtgcaaggaggacgcggccattctgggcggcgtggcccgtttccacgggatgccggtgacggtcatcggccaccgcaagggttccacgctggaggaaaatctggcctgcaactttggaatgccggggccggagggttaccgcaaggctctgcgcctgatgaagcaggctgaaaaattcggccgtcccatcatcacctttatcgacacgccgggcgcttaccccggcaaggatgccgaggagcgggggcagggcgaggccattgcccggaatctgatggagatgagcggcctgacggtgccggtcatcgccgtggtcaccggcgagggttcctccggcggcgcgctggcactgggtgtggccaaccacatcctcatgctggaaaacgcggtctactcagtgctgagtcccgagggctttgccagcatcctgtggaaggactcctcccgcagcggcgaggcctgtgagatgatgaagctgacggcgcaggatctgtaccgcggcggcatcgtggaagaagtgatcccggagccggtgggcggtgcccagcgctgccacgcggccctgtttgagcgcatggatgccgctctgcgtgctcacctgaaagaattgtgccgcatgagcgaccggcagctggccgatcagcgctataaaaagtaccgccagatcggagaaacgaggaacgcatgaatggtttacagctgatcgccaccggcggggcacttcccggacggacgatcaccaatgacgcgctgagccgcatggtggacaccagtgacgcatggatcaccagccgcaccggcatccgcacccggcactggtgtaccgaggacgaatctgccgccacgctggccattgcggctgcgcggcaggcccttgaccgcagcggccttgccccggcggacattgcctgctgtgtctgcgcgaccctttctgccccggatgccacccccagcgtggcctgtcaggtacaggcggcgctgggcctgcccgaaaaccggcccgcactggacatcaacgcggcctgttccggttttctctatggcatggccgtggcgcggggaatgctgacgactctgggcgggcaatatgccctcgtcatcgggtgcgaagcactttcccgcctgatggaccccaccgaccgctccacctgcgtgctgttcggcgacggggccggagccgccattttccggctggcagataccccctttgcgttgacgctgggggcacgcggcagtgatgttctccatgcgggcgggccgagccggaaaggctctgcccccatcaccatggacggcaaggcggtattccgctttgcggtggatgccctgcccaagtgcctgcacacggtgctggacgagacccagctgaccctcgaggatctgtcgtgggtggtctgccatcaggccaacagccgcatcatcgaccattgcatcaaggccctgcaggccgacccggcaaaattttataagaacatggatcgccacggcaacaccagcgccgccagcattccggtcgccctcaacgagctggccgagagcgggcagctgaccccgggcagaccgctggcctgcatcggctttggcggcggcctgacctggggcggcgcgatcctgcaatataaagagtgaatgcgtcagcgttccggcagctttctcgaaacgggccgtcccaacggccaacccacagagaagccccggcccgctgactggaaacatcatatgaaattactgaacgagatcttaggaacgaaataccccatcatccagggcggcatggcaaacattgccaccggcgagtttgccgccgcctgctccaatgcaggtgcactgggcattatcggtgcgggcggcatgaatgccgacaccctgcgcgaaaatatccgccggtgcaaacagctcactgacaagccctttggcgtgaacatcatgctgatgcacctgcaggcagacgagtttgcccagatcgttgtggaagaaggcgtgcaggtggtcaccaccggcgcaggcaacccgggcaaatatgttcccatgtggaaagcggcgggcatcaaggtgatccccgtggtggctgccgctgtgctggcaaagcatctggagaagctgggcatcgatgccgtgatcgccgaagggaccgagagcggcggccatgtgggcgagatggccaccatggcactggtgccgcaggtggtggacgcagtggatctgcccgtcattgcggcgggcggcattgccgacggccgtcagctggcagccgcccttgcgctgggtgcctgcggcgtgcaggtgggcacctgcctgctggtgagcgaggagtgccccatccacgaaaactacaaggctgccctgctcaatgccaaggacagcgataccatcgtgaccggacgcatcggcggttccccggtccgggtgctgaaaaaccggatgagccgtgaatatgtccggcaggaaaaggccggtgccgataagatggagctggaaaagtacaccctgggcagtctgcgccgggccgtgtttgaaggcaacacctccaccggcagtctgatggccggtcaggtggccggaatgctccacgaggtgcgccctgtggcggacattctggatgacctgtggaacggcgggaggcagcgtatccacgcgctgagcgaggaatgctgacgctcggaaagaaagtcctgtctgtgcccatcctgcagggcggcatgggcgtgggcgtttctctgggcgggctggccggtgccgtggcggcctgcggcggcatggggtgcatctccaccgccgatgcaggctaccgggagccggactttgcccgtgacccggccagcgccaaccaccgcgccctgaccgctgagatccggaaagcaaagcagatcgcaaacggtgccggtatggtggccatcaatgcaatggtggccacgcaggactacgccgccgccatccgcaccgcggtggaagcgggcgtggacgctgtggtgtccggcgcgggtctgccgctggagctgcccggccttgtgaacacgatggaggtcgccatcgcgcccatcgtttccagcggacgggcggcaaagctcatcctgcgccgctgggccaaggagttcggccgcaccgctgattttgtggtcattgagggctgcaaggcaggcggtcatctcggctttgcggagcaggacctgttctccggaagctgccagacgctggatgagatcctgccggaggtgctggccgaggtaaagccctatgaggcgcagttcggccacagcatccccgtgtttgtggcgggcggcgtgtacaccggggccgatctggctcactttaccagactgggtgccgcaggcgttcagcttgccacccgctttatcaccacctacgaatgcgatgcatcccaggggtacaaggacgttctgctgaatgcaggttctgaggatgtgcgcatcatccacagcccggtcgggatgccgggccgggcgctgaacacgccgctggtgcaggccatggcggagggcagacgcttcccgccccggcactgtgcccgctgcctgaagacctgcgaccccgccaaggtgccctactgcatcacccatgcactgatcgaagcggtcaagggcaacctggaggaaggacttttcttctgcggggccaatgtgggcaggctggaccggatgtacactgtccgtgagctgatggatgaacttgtgaccgaatggaggcaaaaccgatgaagcttgctgttttatatgccggtcagggtgcccagcaccccggcatgggcaaagaattttacgaagcatcttccgctttccgtgccgcgttcgacgctgcagaccttccgtttgatctgcaccgcgtctgcttcgacgacccggacggcgttctgaatcagaccgaatacacccagccctgcatggtggcctttgcctgcggcgtatccgccgttctggccgagcagggggtcaagcctgcttatgtggccggtctctctctgggcgaatattccgcgctggaagccgccggtgtattcaccgccaagcaggccattgagctggcagcctaccgcggcaaagccatggccgacgcggccagcggcatcgactgcggcatgaccgcagtgctgaacctcgaccgggtcccccttgcagaatgctgtgagcaggcatccgcgctgggctgtgtgcagatctgcaactacaattgcccgggccagctggtcattggcggcgaaaaggccgcagtggacaaggctgcagagcttgcaaagcaggccggtgcccgccggtgcatcccgctcaaggtgagcggaccgttccacacccgtctgatggctcccgccggggatgccctggcaaagcgctttgccgccgaaccctttggcgaaatgagcgttccggtgctgttcaactgcctgggccgtgaaaaagccgagagcgacagcatcccggccctgctggtccggcaggtacagagcagtgtctacatggaggacaccctgcaccgtctgggtgagctgggtgtggatcacattctggaggtcggccccggcaatgcgctctccggctttgtgaaaaagactctgcccggtgtgacttgtgtgtcggtggagaccccggcgcagctggacaccgttctgaacgcatggaaggaagaacaatgaacgaagaaaccatcatccgtaccgccgttgtgaccggcggaagccggggaatcggccgggccgtgtgcgtacagcttgcccggcagggctgccatgtggtggtcaactactgccacggcgaagcggccgctgccgagaccgtgtctctgtgcagggccgaaggcgcgcaggctgtggccgtgcaggccgatgtttccaccgccgagggctgcaaaaagctctttgaggatgcggtgaacgcctttggccgggtggatatccttgtgaacaatgcaggcatcacccgggacaacctgatcctgcgcatgtccgaagcagactttgatgctgtgctggacgcaaacctcaagggtgcgttcctctgctgcaaggaagcggcccgccggatggtgcgccagcgctggggccggatcatcaatctgagcagcgtcgttgccctgcggggcaatgcaggccagacgaattacgccgccagcaaggccgggctcatcggcctgaccaaaagcctggcccgggagctggccagccgcaatgtgacagtaaacgctgttgcacccggctttattgaaactgatatgaccgccgccctgccggaggctgtccgcaccgaaatggcaaaggacatcccggcaggccgcgcaggccagccggaggacgtggcaaacgcggtggcgttttttgccgcagaacaaagcagctatctcaccgggcaggtgctctgtgtggacggcggcatggcaatgtaaaaggagaaattctctatggaaaaacgcagagtcgtgatcaccggtctgggcaccgtgaacccgctgggcaacactgctgccgacagctgggctgccgcaaaggcaggccggtgcggcattggccccatcacccagtttgacaccaccgatttgaagtgcaagctggccggtgaagtgaaaaactttgaccccgagaccgttgtggacaaaaaggaagcccgcaagatggcccgcttcaccctgctggcactggctgctgcagccgaggccattgccgacagcggcctgaacacggaagcagaggccaaaaacatcggtgtggtcctttccagcggcattggcggcctgcccaccatcgaggagcagcacacccgcggggaagaaaaaggcatggagaaggtcagcccctactttgtgcctatgtccattgccaacatggcggcggcacaggtggccatccgttttggcctgaagggcatgtgcacctgcccggtcacggcctgcgccggcggcaccaatgctgtgggcgatgccttccaccgcatccgggacggttacgagactgccatggtctgcggcggtgccgaaagctgcatcagcccgctgggcatcggcggttttaccagcatgaaggcgctttccaccgccaccgacccggatgctgccagcctgccctttgatgcccgccgcggcggtttcgtgatgggcgagggcagcggtgtgctggttctggaagagctggagcacgcccgggcacgcggtgcgcatatctacgccgaggtggtgggctatggtgccaactgcgatgcctaccattttactgcaccggctcccggcggcacaggtgccatcgactgcatgaagctgacgctggccgatgcaggcattgccccggagcaggtggatcacatcaacgcccacggaaccggcacccacatgaacgatgcctgcgagacggctgccatccatgccgtgttcggtgagcacgcaaagcagctgaccgtggtcagcaccaagagcatgaccggccacctgctgggtggtgcgggcggcatcgaggccgtattcacggcgctggccctgcgagaccagtttgccccgcccaccatccactacgagcagcctgacccggaatgcgatctggactatgtgcccaatgcaggccgtgcccaggccatgacctacgcactgagcaacagtttgggctttggcgggcacaacgcctgcatcgccctacgcagatgggagggctgagccatggcagaaccgcgcatcgtgcgggagaacgcaaacgctctgaacagtgagcagatcgcagcccttctgccccaccgctatccctttgccctcgtggaccgcgtcctggactacgagccggggcagtgggccattggccgcaagtgcgtttcccgcaatgaggaattcttctgcggtcactttccgggccaaccggtcatgccgggggtgctgatcctggaagcactggcccagaccggagccgtggcggcgttgagcgttcccgaaaacaaaggcaaactggccctcttcggcggcatcaagaatgcccgcttccgcaaacaggtcaccccaggggatgttcttacgctccattgtgagctggtggaacagcgcggccctgtgggcatcgggaaagcgtctgcttatgtggatggcaagtgcgctgccacagcggagctgacctttgtgctgaccgaagcaaacacaggggcttaaggcgctttgtgcgcagcggtcgcccccaataccatatcgtatataaaaggcaggataccatcgccatgatgatatcctgcctttgttcgttcctgtttaccgttctgcatactctcggcatagagaacatcttgtgaaacaaaaaagtacccgaaccctttttcgtaaagaatcgggttcgggtacaaactgtatggtggacggtacaggactcgaacctgtgacctcctgcacgtcaagc

SEQ ID NO: 1036 - DNA, 6708 bp, unidentified
  source 1..6708: mol_type = unassigned DNA
ttagtaggtgatgccctgagccatcatagcggtggcgaccttcaggaagccggcgcagtttgcaccgaccatcaggttgccctcggaaccggcagccacagaagcgtcgtaggaagcgtggaagatgccctccatgatgcccttcagcttggcatccacttcctcaaagctccagctcagacgctcggagttctggctcatctccagaccggaggtagccacgccgcctgcgttggaagcctttgcgggtccgtacaggatgccgttggacaggtagacctcgatggcctccggggtgctgggcatgttggcgccctcgcacacgacggtgcagccgccctttaccagagcctcggcggactccttgttgatctcgttctgggtagcgcagggcagggcgatgtcgcaggggacagtccagaccttggtgcagtcagcaacataggtcgcatccttgtgggtctcagcgtactccttgatgcggccgcggcggacttccttcagatccttgacgtaggccagatcgatgccgttggggtcgtagacatagccgttggagtcggacatggtgacgaccttggcacccagctgggtggccttctcgcaggcgtagatggcgacgttgccggagccggagatcaccacggtcttgccctcgaagctgtcgttgcgcatacacttcagagcctcagcagtgaagtagcacaggccgtagccggtggcctcggtacgggccagagagccgccgaaagtcaggcccttgccggtgagcataccgccctgaaaactgttggtcaggcgcttgtactggccgaacatatagccgacctcgcggccgccgacgccgatgtcaccggcggggcagtccacgaactggccgatgtggcggtacagctcggtcatgaagctctggcagaagcgcatcacttccatgtcgctcttgccgtgggggtcaaagtcagagccgcccttgccgccgcccatgggcagggtggtcaggctgttcttgaaggtctgctcaaagccgaggaacttcaggatgccctgattgacagaggggtggaagcgcaggccgcccttgtaggggccgatggcgctgttgaactggacgcggtagccgcggttcacctggaccttgccctgatcatcgacccaaggcacacggaaggagatgatgcgctccggctcgaccagacgctcgatgaggccggccttctcgtactcggggtgcttctccacgacgggctggatgctctccagcacctcgcggacagcctgcaggaactcaggctcgttggcattgcgcttctcgaggccctcgtagacacgcttcagatattcattcgtcagcatagtaagatactccttttcccttaactctatcgtgtagctctatcatgaggccccggctctcccgtttccacggcgaggacagcgaacctcagcacacttcgttattataaagctttatccgcagatttacaagatggcccgccctgcaaaagctggaaaatctttcaaaaaagctgcagaaaagatgaacatacttcacaaaaaagaacgggtgcttcaaaaaacggcgataacgcctgattttgcgaaagaataaaaatccccctgcaccggcccgggaagggcggtgcaggggggataagtcttacttcagcagcttctcgcaggcgtcagcggcaccctcgaggaactgtccgccgtaggtctcgatcatgccggcgtcggacagtgcggccagctgggggtcgatggggcacttggccagcacgggcaggtgatgctttgcggccacctcgtccacatggctgtcgccgaacacattgatgtgcttgccgcagtcggggcagacgatgtagctcatgttctcgacgatgcccagcataggcaccttcatcatctcggccatgttcacagccttggcgacgatcatgctcaccagctcctgcgggcttgccacgacgacgatgccgtctacaggcaggctctggaagacggtcaggggcacatcgcccgttcccggaggcatatccacgaacaggaaatcgacgtccttccagaccacatcggtccagaactgcttgaccgcaccggcgatgacggggccgcgccagacgacggggtcctcttcgttctccaccagcaggttgatgctcatgacgtcgatgcccatccggctctggatgggccagcagcccttgtcgtccgccatggcgcggccatggatgccgaacagcttcgggatggacgggccggtgatgtcggcgtcgaggatgccgcagtggtagccgcggcgtgccatggcgcaggccagcagggcgctggtcatgctcttgccgacgccgcccttgccggacacgacgccgatgaccttcttgacgctgctgttagggttgggggcgtcatgctggggtgcagcattgcgggaagaacacgctgccccgcagttggagcagtcatgggtacattcttcgctcattgtctcattgcgcacggccgtggtgccggggtgcgcttcctccttgcattcttagatcctgtctggcagaaaacgctccgccagatgcaatatatatcatatcataaaactgggaaagaaacaacccacgccgccgctcatatttcccagagcggcgtgcatacctataaaaggatacgagcaggaaagggagggggcgcagtggggaagagctatctgaaaaacgcggccctgatgaccggagcagatgtcctgctccggctggcagggatggggctgcgcatctggctggcgaacgcgctgggcggcgaggggatggggctgtatcagctggtgctggcggtctactcgcttttcgtcacgctggcgacggcaggcgtatcggtggcggccacccgcctgatggccgaagagctggcccgaagcccggccgaggcccgggggatgctgcgccgtcttctgctggcgggggccgggctgggagtgacggcgttggcggcccagttcggtctggccggcctcgccgcacggtggtggctgggagatgcccgggcggcgggggcattgcgcgtctcgtcgctgggcctgccgtggatggcggtgtcgtcggtgctgcggggctttttcatcgcccgacggcgggtcgagccgaatgtcctgagccagctggctgagcagaccgtccgcatcggcatcgtctggaccgcgctgggccgggccgacgctctcggatgggatgcggggcagcgctgtacggcagtgctgggcgcaacggcggccagcgaggccgtcagcgccggtctgatggccctgttctactgccgggaggcccgccgatgcttcggctcacagcctgtacagcgtccccatgacccggggcggcggctctgggacatcctctggccggtggagggcgggcgatgtctcgccagtgccctccacaccgccgagaatatgttggtcccagcctgtcttgcggtctatctgcaatgctccggcgggcgtgccgaggctgtgacccagtacggaaacctgaaagggatggccctgcccctgctgacctttcccttcgggctgctggggagtctgtccgtcctcctgatgcccgagatcacccaagcccatctccgggggcagagcaggcgcctctccgtcctcatcgaccggatgctgcggctcacaggctatttttcggcgctggcgggggcagcattctgggtgtggggacagccgctggccgaggcactctacggcagcgcggaggcgggcagctatctcgtcatcctcggcccggccatgccgctgatgtacctcgagagcatggtggacggcgcgatgaaggggatgggagagcagaaagccgtcttccggtatagtatgtgggactcctgccttcgcatcgcgggggtggtgctcctgctgccccggttcgggatgaaggggtttctcttcgtgatcctgctgtccagcctctacacctgcgccgccaacaccgggcggctgctgtccagctgcggcctgccgctgcgactgtggcggtggctgggggcgccgggtcttgcggggacggccggtgccggagcggggctggcgctgcggaagctcctgaccccatggctggcgagaggagtgcccgcgcagctggcggcggtggcgctgggcggtgcggggatgacgctggtctgctttgcggcggcatggccgctgggcctcggcgaggagctgcgggacgtggcggcaggggagagaagacacaaaagcgctggacatggggagaagaatcgagtataatgatacagatacgatggggcgataggcccttgggtcgaaaaaacggcggctggcgtctctccgacaccggccctgatgcaaaagaggactttttgtgaaggaaaagaaaacaagtatgctgcaggtgctggcccgccgggcctttctggtggtgctggacgcagccatcgtagccttcagcttttattttgcgctcctgctccgcgcagacggcgcagtcgaggcctcgtggtggcctcacaaccgtgccctgctctacgcgaacctgccgtggatcgtggcggtctatctgctcagcttcttgggcgggaggctctacaccatcctctggaaatacgccggagagcgggacctcatccgtctggctgggatgatcgctgccccgacggtcgtggtgtatctggtcaaccgctgcttcatccatggcgtgctcttcaactcggccaacgcgatggcttcggtgctcatcttcctgctcgtcggcgggagccgtctggcgtggcggctcttcctgaaccacccgctgggcgagcggctgcggggcaataccagcaaagaccccaaccgccctgtgatgatcgtgggcgcgggcgaggccggtgcgtgggccatcaacgtctgcaagagcaacggcagctacggccacccggtggtggcggtggacgatgaccccgccaagctgggccagaccatccacggcgtcccggtgaagggtacgctggaggagatccccgacctgtgcacccgctacagcatccacaccatcatcattgccatcccgaccctgcggggcagccgcctgaaccatgtcatcgacctctgcgtctccacccactgtgcggtgcagatgctcagcgacccccagcttgtgggggcaggcgcaccccagcagggggcgttccgtgagctgaataccgccgacttcctctcccgtgaggaggtcacgctggacacggcccagatctcgggctacctcaccggcaagaccgtgctggtgacgggcggcggcggcagcatcggcagcgagctttgccgtcaggtcatgcgcttcagacccgcgaagctgctcatcttcgatatttacgagaactgcgcctacgagctgcagatggaactgcagcagaagtatggccgcgatgtgcccatcacggtgctggtgggttccatccgggacaaggcccgtctggacgaggtctttgagacctaccaccccacggtggtgttccacgccgcggcccacaagcacgtcccgctcatggagatcagccccgccgaggccgtcaagaacaacgtcttcggcaccaagaacctgctggtcagtgccagcgagcacggcgtggagcggctggtgcagctttccaccgataaggccgtcaaccccaccagcgtcatgggctgcaccaagcgcctgtgcgagatgctcatccagacctttgcgggcaacaccgacatgaagtgcgtggccgtccgcttcggcaacgtgctgggcagccacggcagcgtcatcccgctgttcgaggcgcagatcaaaaagggcggccccgtcaccctgactgaccccaacatcgagcgctatttcatgaccatcccggaggccgcacagctggtgctgcaggccggcgcattggctgagagcggcagcatctatgtgctggatatgggtgagccggtcaagatcatggatctcgcaaagcagctcatccgtttctacggctatgagccgggcgtgaatatggacatcaagatcgtgggtctccgccccggcgagaagctctacgaagagctgatgatggacgaggaacaggacaagatgcgccgtaccggccacaataagatcttcgtggctccgccccggagcatcgaccttggcgagttctatcagcagcttcaggagctgtctgccgccgccgagcacaacgacgacaacgtcgtggcccagctggccaagatggtgcctacctttacccccacccgggagaacctcaagctgtgaactgctggctgcacggcattcggccgtgtaaaaatatatgagagggatgtatatcatggaaaagaaaccgtttttgactgagtcgatggctcaggacatcattcaggacgtgcccacccccttccacgtctacgacgagaaaggcatccgggagaacgcccgccgcatcaacaaggccttcagctggaataagggcttccgcgagtatttcgcggtcaaggctctgcccaaccccgtcatcctccagatcctgaaggaagagggctgcggcgtggactgctcctccctgaccgagctgatgctcagtgaggtgtgcggcttcagcggcagcgacatcatgttctcctccaaccagacccccgtggaggacatgaagaaggcctacgagctgggcgcttatatcaacctcgacgacgccacgatggtggacttcctc

SEQ ID NO: 1037 - DNA, 10367 bp, unidentified
  source 1..10367: mol_type = unassigned DNA
tcagtcctcaaacaggggcttcataaagggcaaaaagtccagcgttgcaaagtaatcgcgaggggtctgggcgcggcggatcagccggtgagagccgtcctcacacagcagcacctcggcgcagtgcagcttgccgttgtagttgtagcccatagcggagccgtgggcaccggtatcatggatgtaaaggatgtccccgatgtcgatcttgggcagcatccggtcaacggcaaacttgtcgttgttctcgcacagaccgcccaccacgtcgtacttgtggtcgcagggctcgttttccttgcccagcacggtgatgtggtgataagcgccgtacatggcggggcgcatcaggtttgcggcgcaggcgtccagaccgatgtactccttataaatgtgcttttcgtggatgacggtggacaccagtgcgccgtaggggccggtggtaaagcggcccatctcgctgaagatggccacatcgcccatgccggcgggcacaaggatttcctcaaactttttgcgcacaccctcgccaatggccatgatgtcgttctcggtctgctccgggcggtacgggatgcccacgccgccggacaggttgatgtagctgatgtgcgcaccggtagcctgctgcacccggacagccagctggaacaggatgcctgccagctccgggtagtaggcgtccgagatggtgttggaggccaagaaagcatggatgccgaactgctttgcgcccttctgcatcagctttttgtagctgtcgatcatctgctgctcggtcataccgtacttggcatcgccgggcttgtccatgacctgaaagccctcttcgctctcgcccagctggaaggtcccgccggggttatagcggcagaagatctcctgcggcaccccggccacccgctccagaaactccaccatggtggcgtcgtccagattgatgtaggcgcccagctcgtaggccttctgcatatcctccacaggggtctggttggaggagaacatgatctcgtggccggtaaagccgcaggcctcgctgagcatcagctcggtcagggaggagcagtccacgccgcagccctcctccttaaggatctgcaggatgacagggttcggcagtgccttgaccgcaaagtactccttgaagcccttgttccagctgaaggccttgttgatgcggcggacattctcccggatgcccttctcgtcgtagacgtggaacggcgtgggcacatcctcgatgatctgctgtgccatcgcctcggtcagaaacggtttcttttccataataacatccctctcgttttgcgcagcccggcatgttccggcctgcggtctatcccatgcggcccagtgccgcaattcaagctgttacagtttcaggttctcccgggtgggggtaaaggtggggatcatggccgccagctggcgcaccacaccctcatcgttgtgggcagcagcggcttccagcgcctgcagctgctcgtagaactcggccagatcaatggtgcgggggcttgccacaaagatcttgttgtgctgggtgcggcgcatcttgtcctgctcctcgtccatcatcagctcttcgtaaagcttttcaccggggcgcaggcccacgatcttgatctccatattcacgcccggctcgtagccgtaaaagcggatgagctgcttggccagatccataatgcgcaccggctcgcccatatccagcacatagatattgccgctttcggccagcgcacccgcctgcagcaccagctgggctgcttccgggatggtcataaagtagcgcacgatgttggggtcggtcagagtgaccggcccgccctttttgatctgcgcttcaaacagcgggataacgctgccgtggctgcccagcacattgccgaaccgcactgccacacacttcatatccgtgttgcccgcaaaggtctggatgagcatctcgcagatgcgcttggtgcagcccatgacgctggtggggttcacggccttatcggtggaaagctgcacaaagcgctccaccccgtgctcgctggcactgaccagtaggtttttggtgcccagcacattgttctttacggcctcggcggggcttacctccatcagcggcacgtgcttgtgcgccgctgcgtggaacaccaccgtggggtggtaggtatcaaaaacctcgtccagacgttttttatcccgaatggagccgatgagcaccgtgaccgggatatcgcggccgtacttctgctgcagttccatctgcagctcgtaggcgcagttttcgtagatatcaaagatgagcagcttgccgggcttgaagcgcatgacctgacggcacagctcgctgccgatggagccgccgccgcccgttaccagcaccgttttgccggtgaggtagccggagatcttgtcggtatccagcgtgacctcctcgcgggagaggaagtcggcggggttcagctcgcggaacacctcctgctggggtgcgccgctgcccaccagttgcgggtcactgagcagctgcaccgcgcagtgggtgctgacgcacaggtcaatgacatggctcagcttgctgccctttaaggttgggatggcaatgatgatgctgtggatgccgtagcggttgcacagctccggaatgtcctccagcgtgcccttgaccggcacgccgtggatggtctggttcagctttgcggggtcatcgtccaccgccaccacggcgtggccgtattccttgttggatttgcacacattgatggcccatgcaccggcttcgcccgcacccacgatcaacaccgggcggttggggtccttggcgggcactttgcgcatccgctcacccagcggatggttcaaaaacagccgccaagccaagcggctgccgccgatgaacaaaaagatgagcaccgaggccatgcagttggcggaattgaacagcacaccgtggataaagcggcggttcaccacatacaccacggcggtgggcacggcgatcatcccggcaaggcggatcagatcccgctcgccggcgtacttccacagcaccgagtacagcccgcccgccagaaagcagacgatatacaccgccacgatccacggcagattttcgtacagcagtgcgcggttgtggggccaccacacggcctccacggcaccgtctgcccgcagcagcagggcaaaataaaagctgaatgccacaatggctgcatccagcagcaccagcagcgcacggcgtagcagcacctgcggggtattcttggttctatctttcacttacgatcctctttttccctctcagcgccaagggtttgccctgcgctgctttttcggcagtgttctcccccggcaatgccggaaggatacaactacacgtttgtattatactcacaatctccgcctgtgtccagaaaatttacgtttttatcactttcccctgtttttcccggtctttgcctgccgcagcaccgcccgcagctcctcccaaagccccagcggcagcgccgccagcaaaaacacgatggcagtcaccgtgccgcccgccgtcagcactgccagctgttcccacagcccctgtgccggaaagcccgtcagcacccggcgcacaccccgccctgccgcaccggcagcggcagcagccagcagcggcgcacccagccagcggcggaaagcgtgccctgtaccgctggaaagcagcagccgcccggtgttggccgcgcaggtgtaaaagctggaaagtaagatcaccgtcagaaagccccgcatcccgtaccggggcagcagcaccgccaccccgccaatgcgcagcaccgcgtcccacacgctgtaccggaaagcggccttctgctccccgatgcccttcatggcgccgtccaccatgctttccagatacatcagcggcatggccggggcaagggtctccagatagaacccggcctccgggctatggtagagcagctgcgccagcggcctgccccacacccagaacagcgtgcccgccagcatggagaagtatcccgtaagccgcagcatccggtccagcagggcgttcagccgggcggtctgcccctcgatatgcgcctgcgtgatctccggcatcagcaaaacagccagactgcccagcagcccaaaggggaaattgagcagcggcagcgccatgccctttaaggtgccgtactgctccagtgcagcggtgcgcccgccggaagcccccagatacaccgcaaggcaggcgggcaccaacatattctcggcggtgtgcagcgcgctggaaagcaccctgccgccctccaccggccacaggatgtcccacagccgccgggacgcctcccttggcgggcgcggcgctgtgctgccgaagcagcgtgccgcctcccgccggtaaaacaatgccatcagggcggtggatatggcctcgctcaaggcggtggcagccagcaccagcgcacagcgactgccgtccggccagccctgcgtgcgggaaagcgcccacaccaccgcggcaatgcgcaccgtctgctctgccagctggctgagcacgttgggttccacccgccgccgtgccagaaaaaagccgcgcagcactgccgagacagccatccatggcagtcccagcgccgaggtgcgcagcgcggcagcggcgcggatatcccccaaccaccattttgccgcaaggcctgcggtggcaagctgggcggccatggcaagcccgcccagcgtaagccctgccagcaccagccgcaccagcatcccgcgcgcagcggctttatcccggctgagctcctcggtcagcagccgggcagcggccaccgagatgcccgccgtggccagcgtgacgaacagcccgtacaccgccagcaccagctgatacagccccatccccgccccgcccaaggcgttggccagccagatgcgcagccccatgccagccagccgcagcaccacgtccgagccggtaagcagcgccgcgttcttaaaataactctgccgcaccctgcacctccccctgccccggaacgggcgttcacggttcagcctatgcggcagctttgcaaaacatgagcggcgctatgggttgtttctgcgcactttttatggtatagttaacagtggtcaggcagggcgcaagctccctgcctgtattttgagcaaggaggaagcgcaccgcccgggtcctgcccctgccgtgcgcgacaaagagaatgagcgaagaatgtacccatgactgctctaattgcagtgcagcctgttcttcccgcgatgccgctccgcagcacgatgcccccaaccctaacagcagtgtaaaaaaggtcatcggcgttgtttccggcaagggcggcgtgggcaagagcatgaccagcgccctgctggcctgtgccatggctcgccgcggctaccactgcggcattctggatgccgatatcaccggcccgtccatccccaagctgttcggcattcatggccgtgccatggcggacgacaagggctgctggcccatccagagccgcatgggcattgatgtgatgagcatcaacctgctggtggagaacgaggaggaccccgttgtgtggcgcggcccggtcattgccggtgccgtcaagcagttctggaccgatgtggtctggaaggacgtggatttcctgttcgtggatatgcccccgggcaccggtgatgtgcccctgaccgtgttccagagcctgccggtggatggcatcgttgtggtggcaagcccgcaggagctggtaagcatgatcgtggcaaaggctgtgaacatggccgagatgatgaaggtgcccatgctgggcatcgtggagaacatgagctacatcgtctgcccggactgcggcaagcacatcaatgtgtttggcaacagccatgtggacgaggtggccgcaaagcatcatctgcctgtgctggccaagtgccccatcgaccccaaactggcagagctttccgatgccggcatgatcgagacctatggcggcgaatttttggaaggtgccgcagacgcctgcgaaaagctgctgaaaaagtaatgcaccctgccctgtgcccgttgcgacacagggctttttgcttaccaaagcccgctgccgtgcaaaagacattcttttccgtgcagctttggagcggcagtgcactttaaaaaacaaggttcgcggcgcattccggcttttaattttcgttttgtgaagcagctgtgactttttatctgtttttttaaacaaattctgctttttgctattgtaaaacccaccgcaaagctttataataataaagtaagcattgcccgccattgcgggcgtgccgtgcaagcatggagaaccggaagcgcccggcatctgcaaggatatacccgctgtgcggcgggcaggggcatttccgctttttcaaatttatagagtaattgggaaaaggagtattctattatgctgacgaatgaatacctgaagcgtgtttacgagggtctggaaaagcgcaacgccaatgagcccgagtttttgcaggctgtgcgcgaggtgctggagagcatccagcccgttgtggaaaagcaccccgagtacgagaaggccggtctgatcgagcgcctggtggagccggagcgcatcatcaccttccgtgtgccttgggtggacgatgccggtaaggtgcaggtgaaccgcggctaccgcgtgcagttcaacagcgccatcggcccctacaagggcggcctgcgcttccatccctctgtcaatcagggcatcctgaagttcctgggcttcgagcagaccttcaagaacagcctgaccaccctgcccatgggcggcggcaagggcggctctgactttgacccccacggcaagagcgacatggaagtgatgcgcttctgccagagcttcatgaccgagctgtaccgccacatcggccagttcgtggactgccccgccggtgatatcggcgtcggcggccgcgaggtcggctatctgttcggccagtacaagcgcctgaccaacagcttccagggcggtatgctcaccggcaagggcctgaccttcggcggttctctggcccgcaccgaggctaccggctacggcctgtgctacttcaccgccgaggctctgaagtgcatgcgcaacgacagcttcaagggcaagaccgtagtcatctccggctccggcaacgtggctatctacgcctgcgaaaaggcgaaccagatgggcgccaaggtggttaccatgtccgactccaacggctacgtctacgaccccaacggcatcgatctggcttacgtgaaggacctgaaggaagtgcgccgtggccgcatcaaggagtacgccgagacccacgccggtgctacctatgtggctgattgcacccaggtttggactgtcccctgcgacatcgccctgccctgcgctacccagaacgagatcaacaaggagtccgccgaggctctggtaaagggcggctgcaccgtcgtgtgcgagggcgccaacatgcccagcaccccggaggccatcgaggtctacctgtccaacggcatcctgtacggacccgcaaaggcttccaacgcaggcggcgtggctacctccggtctggagatgagccagaactccgagcgtctgagctggagctttgaggaagtggatgccaagctgaagggcatcatggagggcatcttccacgcttcctacgacgcttctgtggctgccggttccgagggcaacctgatggtcggtgcaaactgcgccggcttcctgaaggttgctaccgccatgatggcacagggcatcacctactaagcttttctctgcatctcaaggggctgctgcacaaaccgtgcggcagccctttgtgttatgctccgcgccggtataggccggacacatccgactcttcacccgactcttcaaaagtcccctatgacccatagagttttgaagagttactttttctgcgccaaaacacgcagaacgctgcgctttttgccccgactcttcaaaatcaaccaaagttttgaagagtcgcaaacacaacgtagatacgctacttttagatactattcaatataaaaaagtagtaataatgtccgactcttcaaaagtccccttgtgtcatagggctttgcagcctgttttgaagagtcgcccggcagggggacgatttgaaatggcttccgctgcgctttagccataatcagcggaatgattattttaatttgcagttcaagcctgcgggtttggctgaactgccttttcacgggagtgggggtcgtaaaggcaagcggcagccccttctgtgaaaatagcgtttggagcactccgcagagtgcgacaaacgcgaaatagaaatattctttccgctgaagatgcgcagagcaacgcggcgcgcatttccaatcgttacactgtccgctatgcgtacacaattgcccgccataggcggcatctcgcacaagaagcggcgcaatgtgtgtagcatatttggtgcagctgtcacttgaagatttttcaggaatctgtataatatcagatatcggaacaaaggcgttccgcaggggcatcctatgcccttgcggggcgcttttttctttttgcaggggataaaaagctgcggagggtgccgcagcccccggtaaacaagtaaaaaggatgggaaagactatggaaaactttacagagcagaaaaccacccttggtctgtacgacccacagttcgagcacgatgcctgcggcatcggcgctgtggtggacatcaagggacgtaaaagccaccagacggtggatgatgcactgtccatcgtggagcggctggagcaccgcgccggtaaggacgccgagggcaagaccggcgacggcgtgggcatcctgctgcagatcagccacaagttcttctccaaggtggccgaggagctgaacatccggctgggcaacgagcgggagtacggcgtgggtatgttcttcttcccccagaacgagcacctgcgggcacaggccatgaagctgttcgaggtggtcacccgcaaggaggggctggagtttctggcatggcgcgaagtgcccgtagaccccgatgccgtggggcagaaggcccgggactgcatgcccgccatctggcagtgcttcatcaaaaagcccgccaaggtaagcaagggcattgagtttgaccgccgcctgtacatcgtgcgccgcgtgttcgagcaggccagcaacggcacctatgtgcccagcctgtccagccgcaccatcgtgtataagggtatgttcctcgtgcacgacctgcgccgcttctacgctgatctgcaggacccggattatgagtccgccatcggcatggtgcacagccgcttttctaccaacaccaaccccagctggatgcgtgcacaccccaaccgctttatcctgcacaacggcgagatcaacaccatcaagggcaacaccgacgccatgctggcgcgtgaggagagcatctccagccccattttgcaggacgacatgaacaagatcctgcccatcatcaacacctccggttcggactccgccatgctggataacacccttgagtttatggtgatgaacggcatggacctgccgctggctgtgatgatcaccatccccgagccgtgggagaacaacaagaatatcagccagaaaaagcgggatttctaccagtactacgccaccatgctggagccttgggacggccccgccgccatcctgttctcggacggcgatgtgatgggcgcagtgctggaccgcaacggtctgcgtcccagccgctactatatcaccaaggacggccgcatgatcctgtcctctgaagtgggcgtgctggaatgcgacccggagaatattctggtcaaggagcgtctgcgccccggcaaaatgctgctggtggataccgtcaagggcgaagtggtggacgacgagaagctgaaagagctttacgccagccgcgagccctacggcgagtggatcgaccgcaatctggtgcagctgagcgggctgaagatccccaacgtaaaggtggagagctacaccggcgagcagctgacccggctgcagaaggtgttcggctacaagtacgaagacgtgaacaccatgatccttgccatggcgcgggcgggcgcagagccttccggtgccatgggtaccgacaccccgcttgccgtgctcagcagccagcatcccccgctgttcaactactttaagcagcgtttcgcgcaggtgacgaacccgcccattgatgccatccgggaaaaagtggtcacctccaccagcgtttatattggtgcccacggcaatctgctggaggataagccggagaactgcaaggtgcttaaggtgcacaaccccatcctgaccaacaccgacctgttgaagatcaagtacatg

SEQ ID NO: 1038 - DNA, 9321 bp, unidentified
  source 1..9321: mol_type = unassigned DNA
cgtgctcaagctggacagcgacgacgattgatctgcaaatatacaaaagggatgctgcgtgcgcggcatcccttttttgatgggaactcccaaatgtgaaatccgcccatggcagagatgcactctttgcttttcctactaaatatgttataatttatttatatatcagtttttgtatccgcttttggaaagatgggctgcggccttgtgctgcgcccttctctatgcaacgttccccggcagaaaggatgtggcctttatcaaagcaaaacacggaaaaggcgcagcacaaagcggcagacacacacacagcggcagctgcgcacagagggcaacgcccctctggaagcaggtgctgctgacgctgctgatctttattgctctgctcgctctgctgggcggggcgctgtggcagaatatctgctataaccgcacccactatacggcagagttctatcagatccattcccgcaagctgacccagagctgccgggtcgtttttctgaccgatctgcatctgcgggagtacggagcagataactgtgagctggtgcaggatgtccgcagccttgccccggatctgattttgctgggcggcgactttgtgacctacggcgaaggcaccaattatgataatatgctctccctgttccgtcagttgagcgagattgccccggtatgcggagtgctgggcaaccacgaggacgagctgtattttctggacaacgaccgggaactggtggaaaagttcaccgccgccggggtgaccgtcctgcgcaatcaggaggcgcgctataccatccacgacaatgttatcagcattctgggcgtggagggcagcccggcggatttttctaactacggtgccagcacctttatggacagcgtggagccgcagacagactacgacctgcgcatctgtctggcacacgttcccacctactttcccgagcatctggaaaactattcctttgagctgggtcttgccgggcacacccacggcggcatcgtgcgtctgccgaagatcggtccgctttataccgccgaggagggctttctgcccgactatgccggaggcagctatacgcttgccaacaacgccaccctcattgtaagccggggactgggcgattccagccgggcgccccgcatcaacaatgtgccggagctttcggtcattgacatcgactaagcggcctgcgctgcgcgtgcaggccgctgcaaaagggtagaatgccatggatgacatcaaagaaaaaatcaaacaggcgctgcgtcatatctggacaaataaataccgcctgtttctctgcctgctgaccttgtgctgtctgttcgggctggttcactatttcaaaagtgcggacagcgccactgccagcatctccttcaattactccgaggcggcgcttggcatgaaccccaacaagacccgcttcaacgcctacgagatcgtgtcggacgaggtgatggaacgcgccatccggcgggtgggcttgcaggacagcctgactgcctcccagctggcccagtgcctttacctgagcccggaaggcaccggcagcgccaacggcagcgagtatatcagcaccaactactatctctccatcaacacccgcaagctgaacctgggcaaccgcaagcccacagatcttttgcagagcgtgtgcgaatcctaccgggagatctttctgagcaactactgcgataatcagagcatcctcaaggaaaagctggaagtgaccaccgcgtgcgagccttacctgcgactgaacgagctggaggtgcgcgccgctgcgctgaaccgctatctgaacgcccgtctgggggagaacaaaagctttacggacgaggcaaaccccgacccttccaccaacaactttaccacactgggcaaaatgatcaacaatctggtggattacgacctgcccaacgccatggcctttgtcattgagggcggcgttgcccgcgacccggccatgctgaccagcattctggaatacaagaacaagatcgacgatattgacatgcgcacccagcaggcctactatgacgccgacaaaaagggcatttccatctacgaaaaatccatgacctccatcatgatgatccccaccgtggatgaagcaagcgagtactatatgtcccgcaccaagaccgccatggatgcgctggcgcgggcggcagacgcttctctggccgatgccaccgactaccagtccgagatcgtgagcacgaattatgtgatccagaagatccgggagctggatgccggccagccgcgtctggccgaggcgcaggccatggtgaacaagctggagaccgccatcaacgagatctcggagcagctgtttgtactggacaaggcgtatatcaagtacaaatcccagaactatattacctttacctacggttcggcctccttcctgcagcgcctgagcctgaaaaagaccctgatggagtccgttgccgtgatgctgggcagcgcatggctgctccacgaacgcaaacgcagaaaggcaaggcaccgcagatgaaaaagtttgagatcctgcgctatctgaagcgtttcagcctgctgatctttctggtgtcgctggcaggtgcagccgccatctacctgtatgcagacggtcggcagaagtacactgcatcggtcattatccgctataccaacgacggcatctcggacggctacaccccggacggcagtgagctggacgtcaacgagatctactcctccaccgtcatctcgcaggccatggatgcactgggtgcttccgggcggctgagcaccatccgttccaacatctcggtgaccccggtgatctcggaagatcaggagaccatcaacgacgccctgctgcaaaagggcgaagaggtgacctatttcccggatacctacaaggtgagccttgtggtggatggagagcagggcgcgggttatgcccgcaatatgctggatgccatcatccagagctactgcacctattatacggaaaaatatgtggagcagaaactctcgctcaacccctcgtccggcctgctggacaacggctatgactactacgagtgcatccgcattctggaaaacgataccaacgagatgcaggactatctgctgagcaagcgggagcactacccgaattttcgctcctcccgcaccggctacacctatgcagacctgtgcgatatctattccgacttcaaaaaatacaccatcccggcgctgtacgcctatgtgctcaacggcccgcaggtgcgggacggcacggtgctgcaggaatatctggccaacaccatcgaaactgcaaagcagaacgaacagatcaccaccgagcagcgggacagtctgtggagcctgaccgaccagtatgtgtacaagaacgccgatctgctgcaaaactactttactgaccggggcgaggtggtgtcctcggactatatcctgaataacatcgagctggaaggtgctggcgataaggcacagaccacctacgacggtctggtgctgaaactggtatcgctggaacagcaggtcgcatccagccagatcgaccggcagtttcaggaggagatcctgcaaagcttccgcaacgtggattttggcggtacaggcgagcagcacgccaagatggaaagcatgatcaacgactacgaggcgcagctgaaaagctactacaagatcatcaataccagcagcaaggagctgaacctgtacatcagcgcggattatctgaagatgatcagctcggtgcaggtggctgccgccatcaatgtcaagctgtatctgatgctggcgctggtgctgttctttgtcattggctgctgcggtgcaattctgctgggccgcatctcggatgcggtggattatctgctgtatgtggacaaaaagaccggtctgcccaaccgcgaaaagctcaacgtgtatatcaccggcatggccgaccgcatcctgccggaggactatacctgctttgctttgcagctggacaacctgaccgagatgagccgccgcttcggctaccatgtgggtgacggcatcctgaaggatttttccggtcttttgcagctgatgggcgataccgacggcacggtgggctacaacggcgcgggcaagttccttgccttctttgatgaatgcagcactcggaaggcagaggtcatgatccgcatcctgcaaagtcaggtggacgagtacaataagctcaacccggagtaccccatcctgttcaccgccgcatgggccaccacctcggaggaggagctctaccatgtgcgcgaccttgtgcgctgcgcacagaaaaagatgtccctgatcgcaggagagggcggcgctgtccttgccggaacggagcgtggtgaagcatgatccagaaccgacgcgcttaccagctgatccactgccgcacccgcagccgtctgctggcgggcgctgccgccgtgtgcggcgcagcctgcggccatgcagaccttgggctgtaccatctgctgcaccggggcggtgccccgctgccggacagcacacaggccgaccgcgccgcgctggcagccctgtgcccgaaacctgcagcagaagagacctgcccgctgctgccgcagcaggacccggcggtgaccctttcggtcattgtgccggtgtacaacggcgaagctaccatcggcccctgtctggacagcattttgcagcaggagaccagctgcaccgtgcagctgatcgtggtggacagcgattccaccgacggcacagccgccgtgctagaacgctaccgggcactgcccggggtgttgctgtgcaattgcagtgcgccccgcagcgccgccgccgcccgcaacgagggactgcgccacgccgtgggccgctggctgatgttcgtggacagcgacgatctgttattgcccggtgccatccgcaccctgctggaggccgcacagcgccttgacgccgatgtggtgcagggcggctggcagtacctgtacaccgacggcacccacggcccggtgcagcgctacccggcggcagtctacgccggtgccgccgcgccggagcggttcgagctgcccgggatgccatggggcaaggtgtaccggcgggaactgtttgcacaggtgcgctttccggcttactatacctgctttgaggatgccatcatccattttctggtattccggctggcaaagactgtggcctctgtgccggagatggtctatctgtggcgcaaaaccccaaggggcttaccgccacaagtcagcaccgccctgccgccgtgcagagctactggatcatggagcagctgacggtgcaggatgctgcgctgggcctgccccacgatgcgctgtaccgctgcaccctgacgctgcagctttcggctttctgctatgccaccgtatccggcctgccgccggaaacgcagcaggctgttttccggctgtgctgtgctttgtacgcaaaggcactgccgcaagagggcgcactgccccgccgcgcccgctggggtgcccgggcgctgcggcagcaggactttgggctgtggtgccgctacggcagaagatttcagttgttataatataaggagtacccatgatacgagtgctgcattcggtcagcaatatggaccgcggcgggatcgagaccatgctgatgaactactaccggcatatcgaccgcgaaaaggtccagtttgattttatcgtcaacaagcaaaagcccggcgattacgacgacgagatccgccgtctgggcgggcatatctaccagagtccgggattaaacccgctgcactacccggcgtatctgcgctttgtgcagcagaccgtggccgcagacccccgcatccgcatcctgcacgcccacaacgaggcgatggggctttatgccctgaagggtgcggagaaggccgggctgcaagtgcgcattgcccacgcccataatatctggatcgtccgggactacaagtggccgctgaagatgttctgtaagcagctgctgcccggcgccgccacccacctgtgggcctgcggccgggatgcgggcatctactactttggcaaagcggactgggagcgccggggacagatcattcccaacgccattgagccggagaccttccgcttctcccccgccgtccgcgccgaaatgcgggcgcgctacgggctggaagaccgggtggtgctgggtcatgtaggccgctttgatgtccgcaagaaccacgagcgtctattggagatctttgccgcctttttgcagctggaaccccgggcgatgctggtgctcattggtaccggcaggctggagcaggctgtccgtgcacaggcgcaggaactgggcatcacagaccatatcctgtttgccgggttgcaaagcaatgtggccgactggtaccagatgatggatctcttcgtcatgccctcccgctttgagggtctgccggtggtggggatcgaggcgcaagccgctgggctggggtgcgtattttcggacgcagtgccggcggaggtgctgctttcttcccatgccatccagattccgctttccgccagcaatacagactgggcagcaggcttgcagcggatgctccatcagccctgtgaccgctctgctggtgcagaactgatccgacaggctggctacgatatcaacatcgccgccgcccgcttacagcagcagtacctgcaactgggagggcaggcgtagccccccggcggctgcgggaacacccacaataaaaggagagcccttttcatgcgcacattggatcagatcctgaccaaaaaggattacagccggaaaactccggcctctttgttttataaggacagcccgctgtggcaaaaactgctgaccgtcggttgcgtgatctttttggccggtgccgggctgggagagtggaagccaatcaacagcgcagtgggcggccttcccaaagccatctctctgggggtgatcgggctggcaatgctgtacaccctgttttacccggacgaaaagcgtctccgggagttatggaagcctaccctgctttatatgtccctgatggcggcgctgtttttctggtcgatggtcatctggatcgaaagctttgccgcagtgtcttccatgatccgaagctgctccaagatcgtgttccagagtattgccatcctcactgccgtggcgctggtctatctgttccgggaaaaagccatcgagctgtttaccatcagtatctgcattgccaacacggccatcatgctactgagcattcctggctacggttttgcagccagcatccagtctctcattacctgtctgatcaccttcggtgatgcggatggctatgcgctgcagctggagattcacgacctgacctttgtgttcgggcagatgatcttgtactacgccgtttttgctcctcgtactacccggcaggaaaagcgcaagcgctggctgtatctgctgctctgctgctggttttttctggtcggcatgaagcgcatcgccatcccggcggtggttctgttcgtcctgattgctctgcttctccgcaagcgcaaagtccccggctggttttacccggcagtgggcgtctgctgcatcctgttttttctggcattcctctactgtgtgcgctacggtgttatttcaaggttgctgaacagttttggcattgacatgatgggacgggactacctgtggagcatggcgaacccctactatgaattttctatcacctatatcggccgcggttttgaatatgtggacaccatcatcgcccagtggtataatgacgggctcatcaaccagccttaccccttccacaacgacatcctgaaggtctttgtagaggtaggctttccgggttttctgctctggtccagcatccagtatgttctgactccgctgttctggcagcgctatgcagaccaagagaccacgttgctgtatctgtccgagctaggctatatgacggtgacctacctgaccgataataccgccttttatttctggagtacgatggcgctgcgtctggtgacgcttgcctacgccatggagcgcaaaaagcccccggaacccaaggtgtggatgccggacagtcggcaggagatgcgggaccgcatccatattctgatgaaggaagtgtgacggcaaggagtgaaaacaatgccctgtatctcgtttatagtgcctgtttataatatggagcgcctgctgccccgggcgctgcgctcactgcgggcgcagactttgaccgacttcgaggccattctcatcaacgatggctccaaggacggcagcgccgcgctgtgtgcacaggctgctgccgaggatgcgcgctttcgcttcatcgaccagcccaacggcggcgtagccgctgcccgcaacgcgggtctggatgcagcccggggcgagtatatcttctttctggatccggatgactgggtagagccggatgcggcagaagtgctgtatcatgccgcccggaatgctgatgcggactgcgtggagtttgggctgtatctggacagctatgatgaaaatgaccggctgctgcacacgcagaccagcggcagcaccctctccggcgtgtaccggggcgcgcccttcaaggaacatttcgacgagacggcgtcctcgtatctggtcaccaataagctgttccgccgggcgtttctggagcagcatcagctgcgtttctcctgccatcagctgggggaggacgggctgttctttgtagccttttatcgtcaaaatcccggctgtctggtggtgctggaaaagccgctgtaccactacaccgctgcccggcggggcagcctgtccaacagctaccacccggagcgtctggaggataacttttatctcagcgatgcagtgtgggacaccgttgccgcgtggggcttacaggacagccccatgcaccgcgcaaaggcgagctactgcacgatccgcgacctgatgatgggaatcaagaatcttggatgcagcccgctttccctttccgagcagactgcttggctgcgcagtaccctgcaaaagccccgggtgcgcacggcggtgcgcagcaccccactgcacgccatgcagagccggaacgaccaggtaaagctgttgctgctcaagctgcggctatgccgcgcggtgctgctgctctcgggcgcaaatcagcgtaagaatacctgaagagaaacgcaaaaatccccccgctgccgactggcagcggggggatttgttaccgatttaaatgaaaatcagcgcttagttctgcttcatgcgagcgaagcagtcagagcagtagaccggacggtcctcacggggctggaagggaaccttgcaggccttgc

SEQ ID NO: 1039 - DNA, 10435 bp, unidentified
  source 1..10435: mol_type = unassigned DNA
ttaaataggtacgtatacggctttttttgtttgaaagaattcttcgtcgaaataatctttcaggtcgaatatcatggccgtgcgtctgacaggggctatttcaccctgtatttcaccccctttaagacatatcagaccgttgggcatagcattgtgctggtggttgcccacgttcttacgaatcagtttcaacaaatctcccagaggcatgacggctcggcttacgatgaagtcgtatttggttttgttttcttcgacgctgcaatgggcaaacgtaacattctgcaatccgatagcttgtgctatttcctgtgccactttgattttttttccgatgcgatcgatgagatggaaccggcactcgggaaagagtatggcgagaggtatgccgggaaatcctcctcccgttcctacgtcgagaagcgttgtttcgggtgtgaattgtatcactttggctataccgagggaatgcaatacgtgatgggagtaaaggttatcgatatctttacgagaaatcacgttgattttggcattccagtcgttatacagcccttgtagagcggcaaactggtcgtgttgccggcttgtcagattcggaaagtatttttcgatgatctgcatggtctcttttctgttatttcgatgcaatacgtttcaaaggagagtcggcgacgaggtagcccacgatagcccggtaaggcagcgtgatgcgcgttgtcccggtcgagtacggtgcaatatcgtaaggattgaacaaccaagtgatacctttatcgcttatcatgaaattgtcatcggcaatgatattttcggtttcataactcttttcaccgagtttatcgacacttgtatccagatcgtcggcaagttgttgacacagcatgcggtttatcaggttgtaatcgttctcggcaaacaggtcttttagcgatagcgcttttccgcttttcaagtctacgacattatatgacgtcgtggtcataccgtgtgccccgccggtaaacgtgtatgtttcgatactgtatccccaaaaaagatcggcattatataagttttcgctttttacgattatttcgtaattcatccacccttcatcgcggtgtttgtgctttttgagatagggttttatttcggcttgataatcggcaatgtaatttttaacaaaatgttcgacggcggtacggggcgaatggctttcttgcataccgtcgggcaaagaagcgacgaagagactttgtaatttgtttaaggaggtatttccggtgtttcctcccgaaggataggagatgtgtatatctatggtacaaccgggaagttttgtattgtcgtcgatatagctttttttgaagtagttgtatttcgagaatgtgagattctctggctgtttgaccggttgcttctcggatggcgattttgtttctacggccggagtttctgttttttccttgttttcgttgttccactgacatgatgttgcccaaaagaggctacatacgatagcaagggttattttataacgtctcataaagatgtagatttgaggtttgagttcggattattatcgacaaatgtatagaaaaaaaacggtaaaccgaatagttgtcgtatatttgtgtcggttaagatttttttatggttaatatcggaaattacaatacgttgcaagtccttcgggttgtcgatttcggcgtttatctcgatggcggggaaaaaggggatatacttttgcctttgcgttatgtcccgcagaattataaaattggagatgaaatagatgtttttgtttattacgacagtgaggatcgcatcattgccacgaccgaacgcccttatgcgctggtgggcgaatttgccgtactcaaagtcaattcggtcaattccgtaggcgtttttctcgattggggacttgcttcgaaagagttgcttgttccttttagggagcaacgggccgaaatgtttcccggaaagtattataccgtgtatctctatctcgatgaggtcagcgggcgtatcgtagcaacggccaagttaaatcgttatttgcagagaaaaccggtcgattatactttcaatcaggaagtcgatattttggttacgcaagaaacggaattgggttttaaagtgattgtcgataatgcccattggggtatgatatatcataatgagatttttaagccggtacatcggggcgataggttgagagggtatgtaacccacattcgagccgatgaaaaagtcgatgtggcattgcagccggccggttatcaaggagtagatccgctttctcaggaaattctcgctgttttgcaggagaggggagggtttattcctctcagtgataaatccgatgccgaagagattgcgtcgacgttcggttgcagcaagaaaaatttcaagaaggcgatcggtgcgctttataaaaagcggataataattattctcgatgagggcattcgcctcgccgagtaatgatcgtaaaataacaacagccccgctaaccggcggggctgttgttttatgatggcagatatattatacatcaaggctttcgcaagcttgtatccatgatgttgcgcaggcatcgctgggcatacgccagtctcctctgggagaaagacttaccgaacccactttgggcccgtcgggtaagcatgaccgcttgaactgctgggcgaagaatcgacggaaaaatgttgtaagccatttttttatggtcttgcgatcatattgtgtgccgaaagcttcttgcgccaagaagtagattttctcgggtcggcagccgtggcgcagaaaatagtaaaggaagaagtcatgcagttcataaggtcctacaagatcttcggtcttctgtttgatgttaccttgttcgtcggccggaatcaactctggactgatgggggtatcgacgatgtcgagtagtgtggcgcgggtcttttcatcattctcttgtgaagccacccagttgacgaggtggcgtaccagcgttttaggaacgccggcgtttacaccgtacatcgacatatggtcgccgttataagttgcccaacccaaagccagttccgacaaatctcctgtaccgatcaccaagccgttcgattggttggctatatccatcagtatttgggttcgttcacgggcttggctgttttcataagtaacatcatgtacggaaacgtcgtgtccgatgtctttgaaatgttgaagacaagccttttcgataccgatttcctgtatcgttactcccagcgaatacatgagatcgagagcattgttgtaggtacggtcggtcgtcccgaaacccggcatggtgataccctgtatctgtttgcgggaaaggttcagccggtcgaaagcccgtactgctaccagtagagccagtgtcgaatcgagacctcccgagattcctactacggcggttttggcattggtatgtttcaaccgtttgaccagccccgagacttgtatgttgaagatttcttcacaacgttcgtttagcagttgttcgatatggggaataaaggggtgcggatctattttacgggagagccgggtgatagaatagtggggcagttcgatcggtatggtacggtacgaatttttgtcgatacagtcggtaaaacctgtatttccgagtcgttcgcacatgagacgctcaatatctatttcggaaatggtcagctgcggagaatcggaaaatctgcggctttcagccagtatgatgccgttttcggctataatgccgttacctccgaataccacatctgtcgatgactcgccgggtccggccgatgcgtaaaggtaggccgataccgtgcgggccgattgttgtgtgatgagctggcgtaagtaattgtgtttccctaccagatcattgctggccgagagattggcgatgatattggcaccgtgtaggctatggtatgatgccggaggtatggcgacccataaatcttcgcatagctctacggccaatgacacttttcccgatgtaaagagcaggcgggggccgaaaggaacttccatgttgcagcaggtaatacttcccttatcggtttcgtcggcttgacaaaaccaccgtttctcgtaaaattccttgtagttgggcagaaaacttttgggtacaatgccgtaaattgtaccgtttcctataacgactgccgtgttgaagagtctgttgtcttgccttaacggacagccgacgatggccagagcttttgtctgtcgagtggcgtttacgatgcgggatagtgcggcttctgcttcatcgagcaggagcggttgtccgaaaaggtctccgcaagtatatccggtgatacaaagttccggaaatacgatgatttcgatttcctgccggttggcttcctgtaatagctcgatgatctgtccactgttatataggcaatcggcaaccttgcaatcgggtatggcggttgccgtttttataaatccgtaattcatagtcgatgtgtcaagatgtgcaaaagtagaaaaattcacagcttcctgccaatttgcactcgaaatttttctctttaccgatgattcgttatttttgtatagtgataataccgtgtaattatgaagtggaatatatctaaaattttgtgtcttgtcggcctgaccatgagtgtcgctccactctcttctatggaagtagacgatctctttttgggaaaatatcgtgtgaaaacggttgcaggaatacgtccgtcggccgatggtgtgcactatacatgtttgtcgcccgaccgtacatgcatcgttcgttatgcctatgcgacgggcgaagccgtcgatacgttattgaatgtaggaaaagtttccgggagaccgataaaagcaatagcgggatattcgttcggcagtaaagaagatcgtatgctggtatataccgatgtagagatgatataccgtcgttcttttcgggcggcttactattttacttcggtaggaagcaatgagctgcagcccctttcggatcgattctccaaacagcaaattgccacactgtcgcccgatggttctcgggtggcgtttgtgtatgaaaacaatatatatgtgaagaatttgctcgacggtacagaaacgcaggttacccgggacggagagaaaaacaagatactcaatgggattaccgactgggtatatgaagaggaatttgctcagacccggttgatggcgtggtcgcccgatagccgggcactggcttttgtgcgtaccgatgagagtggagtgcaggaatatcccatgcagatgttttgttcgtcttcgggagaatacgacgatccgcaagaggtatatccccgatatgccgggtttaaatatcctgtggctggagccgataacagcaaggtctcttttcgcgtgtggaaagaagatgctggaaatttggaaacggtcgttttgccggtcgatggagatacctatctgccggcgataacgattattccccagacgggagagtgggtcgttactgccataaaccggttgcaaaatcatattcggctgttggcggtggatatacaggacaatacttcccgattattgtatgaagacaagtccgacacatatatcaacgaacaagatattacgtcggctgtattttatcccgactgtttcatggctttctccgagaaaacgggatatcgtcatatataccaatatggttacgacgggaaattgcagcgtacggttacggcgggaaattgggaggtaactgattattacggccgtgatgcaaaagggaatatctactatcagtcgaccgaagaaggaccgttatatcggacgttatattgtgttgataagaaggggcgttgccggaaactttctgcgcgtaaaggaaataattcggcttggttcaatccttcctgtacctactacataagtcaatatagtaatacctttacgccgccggtatatgctcttaatgacgtaaaaaggaaacgggttgtccgtgttctcgaagataatgcaggttatccggtcgaagattttatcgggaaagaattttttacgatgacgacagccgatagtatcgtgttgaacggttttataatgaaacctgccgatttcgattccacacgtcgttatcccgttgtgatgatgcagtatagtggtcccggctctcaacaagttctcgatgcgtggagttcggccgattggcaacaggtattggtaccacagggatttattgttgcttgtgtcgatggccggggaaccggggcacggggcacggcattccgcagttgtacctacggccggttaggggttttagaggcgcaggatcaaatcgctgctgctcggtatatggcatcgcaatcctatgtagacccggagcgtatcgctatttggggatggagtttcggcgggtttacgacccttatgtcgatgtcgatgagtaaagatgtgtataaggccggagtagccatcgcacctgtaaccgattggcgtttttatgatacggtctataccgaacggtatatgtcagtcccgcaagataatgccgaggggtatgatgccgcatcgcctttgtgtcgtgcaaaagacctttcgggaaatcttttgattgttgccggtacggccgatgataatgtgcactataccaatatgctgcgttatatcgatgcattggtggctgccgacaagtcatttgaaatgcagatgtacaccgatcgcaatcacagtatttacggaggaaatgcccgtccgcatttatataagcgttttatcgacttcttccgttgccaacttctccggtaacgtaggtatttcgtaagaatatattgtagatgttcggttataaaaaaggagggtaggcttttgcctaccctccttttttatagaattcccctgttttataaaggcatattcccgtgtttcttggggggattgctctgattcttgtttgaacacatattcaaagcctgtatgagtttccaacgggtatcacgtggcataatgatttcatcgatatatccgcgttcggctgcccggtaaggattcgagatttccgattcgtattctttaattttttcggctttttcttccggagtagctttccgataaagaatgtttactgcaccttctgcacccatgacggcaatttcggattgcgggtaagccagattgacatcagcccccgtctgcttgctcgacatgacgatataagcaccgccgtatgcttttcgagtgataagcgttacttttggaacagtggcttcggcataagcgtagacgattttggctccgtggcgtatgatgccgttatgctcttgtatggttccgggaaggaatccgggaacgtcttcgaaagtaatgataggaatattgaaacagtcgcagaaacgaatgaagcgagctgctttgtccgatgcgtcgatgtcgaggactcctgcaaggtaggccggttggttggcgacaatacctaccgtccggccgcccaagcgggcgaatccgataacgatgttcttcgcaaaatgcggcatgatttcaaaaaagtactggtcgtctactaccggttcgatgatgtctttgatatcataaggcatattcgagtcttcgggtatgacggtctgcaactcttcgacttggcgatgtacgtcatcggtacaggtgacgatgggtgcatcttccatattgttcgatgggagaaagctgagtaattccttgatgtgcatgagcgtttcttcctcggtttcgcacatgaaatgggtaacaccgcttttgctgctgtgcgtatatgcgccgcccaactcttctttaccgacttcttcgtgtgtaacggcctttacaacatcaggaccggtgatgaacatatggctcttctcttttaccatgaagatgaaatcggtgagggcgggagagtagcaagctcctccggcgcaagggccgagaatagcggagatttgaggaataactcccgacgctatcgtgttttgatagaagatcgaggcatatcccgagagactgtttacaccttcttgtatacgagctccccccgagtcgttgagcgcgatgatgggagcaccgtttttcaatgccagttgttggacttttacgatctttgcagcattgctttcgctcagagaacctccgtgtgccgtgaaatcataggcatagatgaataccagacgtccgtcgatttttccgtatcctgtaaccatgccgtctccgggaatttgttttttctccattccgaagtgggtgcaccggtgcgtaacgaatttatcgagttcgttgaacgtccctttatcgagtagcatatcgatgcgttcccgggcggtcatacgtcccgattcatgctgcttttctattttgtcgagacctccgccctgagaagcttttttatcgaggttctcgaattcttcgtatattttttctctatccattgcttttagtcgttatttatgatttccaataaaatcaatgtttgatttccgtttaccgaatcgccttcgttcaccagaatgtctttgacgatacattccgagttcaccttgtaattgctttgcattttcattgcttcgagtacgatgacaatatcgccggcttgaagatgatcgcctttctgtaccggtatctttacgactttgccgggcatcggggcgatgattttatcgtcctggcgggtatcgtcgccttttttcatacgcagatattttgcctgagtatcgacaatatctatccggtacgaacggtagaaaatattcacatcgtagcttttcttgctttctttttgaatgagttctgcattgtaggaattaccctcgtgcagaatagagcaactgccgttttcggccatgacgatatcgacttcataaggtttcccatcgatggtaagctgcactttattgccttctttgttgaccagcgaaacgtcggccacccggtttcctatatgtatttccattactattttctcttagatacgtaaaacacctttttgtagtccgaattcgcgccatcggctgatgggacgcgcatcggtcagttgtacaggagtattctcctccaagttcatgaggtaatcgatataagcggcgatcatagccagattctcgatttcttcattgttgctgttgttccgttgcaacatgcgggcattcttttcgataaagagcgtgttatattcaccgcgcacgaaatcgggggtatgcatgatgcgtttcagataactgaggttggttttcagtccggtgattttgtattcgtacaatacgcggcgcatacgttctatggcatattggcgggtggtggcccatacgatcagttttcctatcatcggatcgtaataaatcggtatttcgtacccttcatatacataactgtcgatgcgtacgccgataccgttcggttcggtgagttgtttgatgatacctggcgacgggaggaaattgttttcggtgtcttcggcgcatatacggcactcgatagcatgaccgcgttgcaggagatcctcttgtttaagatgtaatacttcatcgttggcaacacgtatttgttcttttacaaggtctacgccacaaacctcttcggtaatggggtgttcgacttgcaggcgtgtattcatttcgagaaagtagaaattccgatgtttgtctacgaggaattcaatggttcccgcaccggagtaattcacggctttggccgcggcgacggctttttcgcccatctcttttcgcagttcgggagtgagaaaaggagaagggctttcttccacgattttttggtggcgacgttgcacagaacattccctgtcgaaaagatgtatcacgttgccgtgattgtctcctaaaatctggaattcgatatgatgaggctcttctacaaatttttcgaggtataccgtatcgtcaccgaatgacgacatcgattccgaacgcgccgtgttataggcttccagtacttcgtcttcgcagtggataaggcgcatgcctttgccgcctccacccatagatgctttcaacatcacgggaaaacctatctctttgcagatacgcacagcttcttctccgctttgcagcggttgttcggttcccgggacgacaggtactcccgctgcaatcatacgtttacgggccgaaattttatcgcccattgcttccatcgtttcggccgccgggccgataaatacgataccttcttttttgcaacggcgggcaaattcggcattttccgataaaaaaccgtagcccgggtgtatggcatcggcgtggtgcagtttggctgctttgatgatattgtcgatgttcaggtaactttcatgagaagccgcaggcccgatcaggcaggcttcgtcggcgtacatgacatgtttcgatgtacgatcggcttccgaaaagactgcgatggtgcgaatacccatctctttgcacgaacgcatgatgcgtatggcaatttctcctcggttggcaatcaaaattttctgaatcat

SEQ ID NO: 1040 - DNA, 19069 bp, unidentified
  source 1..19069: mol_type = unassigned DNA
ttaccagatcagcaatccgatatgatagaacaggcacgccagggtcagtgaaaataccacataatacaatacagaaagggcaatccactttttggaatggttttccctgtaggttgcagcaactgtcatggtacagggcacattgaacatgatcgccatgataaagccaagtgcctgcggctttgagatcacctgcggcagcagctccatcatggattctgacaggccaagtgacttggaattaaaggcagccgttaccatatcggtattgctgtacagtgcattcagcacgccaagtagagattccttggtcatcatggaagataaatatgccatgaacatctgccagctcatgccaaagaattctgtcaccggcgcaatcagctgtcctgcctttgacaggatgctctctgttccaaaccagttatagctcagcagataaaataccagcgataccagcaggatcacacggaaggcacggcagaaaatatcctttgccttgttcagcgttgtccggaagatataactccacttaggcttatgataaggcggcagttccatgatcattccgcctctgccctcttctccgaccagtgactttgcaaagatccgggatgctaaaaacatggaaccggtagtaatggcaaacataagaagcagaaccgccaaacctcctgcgggtccgaaaaataaagtagccagcatgggtcccatggaaagaccggtaccacagggaatactccatacaaggatcatggtcagaaaccgttgtccgttattgtcaatcacacggctcccggcaacacctgccatattacagccaaggctcatcagaaaagagcagacgcttttcccctgcagtccaagacgctccatcgcctgattaaatactacagaaatccttgccatataacccacatcttcaatcagggcaaatacaaaggttactccaagtacaaagcccgccatggatacggtaaagaacagtacattcggcagtacggtggctaccagatctgccagtggtttccatacattcatccgattcatcagcgtctgcagcggaggccctatcagtgccgggatcatggctccaaatcccatgatcggtgcagcgaccaccatggcagccagcagtgccagcacaatgatcccaaaggccacccattttccggagtgccttcccagtgcttttctgtcaaaactgccaagctcgctgctgctctccttcttttttacagcacctgcaagaatactgtcgatcagctcatatttatgctttcccgaaatcatcagtcctctgtctgttttttccagctcctgcactgccagcttctctttcgtatagactgctgtttcctgctgttttactgtaagctcttcaaaatggcagtctggatcttcataataatatttcataagaaggctgctctgtgccattctcccactgtctatcgcttctgcaagcttctccttcagttcaccatagcgtctgatatctgctgccacaaagcccatgaccggaatgccaagctttttctgtatcttttctgtatctatctgaatccccttcatttttgccacatccatcagatttaaaaccaggatcaccggaatattgatcccgataaaatcggtaaacatgtacagtgaccgttccagctgtgaactatctaccaaaaccaccaccagatctgccttgccggaagctatgtaatctgtggtaatgacctcttcctctgatcctgcagaaaggctgtagcttcccggcaggtcgatcacatgatattcctctccctgaaaagaaaaaacaccttccttatgctctactgtcttgcccggccagtttcctacatgctgatgggaacctgtgagtccgttaaataaggaagatttcccggagtttggctgtccaagcagtgcaatcgtcttactcattttccttccctccctctaatgtaattccttcacagtctttccggccaagtgccactacggaatccttacagtaaaataatacgggctgccccttctgattctggatcacacggattctggttccttccacaatgccgatcccgaccagtcttgacagtatgtgatgattaccggttaccgctgttactattcctgtatatccggcatttgcatctgctagtctcatatctctccctgcctttctttctgtcctgttgctttcctgcttctctttcgcgcagtttgttgcagctaacttttattagtttattatgcagagcaggtgccgtctatatcactttcagtaaaaaaggtttgtttagcattctgttctttttatgattgtcatttcttatatctgattttataatagtttctgtgaaaataataaagacaaggaaaatttgattttatggaaaaagacaattcagctccaaatgggatatccgctatgatgcgggcactggattctctggatcaggcagatggtcccatgtctgtccactgtaacctgccagatggttatatggatctgaccatttactctgtactgcccggtatttatatggtcaaaaatgatatccatgcttcttctgtgccagcccttggtgaatctatgccgtttgaaatttatactgtgaattactgtatagacggccggtgcgaataccggctttctgatgacaattacagctatgtgattaagaatctgatgacagtaagcaccggaacaatccccggctccttttattatccttcttcctgttatctgggatatgaaatttatattgtgccttccctgttttctgaaaaaacgaaacagatactggaaacctttcagattgcccttacggattttccggactactacccctgcaatgcgcctgccggaatcgcagatctatggaaatccctggaacaacagatgaaaaaagaaaatacaggtgctgtccggcttatcaccctgcagcttctgtacgcgatcgtaaacagcagtatgcctgtcatgcagcacaccatttacctgactaaaacacaggcgcagctcgccaaacagctgaaggagattctgacagaaaatttcagccggcacattgcagtccgtactgtggcagatacttatggcatcagcgaaaccagtctgaaaaactatttccgctatgtctatggaatgaatgtttccacctatctgaacaaagcacgtatggaatatgccggccgtttattgtctgaaaccaccttaagtatcgccgatatcgccagaagctgtggttataccaatcagggacggtttgcaaaggttttctgtgattattaccaggtaaagccccttgactaccgcagggcttccagaaatccggacacgctctgaaccagaacctgtcagatttctgccctccggattcccgtcaggaaagcagatcgatcaggccccgtattcctttctcctgataaatggtcttgtaataggacacctcgttctggatcagttcatcgatcacacgcattccaagaagctctaccggtgccttatcatctgtcatgatgtgaccacctgcttcgtaagcttccagatgatcttcgatccgccccatcatggctgccagatcaccgtcctgttcaagcgctgcattgagcctgtaggtttgcagcatatccgcattgtcagaagcgaacagctcccggtttgtagatccactcacatctaccgtgcagacctgatcaaacacctcagaaatagtgtctgccagatactcattaatgtttccctcagcaccactgtgcatgttcatattgacgaccatgacaccatcatccttcaaatgatcctttaccatagtaaagaactccacggtagacatctggaacggtatggtaatatcctgataagcatccaccatgatcacgtcatacttttcactgatcgcattcagatatgctcttccgtcataggtcgtgacttccacatcctccggcagttcaaagtactttctggcaagcttcgtgatcttttcatcaatctctactcctttaatggatgtattgttaaaataccgctcacactgggtagcataggtcccggttccgtttccaaggatcaggatatccagtctgtccttttccttcacacccgccatataaggggcagccatggcataatcataatacataccggtcagccctttatccttcaggtacaccgactgcacgccgaacagaacattggtagagagcactacttccctgtcattttcataaacctgcagataattgtaaatggactctccctcataggtaagattactctgccagaaagcaaagctgttgttatggccaagaaggcagcagatcagaaatattacaatactaatcggcaccctcctggccccggtaaaatttcctctggtactcacaaaataaataacagccagcaacagcagaatacctgcaaagatcaagaatgtgatcgaggttcccactgccgggatgctgataaaggtcggtacaaaggttccgataatacttcctatggtattgaaagcattcagctttccaactacgcttccgctgtcatccagactgtctaccgaaaactttaccaaagacggtgttaccgttccaagcagaaacagtgggaatacaaagatcaccatacatgccacaaatccggctataataaggaagttactgtttacggcaaagatcagcagtgctgatatcccgatgatgatatactttcctacaaccggtatggctgcgatccacaatgctgcgatgataatacgtccataaagcttatccggatttggatccttatcagctgcctttcctccatacaggttgccaagtgccatggcgatcatgatcgttccgataatgatcgtccatacgatctgggatgagctgaaataaggcgccagcagtctgcttgctccaagctctactgccataactgacattcctgcgaaaaattctgtcagatacagatatagcctgcttttcaaaatactgttcttcatttctgtctgttttcctttctgccggcaaagatgccatgctatatctttttcaaatcagattaccgattttccgaggtccccttttggctgaatctgcaaaaaaggctcccggcgttttgcacggaaccgggaacctttctgtccatttaggacattacattttcttacatcagcttgcggaacaatgctgtcagatcttcgatgctggcatccttcgggttacccggtgcacacgcatctgcatgagcggattctgcaaggaacggaagatcctcctccttcagcgcttccagtttagccggaatacctacgtcctcagaaagcctgcgtacagcatcgactgctgccttacggtaagtttcctgatccatctggtctacgccttcaacacccatggcacgggcaatttcacgatatttctcgccggtgcagtctgcattgtactccataacgataggaagcatcattgcacaggcaactccgtgaggggtgtcataaacagcacccagtgtatgagccatggaatgtgcgattccaagtcctacattggaaaatcccatacctgcaatatactggccaagcgccatcccttcccgtccttctttggtattggcaacagcgcctcttaaagatcttgaaatgatctcgattgctttcagatggaacatatctgtcatttcccatgctgcctttgtggtataaccttcaatcgcatgagtcagggcatccataccggtagatgctgtcagtcccttaggcatggaagccatcatttccggatctacaactgcgatgatcggcatatcatgaggatctacacagacaaatttacgcttgcgctctacatcagtaataacatagttgatcgtaacctctgctgctgtacctgctgtagtaggaactgcaatgatcgggatgcagggcttctttgtaggcgctacgccctcaaggctgcggacatcttcaaactccggattggcaatgatgataccgatcgccttggaagtatccatggaggagcctccgccgattgcaataatatagtctgcaccggaagccttaaaggctgccacaccgttctttacattatcaatagtaggatttgccttgatatcggaatagatctcataagccagtccttctttttccaaaagctctgttacctttgctgtcactccaaatttgatcagatcagggtcagaacatacaaatgctttctgaaaagcatgtgcctttgcctcgtttgcgatctctgcgattgcccctgccccatgataagaggtctgattcagcataattctgtttgccataagtaaaaaatctcctttctcttctctgtggtaaaattattacctgctgcttcaattataatcgaaaatgcagaggaaaggaagtcctctttaaagatcattacatatcagccagaagctcttcctgtcagctgtccgtgttatttcataccttccggtgccttgagtggacaccttcctgtcagttcataatgacagttgcagcactcatccccgtcaccaagtaccttggtccttcggaatccgtttcccatataatgggagatcatgtagtccacaccacagataccgggcagcatcccttctaccccatacttcttggccaccgtcacaaagccacacctcatgatatcgatttcaaaggaattctgatctatatttctgtaatcaatgatccagtcattttccggaagctcaccctttttctgcctctcaagatgcttcgctgcctttttccggaagctgttcagataggtcttttccgtatttttcttccatgtaccgcctgctgcgcatcatggtcagatagtaaataaaataatccatatcctgccctttccgttatctgttgtcgctcttcatctgcatgatccagtccataaaggtatcaaataccagtctgctgtttccgcagttacagtgatttcctgcatcttccttatccgtaaacagccggaaggtcagggatcttacattgaccagtgcattgatctcctcaccgatcatctgataggggataaagtgatcctgattagcaccggcaattaaaatatcttgtgttattttatctgctatgttcatcatctggtactggttcatcttggatgcatattcaaaagcatcctttgcttcataggcatatttgccgtgttccagtccccagcgcacaatttcttcctgctttgctaatttgttaaatatagaattaataattcctttccagttatgtctgatcatccacttggcaagcttcatcttctttgcttcggaaggatctgctgcggaaagcagtacatcctggaaattcgggaaaatactccatgcaatgatcctggtgatcctcttttcaaaagcggccgcacggggtgccagcataccgccaaggcttgctccgatgatcgtcacatctgacagcctgaaataatcaaggactgtaccaaccggcttttcccattcataggtaaaatgcttgccctgtgtcctgactacaccgccctgtccgggtccctcaaacaaatacacctcaaatccatgctccgccagatacagcatcgggaaaaacagttcttcaaaatagctgtcattgccgccatgcagaagaaccatgtccttcttttctcctttggccttcacgtgcatgacagggagcttcacctcttcataaggtactgcaaaacgctctacctcgccgctttcaaaataggacttataataatcataaaacagatctgtcgccagacagtaatacttctttttatccggatcaccgtcatacatgaaaaactcactcatcctgtaataggcaatggcattttccatacgcttttcggcaaatgccttgtcccccagtgcgatcagctctctcttccagtcctcgctggtctggattgacggtcctaccttctgcacttcttctgcatctccgccatcccacatcaccagacggtttaactgatagttaaagttgctctggtcgttgaactgatacatcccctttttaaattccacactcattccattacctttccttttctttgtattttcttacttctatttttctgctattctataaataatggaagagttataaatgattctttttctcaataaccaattatcaatatataaaaggagttttcagatgccatccagccagactattttattatattatatggaaaaaacaaaggaaatgcagatcagacagctttgcaaacggctttccatcacagtaaaaactgttcaacgggccgactattcccagtcacttggctatcttgccggcatagaaggttttgcaagaaaaaatgcagtctatcttggtaatgagcttcctgctgagatgcttgttttctccggcatgacctctgagcagatcgatctgttccttgctgagtaccgtaaaatggggatttctcccattgcctgcaaagccgttatcacacccgtcaacattttctgggatgcaggaaatcttgcagaagagctgttaaaggagcaccaccagctccataaagatcccggtatctgaaacagactgcattttctttctgagacacacttctttatccccacaccatatccgcatttttagtcgtttcatacaccatatccgcgctttcagtcgtttcttgaaaagaaatgtctgatatggtatgattttcccagtactaaatttgaggggtgaagttttttgatcagaatatgttatgtagttggtatctcactgccattcgttatttattatcttatccgcatcagctatgtagaacagcacggagataaatacacagaaactgtccgataccagattgcccgcaatgctatttccatcctgaaattcaatggtatgatccggaccgatgtttacggtcttgaaaatctgccaaaagatggcggctacgttatgtaccccaatcatcagggcaaatacgatgtgcttggtattattttcgctcacgaaaaaccctgcaccatgatgatcgatgacaaacgggccgatctgccactgaccaaggaatttgtttccttattaaagggcagccgtcttgacaagaccgacatgcgaaaacagttaaaaaccgttcttcaggttgcctcagaggttgcttccggcagaagatatatcgttttcccggaaggcggctacgaccacaataaaaacgaagtccacgatttccttcccggtgctttcaaatgtgccatgaaggctaggcgtcctattgttcctgtggttcttatcgattcctactcgattcctacaaggtcttcggcgtcaacagcttaaagccggtacgcacacaggttcacttcctaaagcccatgtactatgaagattacaaggatatgacctcaaaggagatttctgatctgacaagaaaccagatcatttctgtgatccagaaggctagctgatattgcaaagaactcagccgatgcagataaactgcagggctgagttctttccttattgtttaactccaatgatattctctttcatattgctcatatattccagggaactgttccggtgtaatcacattctgtggcagatattgaaggatccctgtgttaagagccgactgctgtaaagaatccatgcatgctttcatagttcttatatcttcatccgtaacaggatatttattcctattatcttttgccttattttgaaaacatacaagtgctataattcccggaataatccaccaaaggaacccaatgattatgacaatccattctcctgtgcttaatgatgttcgtttgctgatttcctgtttatagtaattatatccttgcttaacaagtccatattcgatcaggtaatattttgttttataaaacactttatacatatcatcttctttgtctgcaaattcactcatagcctctgccattctctgtgcatatttacaaaaggcttttatattaatctttgattcatcaacattatttgtggtaaaacctgcataatattgtgtcaaagcattgtatgctgtagcctttattgccatattgggccatctgtccagttcctctattaacgtattcaggatctgattatcctcatccaaaagttcctgttttcccatttctttatgacattctaatatcatatatgcagcaaacggtgatcctttctctcttaaaggatataaatatactagtgcctgctcataattactgtgcatatgcataacatataattcggcaatcaatttcagaagcgtatctttttgtgcatagcttgcattaagtttttcaattctgtccataactgtcaatgctttattatataaataatacggttgctgaaattctgtacactgtgaaattctgagatttacctccccaattactctgtaaactgtcacagcttctgataatgcctgtatattcaatgttgcactcaatctatctgcccatttcaaagcagcctcttcattatgtttttcattcaaaaaatactctgttgtttttatcatggcttctacatcaccctgatgtgccagttttaatgtttcctgttcaatcactatttatttcctcctgcacctctctggatttttcatctgcctgcatcataagaagcaaatatcgtgagaggacatcctcattttttcctttttcaatcattttcttcaattcacaaacttcctgataaatttcttcgagtatcttatctctgaaaggacttttttctatttggttcacgatccttggtgcttcctcataatatatttggatacatcttctccccacaggtgttttagataaataattgtcacgaaaagctctcatcaccgtcaactcttcacagtcatccggcaatcccctgtactcacagcatgcagttgtcaaaaaacatcccgtagaagattcacagctattactttgatcccagtggctgcaggaatcatccggataataatagcttctatagtaggtacaatatcccttactgtcctttccttcatactcataatttctgcaggaaccacatttatacttcacaacatagtctgacattttctcccctcctgtataattatttttctcatattatagtctttttaacgactatagtcaatgtttagaggaaacaataccattaagatagttttgaaaaaggtatgggaaaactatgattgaatatagtccattttgggatactctgaaaaaatcaagtgaatctacttacacactcattaacaagcatcacatttcaagttcaacactggataaactaagaaagaacaagccattgaccaccactactatcaatgatttatgcagaattttggattgtaatatcgaagatattgcaagatatacttcttccagtacagatcagaaactataattctgaaatcgcatatctgtctgaccagaaaatcaatgataaaatagaacatggttcgtaaaaaaaagaggaaatacggtatatttacccgatttcctcttttctcatttctttctgtcatctcttcttcctgaattaataatctatatgtccatgaatgacccctctttgctacctgcctttagtgatacttttctgagaatgcccttcctatctgatattactattccatcctccgcttaaaataagtatctgccgcaagcttcagataatactgccccttctccatagattcctgaacggaaatccctctggcaatttccactgcagttacccgatttctgcaaagttcctctgccggtactttacagataccacagaaggaaacgatctccctgttaccggcatgcttcctaataccactcaaaacctttcccataaggctctgttcatccagacatccttccccggttacaactagatcacagtctttcacaagcgcatcaaattgacacagctccagcataccttcgatgccgctgaccgtctttgctctgagaaatgctgtgcatccatatccggcacctcctgcagccccagctcctgcctccggcggcattgcctgacagtcacgctctatcacttttgccacgtggatcagactagcatccagaactgcaacctcttccttcgttgctcccttctgcggtgcataaatataggcagctcccagaggtccatacaaaggattagtcacatcactcattaccgtaaattctgcctctccgatccgctgatccaaaccggaacagtctattttcaataccgctgacagcgtccctcctgccggaacaaatgaccgtccatctctatcaaagaaagtaattccaagcgctgctgccatcccacatccgcagtctgttgtggcactgcctccaagacaaaggaaaaacttccgacagccttcatccagtgccgctcttatcagctctccaaaaccaaaggtactggcttccaatgcacgaaatccggtctgctttgtcaggccgctgctttctgcaatttcaagaacagccgttccatcagaaagaatcccataggctgcctctatcagttttccctccggggaatgtactgtcactgtcttcctgcttccgccctttgcccggagaatacagtccatgcttccttctcctccatctgcaatgggaagtctgacaacctcacacttcaaatgttcttctatggattctgccagaatatcggctacttcctgcgatgtcatacttcctttaaaactgtccggaatcacaatcactttctgcataataaagtcatcctttcctgctcataacttcatcatatcattctccggggcatcaggctatgttttcttcccatatgccccgtctcagtcatttttacgttcatttcactgcctttttgggcatctatgtgcaattttcctgctgatgccccgctctgcgaagttttcggggcaccacagcatattttccttcctgatacccctgaactccgaaaacacacttccgcctttggcccctccaggcccaaaaaaggtggctctgccaaaaggcagagccacctttactcccgcactcttactgcacaatcagattagtatatcccatcaggctttcatccacagcccttgctgcttccctgccctcacggatcgcccatactacaagggactggcctctgtgcatatccccggctgtaaagacattcttcacgctggtttcataggcacctgcgccggtcttcacattacttctctcattgatatctacatggaacgcatcggttacatatttctggcttccaaggaaccctgccgcgatcaacacgatctctgcgggaagagtctgctcggagcccggcacctcgctcatcttcatccgtccgcttgcaggatccttctcccaggaaagcttcacgatcttgactgccttaaggctgccgtttttatccttcacaaattcctttaccgtagactcatagatccggggatcatgaccaaatacagctatagcttcctcctggccataatctgtcttgcagatctttggccattccggccagggattgctggcacttctggtatcgggagcctttggcatcatctcgatctgtgttacagacttgcagccatgacggatgctggttcccacacagtcatttccggtatcaccaccgccaatgataaccacatttttgcccttggtatccacatatttcttgtcttcaaaatcagaatccagcaggctcttcgtattggccttcaggaagtctactgcaaagtagatccccttggcatccctgccaggtacactaatatctctcgggttggaagcaccgcaggcaagtacgactctgtcatactccttcaagagcttttctgccttaatatccttaccgacatccacaccggttttaaacacgatgccttctgcctccatgaccttgatcttacggtctacgatatgcttctccagcttcatattggggattccgtacatcaaaagtccaccaaccctgtcagaacgctcatacaccgttacgctgtggcctcttttattcagctgatcagcaacagcaagtccggaaggaccgcttcctacaactgctaccgtctttcctgtccggaccttgggaggcttcggatcggcatagcccttttcataggcattctcaataatcgcatattcattttccttcgtggcaaccggatctccgatcagattgcaggtgcaggctgcttcacagagcgccgggcacacacgggaggtaaactccggaaagctgttcgtctttttcagacggttataagcctgctgccagtttccggtataaactaggtcattccattccggtaccagattgtgcagggggcagccgcttgtcattccgcagatattcattcctgcctgacagaagggcacaccgcagtccatacatcttgctccctgaagctgctgcttttctctcgggaggtgctcatggaactcattaaaattcttaatcctgtccttaggctttacgtcctttgatacttctcttttataatccataaatcctgttggttttcccatcgtgacacctccttattttgctgccctgactgcgtagaatgcttcgatctgtgcctgctctgcagaaagacccttttcctccatctgtacgatggtagccagcatcttttcgtagtcatgagggatgatcttcttgaacttcggcagataatcactgaaatgatccagaatcatcttacccttttcggaattggtcagagccacatgctccttgatcatatccttcagttcaataacatcatatttggaagttacttcataggaagataccatttccttgttcaggcggatatacaggtcattgtcctcatccagtacataagccacaccgccgctcatacctgcagcaaagttctttcctgtagagccaaggactaccacacggcctcctgtcatatattcacagccatggtcacccacgccctctacaacagcgatcgcaccagagtttctgacacagaaacgctcaccagctacaccattgataaaggcttttccactggttgcaccatacagtgccacatttccgataatgatattttcatctgctttgaaccggcttcccttcggtggatatacgatcagcttaccgccggataagcccttgccaaagtagtcgttggaatctcccacaagctcaagtgtcagtcccttcgggataaaggcaccaaagctctgtccgccggcaccgttacacagtacacggtaggtatcctctgccacctgatccccaagtcttcttgtgatctcggaaccaaggatcgtaccaaaggctctgtccgtattcttgatatctacctcaatgcttcttcttgcaccggtttcaatggccttgtcaagctgctttaacagtaccttttcgtccatggtattttccagcttgaaatcgtaaacctgcttcggatcaaaggtaaccttctccttgctgcccacatagggattctcaaggatcagacttaaatctacctgcttctgactcttagaaaggttatcctttaccttcaggaactcggtatggccgaccagctcatccacagtccttacaccaagctttgccatatattcccgcagctcctctgcgataaagtgcatgaagttgatcacatactccggctttcctctgaaattcttacgaagctccggattctgggtagccacacccacaggacatgtgtccagattgcagactctcatcatgacacatcccatggttaccaggggagctgtcgcaaagccgaattcctctgcaccaaggatcgctgcgatagctacgtcacggccgctcatcagcttaccgtctgtctcgatccttaccttattacgaagtccgttcatgatcagcgtctggtgtgtctctgcaagtccaagctcccagggaagtcctgcattgtgaatggaattcctcggtgccgcaccggtaccaccatcataaccagagatcaggataacctgtgcaccggccttcgcaacaccggctgcaacagtaccaacaccagcttcagaaaccagcttgacactgatccttgcctgcttgttggcattcttcagatcataaatcagctctgccagatcctcgatagaataaatatcgtgatgaggcggcggggagatcagacctacgccgggtgttgaatgtctggtctttgcgatccagggataaaccttgcctgccggcagatgtccgccttcaccgggctttgctccctgtgccattttgatctggatctcattggcgcttaccagatatctgctggttacaccgaaacgtccgctggctacctgtttgatggcagagcatctgttcttgccatcagcccctgcagaaagtctctccagatcctcaccaccttcaccggaattggagcgtccgtgaatggtgttcattgcaattgccagtgtctcatgggcttcctttgaaatggaaccatagctcatggctcctgtcttaaatctggttacaatggaatccacactttctacttcctcgatcgggattcctttttccggataattgaaatccatcaggccacgcaggttctttactgaatcctcatcattgacaagggctgtatactgcttgaacatctgataatcaccacgctttgtggattcctgcagcatatggatcgttgccggattgtacagatgctcgtcaccaccacttctcatcttgtgatgtcccacactgttcagtgtcaggtcatttgcaagtcccagcgggtcaaaagcctgtgaatgcagtgcatccacttccttttcaatatcctttaaggtaataccacccacacggcataccgtatgagggaaatatttgttaataacatccttatcaataccgattgcttcaaagatctgggatccttcataggactggatcgtactgattcccattttggaagcgattttgacaatgccatgtaaaatagcgttgttgtaatcatcaacggctgcataataatccttgtcaagcatatggctgtcgatcagctcgcggatggattcctgcgcaagataaggattgatcgcacaggcaccataaccaagcagggtagcaaaatcatgcacatccctgggttctcctgactccaggatcagcgctacactggtctttttcttggttacgaccagatgtctgttcaaagctgatacggcaagcagagacgggattgccacgtgattttcatctacgcccctgtcagacaggatcatgatgttcacaccgtccctgtaagctctgtccacctctacgaacagtctgtcaatagcacgctcaaggctcgtattcttataataggtgatcggaatcacttctgccttaaagccttcctgatttatatccttgatcttcatcagatcggtattggtcaggatcggattgcttacctgcatcacgtggcagttcttcggggtttcctccaggatattgccgtcggttcccacgtaaacagttgttgaagtaaccacttcctcacggatcgcatcaataggcgggttggttacctgcgcaaatttctgcttgaaataatggaaaagaggatgattggtcttgctcagaaccgggatcggggtatccactcccatggctgcaatagcctcggctccgttcttcgccatgggaagaatgctcgtctttaactcttcgtaggtataaccgaaggccttctgcatccgctgtctttcttcatatgcaaattccggtactctttcattcggaatcttcagatcccgcagatggatcaggttgctgtccagccactcaccataaggctgtctggaagcataaccctctttcagttcattatcatcaatgaccttgccctttgtgacatccacaagcagcatcttgccgggacgaagtctttcctttacaaggatctttgaagggtcaatatcaagtaccccaacctcagaggaaaggatcagctggtcatcgtctgtgatcacataacgggaaggacgaagaccgtttctgtcaagcactgctcccatcacatcaccatcacagaaaagaatggaagccgggccatcccatggctccatcatggttgcgtagtactgatagaagtcctttttgtgctgggacatggtcttgttgttttcccatggctccgggatcgtgatcatcactgcatggggaagatccatgccgctcatgacaaggaactccagcgtgttatccagcatggctgagtcagagcctgctgtattgactaccggcagtaccttatgcagcacgctgtgcagatgctcggattccatgttttcctcacgggcaagcatcttatccgcattaccctgaatggtattgatctcaccgttatgcacgataaatcggttcgggtgggctctctcccagcttggattggtattggtagagaaacgggaatgtaccatggcaatggcagattcgaaatccttatcctgcagatccgcaaagaaagtacggagctgtccaaccaggaacattcctttatatacgatcgtcctgctggataaggaaaccacataggtattatctgaggactgttcaaatactcttcttacaatataaagcatgcggtcaaaatcaagccccttttccacctgtgcgggcttctttataaatgcctgcatgatatggggcatacactcaactgccttatgtccgagaacctccggatgggtaggaacctctctccatccaagaaaagtaagtccttccttctctacgatgatctcaaacatcttcttggcctgattcttctgcagctcatcctgaggaaagaagaacataccaacgccatattctctgtcctctcccagtgtgatcccaaggctctttgtcactctcttaaaaaatttatgggggatctgcgtcagaataccaacaccgtcaccggtcttaccttctgcatcctttccggcacgatgctccagattctcaacgatcttcaatgcattttcaacggtttctctgctcttcacacccttaatgtttacacaggcaccgataccgcagttatcatgctcaaactccggacggtacagaggtgcatctggcacggtctttttcacatcaaacat

SEQ ID NO: 1041 - DNA, 12216 bp, unidentified
  source 1..12216: mol_type = unassigned DNA
ttaagactgtgcgctttgcagcatatgaagaaggtgcttttccagcgccttttcttcgttttggcagaaccagaagtggctcgattcgtgcagttgaagcacctgcgcgcccggcaggctgcgccgcacgagcgcgagcgaacgcgagaaggagacaagttcatccccgatggaattcgcaactgcaagcggcggcacgaggcgcggcaggtttttccgcgtccgccccattaggcgcagcaggccgagcgagttcgggatcagcgcgggcgcgttccaaagcgtaacgcccgacacgccgcgcagttcccgcgccgcaacgatgcgcggatcctcgccgggtcgttcccggcaagccgacgcggcgcggatgcggatccccacccatgtcatgcgcaaatacagcgggaaggccagcgcaaaaatccctacgatcctatccggccgctttgccgccgcgttgaccgcgagcaggccgcccatggaatggctcacgaccaggagcgttttttgttgtgcttgcagcgcggcaagctccgcgtccacatgcgcctgccattcccgcctgcccgcccgcaggaattcccgcagggtcccgccatgccccggcagcgtgagcagccggacttccgccccacgagctgccaccgcttccgcaaacggcgcaaacagggcgctgtttcccataaagccgtgtatgaacacgacgcatacgtccttcatttcaggtgcctttccatggcgcatgccgttacagatatagctttaagacgatctccccgccgttctcctccccattttcccggaagccgaacttgtgatacagcgcgagcgcacccgcattgctttccttggtggagagggtgatctcgtccacgccgtgcgctttgaagtaccggatgatctcgcgcagcgcagcgctcccatagcccttgccctgatgggaagcgtcgatcatgaagcgccacagccagtatttatcgtgcggatcgtcgttggcttcgtcgaacgcgaacatcgcaaagcccaccaactgcccatcggcataaaccgcgaacggccgcgccacgtccgggttttctaccgccgtgttcagggacgcttcgttgctggcgatgtattccgcctgctccggcgccaccttgagcgcgatgcagcccgcccggttcccatcgtcaatttttctcagttccacgttcattttggggtaacccctcttttcaatttgcttatttgtctgccgctccccttcaccggatgaagttggtcacggccccgcgttcgcgttccggcgcgagtacgccctgtgcgcggcccgcctcgatgcatttgagcagccaggccatgttccgcgccaggttgcgcatggtctgcaagccctccagatcctgcgccacgtcttccgcgtgctccccgaacgcgacattccaatacgtggaggatacgaccggcatctgcgcaatggtgaaatacttgttcagcacatccacggaagccacgttgcccgcccgccgcgcgacggccaccgccgcgcccggcttgtgcataaagagatcccggcatccgtacatcgcccggtcgagaaaggattggatgctccccgtcgggtgcgaaaaatacaccggcgtaccgaacacgaagccgtccgttcccttcgatttggcgaggaattcgttcacgcggtcgtctttgaacacgcaggcatgcagcttcctgcacacgccgcagtccacgcaatcctgcaccggaccgtttccaatccagaaaagttccgcagaaacgccctcggcttcgagcgtctttgcggcctcgctgagcgcggcgtgggtgctgcccgcctcgtgcgggctcccgttgagcagcaataccttcattttcgcattcctccttgctatggcttaattaaacttccagcccctgcacgaagcggtagagcggcttcatcgcgtcaaagccgtccagcacctcgtcgagcagcgcgggttcaaacgtctttttcagatccttggtgtaatagcaccagctgatgcccttgcggttgaggtagggcttgagcgcctccggcgcgtccgggaaatggtcccgcttatacggctcgccgcgcacctcgaacttggcgaggcgtggatccgcaaggatcgaaaggaagcgctccgggtcggccagaaggcgcgcgcggaagggcttcatcagctccgaatttgcgccgtacatgcccatgccgtagccatagccgtccgggtcgatctcaaaatacacgcagaggctttcactcgtgcgcgtgtccgggtggcggaagccgatccagccatggtcgcggtacgggcgcttgtccttggaaaaacgcgtgtcccggttcatgcgggaaacgacggtcgtaagccgcgtgttgaagttcgggtcaagctcgagcgcggcggggataaggtctgttgcgagcgcgcgcattggttcctgcaccacgcgcttgcagcgcgcccggttcgcgtcaaagaagggcttttcgttgtaaaagcccagctccatcagaaaacgatacgtgtcgggttcaaaccccttgaagttctgtcccatcttttcatccatccattgttccgtttaaaacgtcaatttcatcaaaaaggattcgcgcccttccggctggatcacgccgcgcaggatcaccgcgtccttcgtctccgcacgctccattgcgaattccgcgccctccgtcagctccgttttaaaccagacgtccagccgcttcagcgcgccgatgctgccgcgctcctccgccgtaagcgcatcgtaagcgaattcgccgtaccgctcgttgttcacatggccgagcccatcgatccagctcgggcgcacggtgcggcgctccacctccgcaaaatcggcgcgctccgaaaagcgtttttccgcatgcagcagctcctcgccgcccggcaggtcgaaccgcgaaaggatgctccggtccatgcagagccggtgcgtccttacatccagcagggaggaaaacgtcgcgcctgcggcgacaagcgcgttctcctcgtcgtaaaacgcgatctccctgcggtaggtgggcggtacatagcgcgtgtgccaggtgcgcagggtcagcctgtccttgatgcggatgggccgcatgagcgcgacgctcatcgaaagcagcacccaggccacgccgtattgtgccgaaatgcggggcgtgtcgatctctatcgcttccaaatgcctgccgatggtctccaccgcgatgcgctgatacgccgccgggtacagcgcgcccgcggcgctgcacatgctcacgtccacatataccgggtaggcatagtcctgttctctccaaccggggttcatcgttccctccttcgttctatttggttctttgcctatcataccacgatttacgggcaaatgaaaagcgccatccgaagggagaggcggatggcgcttttgcgggtaaggcttacgccttatttggcagccttcgcggcgcggatggcctcgatgagcatcggagtcaccttgaacagatcgccgcagatgccgtaatcagcaacctcaaagatgggcgccgtctcgtttttgttcaccgcaatgatgcactcggaatcctgcatgccggccttgtgctggatcgcgccggagatgccgagggcgacgtataccttcgggtgtacggtcttgcccgtctggccgacctgatggtcagcgctcagccagcctgcgtcgatcgccgcgcgggaaccgccgacgacgccgccgagctccgcggcaagctcttccgcgagcctgatgccctgctccacgtcccggctgatgccacggccgacggagacgacaaagtccgcgccaacgagatcgacgagcttcttcgcagccttgaccacttccacgacctcggtcttgaggtcagcctcggtcagggagaattgcggcttcacgatcttgcatgcgtccgccttggcctggtcgaacgcggccttcttcatgacgcccgggcgcaccgtcgccatgctggggcggaagcgcgggcagatgatggaagccatcaggtggccgccgaacgccgggcgggtcatcttcatgtcgcgggaaacgtcatgatcctggcccagcacctttgccttcgaggtgcccgcaatgcgctcctcgggcagggtggagctttcacgcaggaagttcttgtagctttccatgtccacgtcgaggtgcgtgcagtccgcgcaaaggccggtgtgcaggcgcgccgcgcagcgggggccaaggtcgcggccgatgttggtcgcgccaatcaggaacgcttcgggcttgagctccatgatcacatcgcagatgaccttggtgtaagcgtcggtggtgtaatccttcagcagcgggctctcgcagacgatcacctcatccgcgccgtagccgccgagctccttggcgaggccttccacgttgtcgccgaggagcaggccgcacagctttacgccgagctcgtccgcgagcttgcggccttcggagatcagttcaaagtcggtgggcatcagtttgccctggcgctgctcgcagaacacccaaacatccttgaaagcagcaagatcggtattgttgaacgtagccattctcagttaacccctttctcagatgatgtgctttgccgcgagcatgctcgcaagcgtttcacagtccgccttctccgcgcccgggagcatcatgcccgcgcccttttgcggcggggtgaaggaggtgaggatgttggtgggagaacccttgaggccgatggtcgtggggtcgatcaacggatcgtccttgagcgcctcatagtcgaacaccgccatgggcttgtcgtagcactcaaagatgccgctcacgctcatgtagcggggctcgttgagctccttgatgcaggtcacgaggcagggggtcttgaccttgatggtcatgtagccgtcctccagcatgcgcttgacggtaatgcagtcgccctccttgtggatgtctgcagcgtaggtcacctggggcaggccgagcttctccgcgatctgcgggccgacctgcgcggtgtcgccgtcgatggcctggcggccgcacataatgatgtcatcctgctccacgccgatgcggttgatcgccgcggcgaggatctgggaggtggcgtaggtgtcggagccgccgaattcgcggccggaaacgagcaccgcttcgtccgcgccgcgggcaagcagctcacgcagcatgccttccgccggcggggggcccatcgtcacgacgacgaccttgcagcccgtctcttccttgagcgtgagggccgcttctacagcgttgaggtcgtccgggttggtgatggtctgcatggacgcgcggtccagcgtaccgtcagggttcacagcgacctttccggaggtatcgggaacctgcttcacacaaacgatgatcttcattttaaccatacctccttcttacttcacgccgaggttgctcgcgatgaccatgcgctggacttcgctcgttccctcgtagatctcggtaatcttcgcgtcgcgcatcatgcgctccacgggatattcacgggtgtagccatagccgccgaagagctgcacagcgcggcgcgtcacgtcgctcgccgcctcggccgcaaagagcttcgccatcgccgcatccatggaataagcgggagccttcttgccggcgagcgcggcttcggtgaacgcctgcttcttcatcgcggcggaatacacaaggaactgcgcggcctgcatgcgggtgtgcatatccgcaagctggaactgcgtgttctgcatctgggaaaggcgcttgccaaactgcttgcgctcctggacgtacttgatcgtctcctccacagcgccctcgccgatgccgagcgcctgcgaggcgatgccgatgcggccgccgtcgagcgtcttcatcgcaatgccaaagcccttgccctctttgccgagcaggttttccttggggacgatgcagttttccataatgagctcgcaggtagcgctgccgcggatgcccatcttcttctccttcttgccgacggagaagcccgggaagtccttctcgacgatgaacgccgaaatgcccttgttgccggcctttttatcggtcatggcaaagatgatgtaaacgctcgcatagcctgcgttggtgatgaagatcttcgtgccgttgagcacgtagtggtcgtccacaagctctgcggtggtctgctggccggaagcgtccgtacccgcgttgggctcggtgaggccgaacgcgccaagccattcgccggaaaggagcttaggcaggtacttcatcttctgctcctcggtgccgttctcatagatcggcgcgcagcagagggaggtgtgtgcggaaacgatgacgcccgtggtgccgcatgccttggaaagttcttccacggccatgacgtacgcaagcacgtcgccgcccgccccgccatactttttcgggaacggaatgcccaggaagccgtaacgcgcaagtttcttgacggtttccaccgggaagcgttcctcctcgtcgacttcctcggcgaggggcttgacctcgttctccgcgaatgcgcgatacatgtcgcgcagcagcagatgctgtttggaaagcgtgaaatccatagttcctcctattaatgtaaggggtttcccctttgcttactgcttgttgtaaacataaaagccgcggccggccttgcggccgagcagcccgccgcgcacatatttgcgcagcagcggatgcgcgcggtatttgctgtcgtgcgtctcttcaaagagcgtatccatgatggcgagaaccacgtcaaggccgatgaggtcgcccagctcgagcgggcccatcggatggttgcagccaaggcgcatagccgcatcgatcccctccgcggaggcgatgccttccgcgtaaaggccaacggcctcgttgatcatggggatgaggatacggttcaccacgaagcccgggcattcctgcacctccaccggctctttgccaatggcccgcgcaaggcgctctgccgtggcgaacgtctccgccgatgtaccgacgccccggatgatctccacgagcttcatcaccgtcgccgggttgaagaaatgcatgccgatgacgcggtccggccgcttcgtcgcggatgcgatgtccgtaatggagatggacgaggtgttgcttgcgaagatcgtctccgccgggcagatgccgtccagctcccggaatacgcttttcttcacgtccgcccgctcaacgatcgcctcaatgacgagcgccgcttccctggcgggtgcgagctccgtcgtaaacgcgatgcgggaaaggattgcgtccgcgtcctcccgtgcgagtttgccgcgcgcgacgcgcttatcgagcccacccgcaaggcgcgcctgcgcgcgcgcaaggatctcgtcgttcacgtcgcgcactgcgacgtggtagcccgcctgcgcgaacgcctgggcaatgtcgaggcccatcgtgcctgcgccagtcacaaagatctgttccatggttactcccctttaaagttctcgcgcggcttcttttccaaaaaggcgcgcatagccatcttttgatcctccgtgttgaaacagaaggagaacaattcttcttccgtcgcaagatccacatcaataaagcggtccacacgcgtgctgatcgcgcgcttgcaggcctgcaccgcaatgggcgcgttgcccgcgatctgcgcggccatttccatggctcgatccatcagctccgcgtccgggtacaccgcgttcacgaggcggatgcgcagcgcctccgaagccgggatcggcttgccggtgaggatgagctgcatcgcataggatgcgccgatcacacgcggcagccgctgcgtgccgccgaagcccggcgtgatgccgagcgtcacctccggctggcccagcttcgcgccctccgcggcaaggcggatgtcgcagcaaagagcaagctccagcccgccgccgagcgcatagccgttgatcgctgcgatgacggggacgcgcaggtcgtcaagcgccttaaacgcgcggtgcgcaacggccgcgaagcgcttcgcgccccttgcgtccaagccggccatctcgccgatgtccgcacccgcgatgaacgccttttcccccatgcccgtgatgatgagcacgcggatggaatcgtccatttcgatctcgcgcagcgcctgctccagttcgatcagcgtttcggtgttgagcgcgttgagcgcgcgcggccggttcacggtgagcacgacggctgcgccgtgccgctccacgagaatattctttctcatattctccatctggttcaaacctccttgcggttataaacagctcaatttggctggcctcccggccttcctaagctatgatatagcattttgcgctgaaagtctcccgttattttaataacgcgcaaggaggtttattttttcacatagcacgctgggcaggcttacttgcccatgccgcgcttgaccatttcctccaccgcgaaggaggcgacgtcgtccgcatacttctgcgggccgaagcctgcgtcgtagccgagttccttggcaagctcgtgcgtgatgcgcgcgccgccgcagatgacgatgaagcggtcgcgcacgccctcggcctccagcagctcgatgagctcggtgaggttctggatgtgcacgtccttctgggtgacggtctgggaaacgaggagcacgtccgcgttgagctccacagctttcttgacgaattcctcgttgggaacctgcgcgcccaggttgtaggcttcgatcatctcatagcgctcgaggccgtaatggcccgcgaagcccttgcggttcatgatcgcgtcgatgcccacggtgtgcgcgtcggtgccggtagaagcgccgaccatcacgaccttgcggccgatgtgctcgcggatatactcgttgcactcctccatctccatcgtggtcgtttccacggcctgcacatggatgtcggtgtaatccaccgtgtgggagcaggagccatacaccacgtagaaggtgtactccgcgtcgaggctctggttgaacgcgacggaaggctccataaggcccatcttcttggcgagaatgcgtgcggcctcggtacccttatcgtcgtttttcaccggcagggtgaagctcatctgcaccttgccgtcgttcatcgtgtcgccgtagggcttgagcttggtcaggtccagcgttttatcaaaatctgctttatgggtgttatacaatccgctgctcatttacttgtcccccttcatcagctcaataaacgggttgaagtagcagtcgtccttctgcacgacgcccgcaaggcccttgccaccgtcgcgggagcgcttgatgtccgcgaacgtgccgcgctcaagcgtgccgaaaaggccgatgtcttccatctcgcccaagagattcgtcgccttggtgagcacctcgttggcgcgcgtctgcatgatgccgccatccttgaacacgagctcgttgccgagatcctgcatggtgcggaagatgtactgcgcgttttcgatggaaagcgcgcggtcgctcatgaacggggtgtggatcgcctcggtgagcatgcccaggaggtgcagcttctggccggtgaggatcgtcaccatgttgaagagcgcgtcctgcacatggccgcggaagatgttgccggtcatgaacttcgtaggcggcatgtacttgagcggcgcgttggggaagatctcgcgcgccatctgcgcctgggcgagttcatagaggaagccgttctccacgtccggggagatctcgaacgcgtggccaaggcccatctgctcctcgggcatgcccgcgcagactgcgaactgttcgttgaggaactgggaagcaagcactgtatgcgcctcttccacggcgtctgctgtggtgaggtagttgtcctcgccggtgttgatgatgacgcccgcgaaggaattgatcacgcgggagaagtattggtcgatgatcgtgcgctgggggttaatgtcacggaagaggatgccgtagagcgcgtcgttgagcatcacgtccaggcgttccaaggcgcccatcgccgcgatttccggcatgcacaggccggagcagtagttgcacaggcggatgtagcgtttttcttccttgccgacctcgtcgagcgccgcgcgcatcaggcggaagttctcctgggtggcgtaggtgccgccgaagccttccgtcgtcgcgccatagggcacgtagtcgaggagggattgtcccgtcgtgcgaatgacggcgatgatatccgcgccctgcttggccgcggccttcgcctgcacgatgtcctcatagatgttgcccgtcgctacgatgacgtaaagatacgggccttccttgtcgccgaattcgcggaggaattcgttgcgctcggccacgttcttgcggatgcgcgccacggtggcttccgctacgggcatgatcgccgcgcggatctctgcagcgctgtgcgcggggagcttggtcaggtcaagttcgcccttgtcgatcgcctcggcgatggcctgcggatccttgccggtttccgcaatggcattgccaatataataggccgcgccgccggcgagcacgccgcggtcaaacagatgatccaccaccacgttgggcagcgggacgtccatctcgttcacattgtcgatgccgagcaggcgacaaaccgcgcgctcgacggtgacggtcgtatgcacgtcgataaagctctgcgtgtcggccgcgatatgcgccgcacttgcccgcgctttgtcgacgagttcccggttcaggttcagtttgctctgcatgttaatcacctttcttcggaaattgtggctgccggcaaaggccggcaaaggcacaaaaacgcgcgtgaaaaatcgctttttcgcgctgccgttcccctgatgaaagcggcgcagcggggatgctgcccgcacccccgcgccgtgccgccggaacttttacttctgcttctgcctgtcggcatagcgatccttgcgcagcagcttcgtcggctcgaggtacttctgctcgatgccatgggcgatgccggcaacgccggtgatctcggccgccttgcgcttgccttcgcagacctcgcagtggcactcgttcgcatagtgctcaggctcggtgtaagtggtgataacgccctcaaagttgcgcaggatcaccttgcgcggcgtctggctgatgacgtactgcggcatgaccggggtcttgccgccgccgcccggcgcgtcgaccacgaaggtcgggatgcagaagccgctggtgtggccgcgcagtgcctccatgatttcgatgcccttggagaccggcgtgcggaagtgggaaaggccgagggacgggtcgcaggcatagatgtaatacgggcggacgcggatgcgcacaagctcgttgacgagcttcttcatcacgtatacgcagtcgttgacgccagcaaggagcacgctctggttgccgagcggcacgcccgcgtcagccagcatcgcggtcgcgcgcgcggcttcctcggtgatctcattggggtggttgaagtgggtgttgagccacacgggatggtgcttcttcaggatcgcgcacagctccggcgtaatgcgctgcggcatgacgaccggcgtgcgggagccgaggcggacgatctccacatgggggatcttgcgcagctcagtcatgatgtaatcgagcatctcgtcgctctgcatcaggcagtcgccgccggaaagcagcacgtcgcgcacctcgggatggttgcgcacatagtcgatgcaggtgtcgatctggttcttggggacggcgcagtcatgctggccggcaaagcgcctgcgggtgcagtggcggcagtacatggagcactggtcggtgatgagcagcagcacgcggtccggatagcggtgcgtaaggcccgggcagggggagtcgatgtcctcatgcagcgggtcagcgtcttcatagggcgcaaaatgcagctcggcatccgtcgggatcgcctgcttgcggatcgggtcatggggatcgtcgaggtcgatcagggaaagatagtacggcgtgatggccatgcgcagcttgccaagcgtcgctttcacgccctcttcctcctcgggagtcaggggcatatgctttttgaggtcttccagcgtttcgatgcggttttcgacttgccaatgccagtcgttccactgggcatcgggcacgtccttaaacatgccgttggctctgctctgtctcat

SEQ ID NO: 1042 - DNA, 52968 bp, unidentified
  source 1..52968: mol_type = unassigned DNA
cagcttggcaatggctccgtcacacacgccgtccaggtcgctctcaatctcccagcggcaggcgctcagccacttggtgtgggggatgccggctgcatcaaacagggcgttggccacggccttgtccatgcagacagcacttgccagcacgccgcagcccacataggggatgccggccagctccagcagaccctgcacggtgccgtcctcgccccacaggccgtggagcgcggggatgaccacatccacgtgcagcttttccacctgaccggacggggtgaacaggatcatgccgtggtcggcgcggtcggggctgatgacgcagggcatgttgccgggcagctcttcccagctgccgtcggccatctgggcgctggtggcctcggtgcacagccagcggccctcccgggtgatgcccacagtcagcacctcgtagcgggcgcggtccaggttatccacaaaggtaccggcggacacgcggctgacctcgtgctcgctggacatgccgccaaacagcacgacgacacagagtttatcttcagattgcatcatgatctctcctgatcttatggccggaaggggcgctttgcccggggccggattttctataagcagttatagacactttattatactatatctatgcggcggattcaaggcgtaggccaaaacaggcaggagagaaaaaattcaaaaaagtctcaaaaaacgcaaaaaatccgcttgacggatggcaaaacgcgtgatacaatgatatcacctcttttgcggggttattaagtgcgccctgtttttagggcgtgcaccgcaagccgagggaggttcaaaacaaccgttataatggaggtgtcaacaaatgaccgttaaaatcactctggcctgcaccgagtgcaagcagcgcaactacaacaccacgaagaacaagaagaacaaccccgatcgtcttgagatgaagaagtactgccgtttctgcaagaagcacacggttcaccgcgagacgaagtaagaaaggcggacgcatcatggcagacaaaaccgagaaaaagccgggctttgtagccagaatgaagggctttggcgcaaacatcgccaagttcttccgcgacacgaagagcgaactgaagaaggtcgtgtggccgtctaaggcggacgttaagaccaacaccatcgtcgtgctcgtgaccgtggcgatcgcagccgttgtgatgatcgcgctggatgccattttcggcggcatcctgggcctgatcatcggcgcatgattcatcttgaaacggaggcttaaccaaaatggaagaacagaccaatgaggccctttggtatgtagtccacacctattccggttacgagaacaaggttgcgaacgacctacagaccatggtggaaaaccgccatctgcaggacctgatctgtgacatcaaggttcctaccgagatggtgcctgagatcaaggacggcaaggagcgtatggtggagcataagctgttccccggctacgttctggtcaagatggtcatgaacgacgatacctggtatgtggtgcgcaacacgcgcggctgcaccggtttcgttggtcccgcatccaagcccgttcccctctctgctgaggaagtggagaagatgggcgttgaaaaggcggctccgctgaccgtcgatttcaatgtcggcgataccgtgcagatcaccgccggcccgctggaaggctttatgggccttgtggagggcatcgataccgagagcttcaaagtcaagctcaaggtcaacatgtttggccgcgagacacccgcagaagtggatatcgcgcaggtcgagctgccgtaaccaaccggcatccgtttaccaaggtaagaccgcagtgcggttcttatagagcgtgtgcatcgtgtgcgcgctcgtgggaggcgtggggagaccacgccgcaactcaccacagatttttggaggtgcatttactatggcacagaaagttactggctacattaagctgcagatcgaggccggcaaggcgactccggctccccctgttggccctgctctgggtcagaagggcgttaacatcatggccttcaccaaggagttcaacgagcgtaccaagaaccagatgggttatgttatccccgtcgtcatcaccgtttacgctgaccgctccttcagcttcattaccaagactcctccggctgccgttctgatcaagaaggctgctggcatcaacaccgcttccggcaagcccaacaaggaaaaggttgctactctgaccgccgctcaggtggaagagattgccaagaccaagatgcccgacctgaatgctgcttctctggaagctgcatgcagcatggtccgtggcacctgccgctccatgggcgttaccgtcgagggctgagacacaaacagtgggagggcataacactgcccgcatgaccacataggaggatatacaatgaaacatggcaagcactatgtcgatgctgctaagcaggtcgatttttctaagctgtatgatatgaacgaggctctggagctggcttgcaagaccgcttccgccaagttcgacgagaccgttgagctgcacgtccgcctgggcgttgacggccgccacgctgaccagcaggtccgcggcgctgttgttctgcccaacggcaccggcaagactgtccgcgtctgcgccattgctaagggcgctgctgccgctgctgctgaggcagccggcgctgacatcgtgggtgatgacgagctgatcgcacgcatcgccggcggtttcatggacttcgacgttgttgtcaccacccccgacatgatgggccgcgttggccgtcttggtaaggttctgggcccccgcggcctgatgcccaaccccaaggccggtaccgttgctcccgacctgggcaaggctgttaccgaggctaaggctggtaagatcgagtaccgtctggacaagcagaacatcatccacgttcccgtgggcaaggcatcctttggcgctgagaagctgtacaccaacctggataccgtgatgagcgctattgcaaaggcaaagcccgctgctgcaaagggtacctacttcaagagcgctaccatcgccaccaccatgggccctggcatccgtctgaacaccctgaagtatggtgtctaatttgaagctttgaagttttttctgtcatcctgacagatgacagaaaaaatctttaaaaaatcaaaaaagcgcttgacaacaccgcgcgtttgcggtaaaataatgatgctgtttttgagacagcaggtgctggagtccagcgtaaggtgcaaaccgcctgccgagaaacgcgcgtaaagttgttttatgcctctttctcgacacagtgcgggaaagaggcttttttcgttgctccggctttcgatacaagtttttgaaatgaggtgaaaccgaatgcccagtgcaaagattctttctgaaaagcaggcttatgtcgctgatctgaaggcaaagtttgagagtgcggtttccggctgcgtcgtcgcttacggcggcatcaacgtcgagaacgacaccaagctccgtaaggagctgcgtgaggcaggcgttgattacatggtcgtgaagaacaccatgctgcgtctggctgtcaagggtacctccctggagggcctggctgagaacttcaagggtgacactgctgttgcctttgctcacgaagaagaccccatgtccgctgcccgcatcctgtgcaagtaccaggatggcgataagtccaagaagttcgtcgtgaaggctggcttcatggaaggcaaggtcatggacgctgccgagaccaacgccatcgcaaagctgcccaaccgcgagggtatgctgtccatgttcgcaggtgctcttaccagcactctgtccggtctggctgttgctatgcaggcctacgccgacaagcaggaggagcccgctgcctaatggctgcgtgaccgctgcttaacacaaaactgaaacaaacaaaaaccattgatattggagggttattaccatggcttctgagaagattactgccatcatcgagtccgtcaagggcctgaccgttctggagctgaaagagctgatcgacgcttactgcgaggagttcggcgtttctgctgttgctgctgctgctcccgctgctgctggcgctgctgctgccgctgaggaagagaagaccgagttcgacgtcatcctggctgaggctggcgctaccaagatgcaggtcatcaagctggtcaaggagatcaccggtctgggcctgaaggaagcaaaggctatcgttgacggcgctcccaaggctgtcaaggagaaggcttccaaggctgaggctgaggacatcaagaagaagctggaagaggctggcgctaaggtcgagatcaagtaatttgatcccttctgaacgttctttcttgaattcttattcttgaaacaaaaggcactctcgctgaaaggcgagggtgcctttttggttgtgcgcccgcagcagggcaaaaagctcccggagcggtgcggcattcagtgccaccgctccgggagctttggttttgcttcgtttattcgtagtcgatgggcagggtgggcagaccgttcagatcaaggcctgccgtgtggcccgccatgtactggtagtagccctgcgccgcgatcattgcgccgttgtcgccgcagaatttcagctcaggcagatagaccttggcccccagcttctgggcaccatcgttcaccagctgacgcaggcggccgttggcggccacgccgcccgccagacagacctgctttgccccggtgtcggcagcggccagcagcagcttttcggccagaatgcccgcaatgcgttcctgaaagcttgccgccagatcaggcacgttgatctcctcgttcttcatctgggccttgtttacctcgttcagcacagcggttttcaggccggagaagctgacgttgtacttgccgtccacatggggcaccggcaggcggtaggccttggggtcgcctgtttttgcggcatttgccacgctggggccgccgggatagggcagacccagggtgcgggcgaccttgtcaaaggcttcaccggcggcatcgtccacggtgtggcccagaatgtggtagtgggtgtagtcctgcacctccacaatatggctgtggccgccggatgccaccagacagaggaagggcggcttgagctccggatgggtcaggtaaagggccgcaatgtggccccgcaggtgatgcaccggaaccagcggcttgttggcagaataggccagccccttggcaaagttcacgcccaccagcaccgcaccgatcaggcccggcgcaaaggtgacagccaccgcgtccacatcgtccatggtcttgcctgcgtccagcagagcctttttgaccgtggcgctgatgaactcgcagtggcggcggctggcgatctcggggaccacgccgccataaagagcctgctccttgacgctggtggagatgacgttgctcagcaggcggcggccatcttccacaagggatgcggcggtctcgtcgcaggtggattcaattcctaaaacgatcatagttcagtgagcctccagccaatttttgccagtatgcacatcggtgctcaggggcaccgcgtagtgcacgcagccttccatttcctcccgcaggatctgcgcggccttttcggcctccgcctccggggcttccacgatcagttcatcgtggaccgtcaggatcaggcggctttccatcttctcgttccgcagccgccgccagacacgcaccatggccagcttgataacatcagcggccgtgccctgaatgggggtgttgcgggccatccgctcgccgctggcccggatgttgtggttgttgctgttcagctccggcagggcgcggcggcggccgaacagggtggaaacgtagccgcactggcgggcatccgcaatggtcttttccatataaccgtcgatattggggaaggtggccagataggtctgcaggaaggcctctgcttccttgacgctcacgccgatgtccttggaaaggctgtaagcgcccttgccgtacatgatgccaaagttgatagccttggcgctggagcgcaggcggggcgtgacatcctcaggccggatgttgtagatcttggctgcggtgctgcggtggatgtcggcaccggagaggaacgcctcctgcatgtgtgcgtcgccggtgacatgggccaggatgcgcagttcgatctggctgtaatcggcatccaccagcacgcagccgggctttgccacaaagtaggcgcggagcttgctgcccatctcggtgcggatggggatgttctgcaggttgggattgtcagaggagagccgcccggtgcgggcctcggtctggttgaaacgggtgtggatgcggccatcctcgccaatgaccttgagcagaccctccacataggtggagttcagcttctggcaggcacggtactggagaatgtcctccaccagcgggatgtcccgcagcttttccagtgtctcggcatcggtggaccagccgttcttcgtctttttgccgtggggcaggcccatggtatcaaagagcagggtgcccagctgtttggggctgttggggttgaaatcggaggtgcctgcctccatctcgatgcgggtcagcacctggtccagctcctgccgcagctgcacgccgaaggcttcgatgccctcacggtctacaaggatgccggtgcgggtcatatcggccagcacctgtgccagcgggaactcaatgttgttgtagagcgcgtcctcgccgttttcggtgatctccgccttcattttggcgaacaggtctgccaggaaaccggcatcggggtactcctcacaggagaacgctgaccttgcatggtagctggtggcaagggtggtgagcagatagtgggaagcggaagcgtccagcaggtaggcggccagcttgccgtcccagacgatgctgctgccccagctgcctgcggccatggctctggcgtagaggggggcggaatcgaatacatccagcgtcaccttggggtcgtccagcagggagaccagctcctcctcggagaggggatacacggtggtgtcctgcacggcgtaccaggcctccggctgcacgaccgcgctctttttgcccagaacggcggggcgtgcggccaccagatagtggccggaaggctctgcgggcagggacgcaatggctgcgtccacctccggcagggtatcggggtcctgttccggaacgatgccgtccagcccgaaccgggtgatgagggtctggatctccagctcctgcatcagacggacggcggcgggcttgttgccctcggtcaccttgtaggccccttccgctgtgtcgatgggggcatcggtgcggatggtgcccagcgtgtggctgaggtaggcatcctcccggcaggccagcagattttcccgctgacggggcttgatgatcgggctgtccagatggtcgtacacgctgtccagggtgccgaagttcttgaccagggtcatggcggtcttttcgccgatgcccttcacgcccggaatgttgtcggaggtgtcgcccatcaggctcttcacctcgatgagctgcttgggctcaatgccgtacttttcgtggatggcatccagatccatggtctccgttttgctgcgtcccatggcgctggtggccagcagcacggtggtggtctcgctcaccagctgcaggctgtcgcggtctcccgtggccagaaagcagtcgtccctgcgggcctcgcaggcagcggccagtgtgcccagaatgtcgtcggcctcccagcccttggctgatacctgacggtagcccagatcggtgagcagttctttcaggatgggcatctgctgggccagctcgtccggcatggcgtggcgggtgcccttgtagccgtcatacatttcgtggcggaaggtggggtgcttcagatcgaaggccacggccacctcgtcgggctcacactcccggagcagggaattcataatattcaaaaagccgaagatggcattggtatagcggccgtccttggtggtcagcagcttgatgccgtaaaaggcacggttggcaatgctgttgccgtcaatgaccagtaaacgcatagtcagtctcctccattgcattataactcaatttatagtatagcacaaaatgggggccagcgggggatttttgcagaaaaaacaaaaatgccctcccgtgttgggaaggcaggtgaaggtgttactccgagatggtgatggcactcaccgggcaggcctgtgcggcttccacggcggtgggtacggtgtcgggcggcagctcgcccggcacagcgacggccaggatgcctgtcatctggaacacctcggggcagatcccggtgcactgggtgcagccgatgcagagatcggggtcaacgaatgctttcatgggaagttcctctctttctgaaatggcccgcccttcgttcaatctcagggtcggcttgtgataaagcaagtatggacggaaagaagatgaattatccctaggttttttccggcagatatgatacaatagagcacacaggatccaggaggaaaaacgatgaacattcagatctttggcaccagcaagtgctttgataccaaaaaggcccagcgctatttcaaggagcggggcatcaagttccagatgatcgacctgaaggaaaaagagatgagccggggcgagtttgagaacgtggcccgcgcgctgggcggctgggagcagctggtgaacccggcggcaaaggataagcagacgctggccctgctggatgcactggtggattggcagaaggaggacaagctgttcgagaatcagcagctcttcaaaacgcccatcgtgcgcaacggcaaaaaggccaccgtgggctaccagcccgagatctggaaaacgtgggaataaatcgcgctttcacaaaaaatccacgcctcgggttttgcaccggcgggcagtttgtggtatactgaaagctggtatttccccaaaagatgacctgatttaggagacgataacgatatgaagacctatatgaccccggaagaacacgcccggctccatcgccgccgcgcccggcagacccttggcctgctgatcgccgtgctggcgctggtgggcattgtaacggtcgtgcgggccggtgtgaagggtgtggccaccctgtttgacgacacccagcagaaagcggaatatgaggaccggctggaaggtctggtcctgttcgacccgctgccctttgacggcatcgagaacatcgatgatctgaccctgcgcgaagccgccgtctggggctgcgtgtacagcatccaggagacccagggaagttttgataactacaacacggaccccgacaccgaacagctgctgctgccctcggtggatgtggatgcctatctggcaaaactggtgggccccagcttcaagctgacccacaagagctttgagatggacgacatgactgtcgagtttgacgagacgacccagtgctataagatccccgtcaccggcagcgtgggcaccttccgcgctaccgtcaccagactgttcaagaaggacggcctgctccacgttaccgtgggctatatccccacccagagcagtgatgacagcatcctgaacacctcgtccgacacgcccaccaagtatatggattacctgttcagccgccagagcggcagctggtacctgaccggcctgaccgacagcgagaccaagcctgaatctgccgacagtgcagcctctgctgcggagcctgccccgctggctgagagcgaggtcaacgatgccatccttgcaaccgcaggcgattctgccgccgccagcgccgttgctgacgaggctgccccggtggaagaggcggcggagagcaccccggcggagagcaccgaggcttcctctgagagcccggcggcataaccgaaaaccgaaatctgacagaacacccctgcacggaatgtgtgaagcattccacgcaggggtgtttttgtttccagattatttcagatcaaacctgaccacgaccagccgataccacaggtagggcaccatgttccagatcatccacagctccatgaggatatagttgggcaggtccttcaggcggaaggggcgcttgccgagccgtccctctttgagcagggcaaaggcttcgtgcattcccttgtcccaggcttcgccaaagccctgcttgtggaacttgtagcacttgagcagatagcccagcgccagcgggagaaagttcaggatgagcatgagcagcggctcgttcttgagggggagcaggatgctgttccggccgctctgctggctcttgaaggcgttgtacttcaccgcgccggtgctggcaccgcagatgtggtagcatttggcggtggggcagaggacacacttgtagcctgcattgttggcacgccagctcaggtccacgtcctcaaagtaggcgaagaagttttcgtcaaaggtgccgatctcctccagaatgctcttgcggtagagcgccgcgccgccgcaggccgagaagatgcgcttctgtttggtgtagcggctggcccggcggccgtcgccggtcttgcaggcaaagcccatccaggtgacgtaatcaccggcatcgtcggccagctcccgttcaaagtggcggagcatcaggctctgcacggcaaaaattttgggatcggtctcggcggtgcggatgagttcggccagccactcgggctcggcaaaggcatcgttgttgaacatgaccacatactcgcccttggcccgggcaatgccctgattcacggcgtgggagaagccggtgttggtgccgttttcgatcagggtgaagttggggcggccgcagtagctgcgggcctgctccagactttcatcggtggaaccgttgtccacgatgatgagctcaaaatcctgctctgtctgggcatagaccgactcgatggagtccttgagccagcctttgccgttgatgttggggatgacgatggttgctttcatatatagatgctcctgaaaattcaacttcagggcagattataccataattgcgttgaaaaagaaaccggcagttgggaagaaaagcggaaagcacaatgaaaaacttttccggacttttgtagcaaataaccaaccacttcactgcacgattgtgcaatctgcccttgaattgtgaccaaagcgtgtaaatattgagaaaatggctgcaaaactgtttacaaaagagtaacagaatgatatactttacaccagtgaatgaaacgctcttttgtgaagaaaggatactgacgtggaaacagccaagcactttggaagcaaacttcggaaaactctcgctgccctgcttgcaacgatggccctgatggccgtgctgctccccggggcactggccgtggacctgaacgttgatgttgggttctacttcaaacagagccggggcggcacctgcaccctggcctctgccgcaatgatgcttcgccgccgggcctatctggatgggatggacagctgggtggatgtgaccgaaaacggcatcaagagcacggcctggtcgggtgggctctcccacagctttacatacaacgatatgcatgtgggttatgcgaccctgccttcgggcaaggcggccaagacggaagcgctggtctccattctggcaaagcatccggagggcatcgtgctgtacgaccgtaccagaccccatgccgtgctcctgacggactacaccgacggcgtgttctactgttccgatccttccaacggcgttgcctccggccgtgtgccgctgtctgccgctagcatctccattggcggcgcgtcctgctactggtacatcaccgaggatggcaatgacgatggtctggagcttctggaagaggctgtgcaggcggaggaagctgccgcggaaactgagaccacggcagagactgaagtcgctgctggcgaggaaagcagcagtcaggattggtggacgagcctgtttggctgaatattgatcttctgggcagctggccgttgagtcagctgccttttttgttagcatcctcaccctctcaggccgcttcgcgtccagctctcccaaagggagagcttttgacaaaaccgcaaaccttgcatttactgccaaggcctcccactttgggggaggtggcatcgcgtaagcgatgacggagagggtgagcccgttcacctccgcagctctgtccccgggaaatagtgcgccagaatttcctccgcgctctgtccctgttcggccagcgccttggcaccccactggctcagccccacaccgtggccatagcccttggtggtgagaagaaagctgccctcctgatactgcaccgtgaagcaggcgctccgcaggcccagcgctttgcgcagggccgggccggtgacgctttgcccgcagacaggcagggaggctacatagcccgaaggggtgagcgcggcctctccgaaccagctggcaggtgcggcagggtcagggagcaggcccagcccggcgagagcctgctgcatctgctcggaggtgaattggacggtataaaggtagttgtccgcattgaggtcggtggagctgtccacggccacaagatagggaagggcagtgccccagacgttttcactggcttcagtcatgccgttggagatggcaaagtagcttgtcccggcgggggcgctgccatagtagagcacatcggtcagcacactgtccaccagcgccgagaggcgggcatagttctcctcataggcggtgccccagtagctgcggaggactgcatctgttaagtatccctgccgccggacggggtccacgctcagccagccggaagctggttcggcggcatggtcgcggcagtagagggcatagctgtgggccgcgatggcctgcgccttgagcgcctcgtccggccagctgatgggcatttccgccgccacggcaccgatcagatagtcccgccggggcaccgagaccacggccccggcgctctggtcggccagcagaaagctctcgctgtcctgatcggagggcggtatggcggcgctgtccggggcggcttccgaagctgcagtgcccggcaggggagcggaagaagccccctgtgttgggccgaacaccgccagtgtcagccggtaaccggcgatcggcaggagcgtacccagcaccagcagcagggcgcagaggagaaagaatgtctttttcatcgtagttttccctcccggacaggcatttttctgggcccagtgtaccagcccggcagggtgaaaaagcgcacatttcatccaagacttgaatttacttcacaaaagcgctatcataagggtgtgccatcatggtggatggccggaaagtatataagagagaaataagagaaaggggaaatccgcgcatgaactatacccatgcagaagtagcgtcgctggacccgcagaccatgcggacgctgtgtgaagagtatctggcaaacaactacatcgacccggagacgagtgagcgtctcggtgtcaagcgcggcctgcgcaacccggatggcaccggcgtgctggcaggcctgaccaatgtctgtgacgttgtgggctacaaaaaggatcaggaggggcatgtcattcccattccgggccgcctgatctaccgcggcgtggacatcaatgagatcgtgaacgaggcttaccgcaatgaccgctttgtgtttgaagaggtcatctggctgctgctgttcggcagcctgcccacccaggagcagctggacgatttctgtgagctgctggcagagcaccgcgccctgcccgatggttttatggataccatgaatgctccttcgcccaatattatgaacaagatgcagcggtgtgtgctgggcctgtattcctacgacgagcacgccgaggatctgacgctggagaatatcctgaaccagagcatcaatttgatcgccagtatgcccaccatgatggtgaacgcttaccagatgaagcgccgctattatgacaagcagagcatgttcttccacatgcccaagcccggccagagcaccgcggagcacatcctgagcacctaccgcccggaccagaagttcacccacgaggaagccaagctgctggatatgtgcctgctggtccacgccgaccacggcggcggcaactgctccaccttcaccgcccgtgtgctgtcctcctcgggcaccgatacctactcggccattgcagccgccattggcgcgctgaagggccccaagcacggcggtgccaacctgatggtcaaccgtcagctgcaggatatcctcaagcatgtggagcacccggaggatgacgacgaggtgcgcgagtatctgcgccgcatcctgcgcaagcaggcgggcgacggctccggcctgatctacggtatgggtcatgcggtctataccatgagcgacccccgtgaggtcatcctgaaggagcgcgccaagcacctggcctacgagaagggctttgaggaagagtacaacatgctgtgcagcatcgaacggctggctcccgatatctttgccgaggagaagggcagcagcaagccggtgtgcgccaatgtggacctgttcagcggcctgatctacaacatgctgggcatctctgaggatatctacaccccactgttcgccattgcccgtgtgccgggttggtgcgcacaccgggtggaggaagtcatttttgccaaccggatcatccggcccgcctataagtatctgggcgtgcgccagaaatataaaccgatcgaggaacgctgatgaacgctttatttgtgctgattttcacctgtggtggtgcccttgccattgggcgcgggcttgatcttgccctgtggacggactggaacaccggcctgtgcacggcgggctctgtctggctgcggtacggcggcctgtgggcagcgctggtcgttggcatcattgccgcccggaagctggcccgccagccccttgttctgcgcagtgcctgcaggccggtgggagttacatcggtgctgggcggcgtgtgtgtcggcctggccggtgcggtgcgtctggcagtgggcatgaccggcgttggtgcgctggtgcgtgccgtgctggagctggtgtgcgctgtctggctgatccgactgggccgcagctggacggataagggagaataccgtctgcccggccggagcatgaccccggcggtgcttggcacggcggtgttctactggggggtgctgagccgctttatggagaacagctccagctggcaccgggtggagccgactgccatggtttggcagatgctggctgcgctggtgtttctttcggcgatggtccgcgccctttggctgccggaaacgtccaacggctgccagctgtgcgaggcagggatctgcacgttcctgctctgcttctgctgggaactgccccgggtgctggtgctgctgttccatggcatcacggcagccgacctgcccgaggtgctgtttggctttggcatgtgctgcatcggcacgctggggcttttcactgtggcgcgggtggcaggaagtgacggaaggcctgcaataccccgacacgccgttggttgaattgctgaaaagattcccataaaagctgtgaaaatcgttcaaaaacaaaaaagtgtgaaattaccttgttaattttttggcgggcacttgaaggtttccgcgatttggtctataataaagctaccgtgattattatccgataaaagggtaagaacatttaggaggtactattaacatggctgttagagttgctatcaatggttttggtcgtattggccgtctggctttccgtcagatgtttgatgctgagggttacgaggtcgtcgcaatcaacgatctgaccagccccaagatgctggctcacctgctgaagtacgatactgctcagggttccttctgcggcaagatcggcgagggcaagcacaccgtcgaggctaccgaggactccatcattgtcgacggcaaggagatcaagatctacgctgttaaggacgcaaaggatgctccttggggcgaactgaacgttgatgtcgttctggagtgcaccggcttctacaccagcaaggagaagagcatggctcacatccaggctggcgcaaagaaggtcgttatctctgctcccgcaggcaacgacctgaagaccatcgtcttctccgtcaacgagaagaccctgaccgctgaggatcaggtcatctctgctgcttcctgcaccaccaactgcctggctcccatggctgacaccctgaacaagacctaccccatcgtttccggcatcatgaccactgttcatgcttacaccggcgaccagatgatcctggatggtcctcagcgcaagggtgacctgcgccgtgctcgtgctggcgcacagaacatcgttcccaacagcaccggcgctgctaaggctatcggcctggtcatccccgagctgaacggcaagctgatcggctctgctcagcgtgtacctgttcccaccggttctaccaccatcctggttgccgttgtcaagggcaaggatgtcaccaaggagtccatcaatgctgctatgaaggctgctacctctgagtccttcggctacaacgaggatctgatcgtttcttccgatgtcatcggcatgcgttacggctctctgttcgacgctacccagaccatggtcgctaagatcgacgatgacacctatcaggttcaggtcgtgtcctggtacgacaacgagaactcctacacttctcagatggtccgtaccattaagtacttcgctgagaactgctgatctcgtagctgcgataaaaattaaatgatttgtcgactggagtttgtcttgttcaactacgaacaagactgatctggtacgacaaccattttagagatttttgcaccctttcttttgtggttcttccatgagagaaagggtgtttttttatgtgtttgaaggatctccgcgatgaatttctgtacgactgtgaatgccgccatcttgccaaaggctccctgcgcaactaccgggcagcgacacgatttctggtggactttctggaatcgaagcacatcactgaactggaggaggtcaagccacaccacatccgggatctgatgaaggaaaagcaggacatgggtagcacgccacggtacatcaatgatctgctcaaagtctggcggacttggttcaattatctggtgaccgagggctatctggatgagcgggataacccggccaagaaggtgaagcctcttcgtcagcccaaaaccatcattgatacctttaccgtggatgagatgaggcggatgatccgattttacgatgggacagatttcctgtcggtgaggaataagaccatcattatgctgctgttcgacatcgggatgcgctgcaatgagatgatcctgatggagccggaagacatcaaaccggactatattctggtcaagcatggcaagggcagcaaggaacgcgtggtgccaaagtcgcctgcgctgtccaagcaactgatgaagtatcgtaccctacgggatgcctatttaaaggaataccccagtcgccacaagaacctgtttctcagcaaaaacgggaagcctttgacggatgaagcagttgcccggatgctgaaacattaaaatctatcaacagaaggcctctgcctttcacagaaatgtgatgggcaggggcctttttacgttaagaagaaggttgctcaaaaaagaaaaaagtatcctccacatggaaaatggagggccatgagcgaaatataacgttattccattagactttgcgttttccgactcctcattgacacctgatgggagaatatccgattcatctccctgcgctttcgggtcaggtcagagtgcacatagcgctgcaaggtgatgttggcgttggcgtgtcccaacaattcgctgagggtctttacatcacaccccgcctgcaaacaggtggtagcaaaggtgtgtcgcagcgcgtgtggacgtacttgccggacggtcgcctgtttcagatacgccttgacgcttttccgataacagcggggctctgtaggtttggattcattaccagatagaaaccatgtagaatcactggcttttccgcgcagctttttcagcataataagcagttgtttctggattggaatttcccggcgggaggtgcgggttttgggtgtctgggtgaccacctttgtatggccgtttccacaggaaattctgcagaccgtccggttgatctccagcgtgccaagtttcaggtcaaaatcgccccattgcaggccgcagatctcaccaattcgaagccccaattccagccccagtagtaagccgattttgcgaggcgtggggttcgcctgtacatattgatgaagtcgctgctgttccgccggggagagaggcgcagaaattttgtcgatggcttttggcagcgcaacttccagctccattggacgaatcagacgtaaatgagtggcatatttgcagatgcggcgcagcatggagagacattcccgggcagaggagtttcccagcggtttgtgtgccgcatctgtgggcgtgatgatttgctgcatggcccgctccagaaagctttcctcaagggatgcaacgggcactttgctcaaaaccggaagaagatacttgtgcagtgtgtacgaataatgcgcataggtggattcttttacagcattccgatgggagtgcagccacacctcggccaacgcttcaaaggtcaggtcagttcttttcagattgtagaagcccgcttccgcttttttccgaatcagtacctgcttgacctctgcatagactgtgccatagacgtagccccactgaactttaccttccgatgtacgcgccttgatgtacctgccttcccaccgaccgtccttacgcttgcgaatgttttctccccgtcgagccatcgctgtttcctcctgctgtttagaccctcatctgaccccttattttctccatcttcgtttacagctggaattattatacagaactgggcataatacaaaaaacgatccggccttcgcgatgctttttcagggtcaaatgtgatacatttatgatgttttctattgaatcccagatataaccatgataaaataagatgagattatagacaacgatgtcaaaggaacggtatcctccattttccatgtgaaggatacccctttactgcggaaaggggtgaacaaggtggcattgcgtctgtttgagcacaacgagaaagcatatcatgcggcagtccggatgatggagcagtacggcaaggctgctattgtccaccccaccggcaccggaaagagctacattgcgttcaagctgatcgaggacaacccggagaaggtcgtgatctggctttctcccagtgaatatatcttcaagacacagctggagagcctgaaaaggaacgacccggactttccgctggcgaacgtccatttttacacctatgcgaagctgatgtgctgtaccgaaggccagcttgcagaaatcgcaggacttcagccctcttatatcatattggacgaattccaccgtgccggcgcggaatgctggggcgaaagcacggtggctttgttaaagttatgcccggaggcaaaactgctgggcttaacagcgacaaacgtccggtatctggataataaccgtgacatggccgaagagctttttgatggctgtgttgcgagcgacatgacccttggcgaagcaatcgtcaggggtattttgcctactccgaactatgtgaccaccgtctatcagtaccagaaagacttggcacgttatcagacaagagtggataatctgcgttctgctgggattcaggacgtaaatcaaaaatatctggatgccttgcgccgcgccttggaacaagcagatggattagacaaggtttttgaacatcatatcacgaacaagtccggaaagtacatcgcgttctgcgccaacaaggagcatatggatgaaatgatctcccatgtgccggagtggttcgcaatggtgaatccagacgtggcggtctacgaagcctactcggatgaccccggtacagacaaggcttttgccgacttcaaggccgatgaaagtgaccgcctgaagctgctgttctgcatcgacatgctcaacgagggggttcatgtagaaggcatttcaggtgtcatcctgttccggcctactatctcacctattatctacaaacagcagattggccgtgcactaactgcgggggataattccgctccacttatcctcgatgttgtcaacaacttcgaaggactatgtagcattgcgggtttacaaggcgagatgcaggaggcagtctatcgtctgaatgccaacggtgagggcgataggatcatcaccgagcggttcgaggtcatcgagcaggtgcatgactgccgggtactgtttgagcagttgcaggcaagcctttcttccagttgggatcattatttttcggaagcaagcatttactatgcggagcatggcaacctgaatattccaaaacgttataccacaccggcgggattgagtcttggcgagtggctgacgacccagcgccgtgtccgtgcaggacagatttctggtaacctgaccgagcaacagattgcacggctggacagcatcgggatggagtggggcaaccgcaacgatgccgcctgggagcgtggtctggaagaaacgagaaaatttcgggaacagtttgggaatttgcaggttccggcgaaatacaaaacgaaagatgactatcctctgggaaagtggatcaacaatgcgcggaaacgtcgaaacgatggaaagctgacggaagagcgcattcgacaactggatcagatgggaatgatatggagcgtatttgatgccaaatgggaacagggatatgcacttgctatgaattatgccgccgaacacggcaacttgaatgttcctgtcaattacacgactgaagagggcgaaaagctgggtgcgtggattttgaatcagaggacggcatatgcaaaagaaatgctttcccaagaccaaatcgaccgtctggaagaaataggaatctattggggaaaccgtaatgatcgccagtggaacgaggtctatggtgccgccaagcgttattttgaggcaaatggaaaccttgatgtcccggtggcctatatttcaccggagggctatgctcttggaaaatgggtgcggcggcagcagtatgcgtatcggaatccggagaaaagcaatgcgatcttatcacaagagcgcattgagttgctggatgccatcggaatgcagtgggagaaacctgacccgtggcagcaccggtacgagctggcgcaggaatataaaagatgccatggaaatctggatattccggcaaaatacaagactgcggatggcatttggctgagccgatgggtgtacaaccagaaacggctgctgcaaagcgtgtcggaaaaattaagtgaaaatcaaaaagaacaactaaaggagttattggggtattatgtcaaaatttcagcatgatgtgatgttgaagatcgtaaaaatcatcgatttggtaatgatcacaattccgtttgcactttgttgggagctgtattattcgtatcagatctatgcaaagtttggttggaagggtaactgggccatgatcggtctgtttgcggtgttgttctttctgttgggtaaagtctacgatgcgttctggatgtctttgcagcgcatttcagagttgatctacggacaggtactggcagctatggcaaccgatggcattctgtacattgtcatctgcctgatggcccggcggctctgcaatcttctgccgggcatcgcagcgattgccggacagattctgatggcctcaatctgggcgaagttggcgcatggatggtactttaatacattccaggcccagccgactgcagtcgtttatgatgttcgtcatggattggaaaagctcatcaatgagtacggtctttcaaaaaaatacgatgtcaagatgaccttgaacgttgaggaatgcctgaacgacctgagcctgctggatggaatgcagagcgtgttcatcagcggtgtccacagccatgagcgcaatatcatcctgaaatactgtgtgggacagggcatcaatgtgttcgtgatccctcgtgtgggcgatgtgattatgagcggtgcccagccgatgcatatgttccatctgcccatgctgcgtgtgggtcgctatatggcaagcccggaatttctgtttgtgaaacgggcaatggacattgtgatctcactggcagcactggttatcctgagtccggtgtttctgattacggctattgcagtcaaatccgatggtggtcctgctttttacaagcaggttcgcctgaccaaagacggtaagcagttcgagattttgaagttccgctccatgcgtgtggatgccgaaaaagacggtgtggcgcgtctttccactggtgacaaagacgaccgtatcacgaaggtcggtcatatcatccgcgcctgccgtctggacgagctgccccagcttctcaatatcttgaagggagacttgtccattgtaggcccacgcccggaacgcccggagatcgccgcccagtattgcgaggagatgccggagtttgcactgcggcttcaggccaaggcggggctgaccggctatgcacaggtgtacggtaaatataataccacgccttacgataagctgcagatggacctgatgtacattgcacatcccagcctgattgaggatctgaaaatcatgctggcgacggtaaagattttgttcatgcctgagagtaccgagggtgtggcagaaggtgcgaccacggcgatggggcaggagacggaagaatgatgcagaattacagtgtcctgatgtctgtttattataaggaaaagccagaatacctcgagcaagcaattgaaagtgttcaatcacagacgttcccaactgatgatttcatactggtatgtgacggaccactgaatgatgcgctggacaaggtgattgccaaaaagcagcaagagatggggataactttaaatgtcgttcgccttgctaagaacggtggacttggcaatgcactgaatgagggcatcaagcactgtaaaaatgagctggttgctcggatggatagcgatgatattgcgtatccggatcgctgtgagaaacagcttgctgtgtttaacgagcatccagaagtgagtatctgctctggcatcgtggaagagtttactactgatccgaataccgtcgatgcgaagcgtgtgccaccggagacaaatgcggaaattgtagaatttgcaaagaagcgcaatccgtttaatcacccttgtgtgatgtataaaaaatccgcagtcgaggcggttggttcttaccaggacttctacttgttggaggactattacctttggctccggatgctaatggccggatatcaggggtacaacattcaggagccgctgctccatatgagagctggctcggatatgtacttgcggcgtgctggttggaaatatgccaagacgcaggcaaagctgttcaagtttatgaagcagaaaggcttcattggaaagggtcagtacataaagagctgcgtgattcgtagtgggtcggcgttagctccgaattggctgcggaagtttatgtttgagaaagtgctgagaaagtagatctcgttggactgggaaaatgtgtatgaaaattaggataaacaaaaatacattggcatgtgcattctggactgtctctatgatggcgtacatgtttcagtgttaccagagagagcttgcaacattaattgtcccatgtctggcgacatttcttttgctcgagagtaatcatatgaaattccaatcgtacagaagttggatgccattatactgctttttctttttttatctgacaatttcagggataatttcgtatataaatggctcgtctattggaagtatgctacggttttatttgattcttttggcaattccattggcacaatgtgtaagagaacctaattttcatgcagaatggatagttcttaaaatacttgcggtggttaaggcgagtacagttttgcttacatggatagatgttttcatcaaacaggattatcaatcctaccgtatgtgggcaaaaagtacgggggcgggagatatctatattttaaacggcataccgcgagtacaaattttaggaacaagtatatttgtgacactgtttatctgtgaattcatgaaagaacgcagattgacattttacggagcactaatggcagtaactgcccttgcggcaggaaattcggcatacgttttgggaatatttgcttttgtagtgttttattatggtccggtacttctgaaatggattaaaaagaaacactggaaattgatcttcgttattccaatttcaatagtgatggttacagtatttggattctattcgttgagatcgatgaaggtaaaggcagaattttcaaatgcggttcgagtagaacaaattcaggtgctaacggaaacaaatcccattatcgggagtggtttaggacataacgtcagtggcggaggagtgtggaggcagtatgatggcgatacgtatttcgaattacaaacgctatatatctacaatcaaattggaataattggactaggaactttttatttactgacacttattccatatgctagacaaaaaaagcgaaaaaaacttatgtgctatataacatacctgatttacaccttttttaatccgtactgttttgatagcacacatatatttgcagttcttctaattactaattgtgttgaataaaattgccaacttattgattctggcagtgaaaggctaaaaatgagtgaaacgcatgccttggtgactttatataatccaagcgaaaaagaatttaataattgtaggattttgtctcaacaggtggacacggtgattctatgtgacaatagtcaggaatcccatgagaccgtatttcaaaatgaaaaaaacataatctacataacaaaaaatgagaaccttggtcttggtgcagcatttaatgtggcactaaaaaatgatacctatggctggaaagatgatgatttgatcatattctttgaccaggattcacagattggcgaaggttatattcaagcgctgcaggatgaataccggaagattgagacacttattccgaatctggggtgtctggggcctgtattttacaatacgagcaatggtcggacggagagaccacggcagaagaaaaatattacagatgagacatatgaggtaagcaataccattacatcttcgttgatgatgcggtatggaaacctgaaaaggatcgatttctggaatgagaaagtttttctggacctggcagattgggatctgtgttggcggatgcggaaagccggtatggtgtgctgcatgacagaaaaagttgtgctgcaccattctgtaggaaacggcgaaaagaaagttggtcctattaaactgagagtcggccagcctttcagagaatactatcagacgagagatgcactgtatcttcttcaggaaaattatgtccctttgaagatgcggctgcggctgattgcaaatgtgacgatacgtccggttgtacattatttgatgctggatgataaaaagagcaggatgaaatttataagacggggaatcaatgactacaagaagggagtccatggagaatatgggcaccaacgataagacacgagagaaaaaagcgggcaaccgtgttctcaaggcgggcattggatacacaattggaaattaccttttgaagggactttctttctttacaatcccaattttcacaaggcttctgacaacgcaggattatggaaagtacaatgtttttctttcctatgaaaatataatttttgtgttgatcggatttgcaattcacagtagctataagaatgcacgttatcggtatggtcttgcctcggaaggagcggagaaaggaaaggactaccattcttatgtttcgacaacaatttgccttgtgctttgcagtacagcgggctggctgttggctgtaaatatatttggagatgcgattgaaaattttctgcagctggataaagtctgcttgaaccttttagttttgtatgcatttggaaatgccgtaatgacttgctataacacagatgcaggaatcgattacaggtaccaaaaattcataaaagtatctggcataaatgctatacttaacattctgctttcgctgtttcttatcgtatttgtttttcagaaggataagtatattgggcgaattctgggttcgacaatagcgattgtggtagttgcagtcaatataatcatcgaattttggaaaagagaaaaaccgtgtaaagatctatctctcctgaaatggggggttaagtatagcattcccattatcccgcacggactcagtcaaattgtgcttaatcagtttgatcgaattatgattatgaaaatgggaacggatgagaatgctggaatttacagttttgcttataatatctacgcaattgtacaggttacggcaaattcgctggatagtgtttggggaccatggttttaccaaaaaagaaaggacaatgatttattctcaataagaaagtatagtggctactatgcatcgtacatggcactgttttcgagtgcgattatttttatggcaccagaaatcgttaagattctggcaagtgaaaattactgggatgcaatatattctgtgattcctatcgttgcaggggggtattttgcttttttatatacgattccgtcctgtgttgaatattattatggaaaaactcagtacatagccagcggaacgattatggccgcaatcgtaaatattattctgaattttgtttttataaagaaatatggctacattgccgctgcatacacaacattggcaacatatttcctttattttcttctgcattatctgattgcgataaaggttgaaggaaagattttgttctcaaataaggtaatgctaggatgctccgcaggaatattttcagcagtaatactgggaaatgttctgattgaccatattattctgagaatcttagtcgttttgttattgtgtggagccggcttgattcatgaagagaagacattaggcattctaaagcgattttggaggtcaaatagatgaataaaacagaattaactatacaggaaattcatacagttacgctgaatgtgctacagacatttcatgatttatgtgaaagagaaggttttcggtattaccttgcctatggaacattgctgggggctgttcgccatcatggatttattccgtgggatgatgatgcagacgtttggatgccaagagaagactatgacagatttctggattattgccaaaagaacaaggactcgatagcaccgtataaactttcaaatcgtcaaactgaagaaaactattattttggtatttcgagattctcggaccggcgatataaatacatacataccaataatgaaaaaccgattgatatcggtgtgtttgttgacgtttatcccttggacttctatggggaaaatgttgctcaggcaaaaaaaattttgaaacatattcaaaaagaaaataggaaaataagaatatatgtaaatggaaaaggaaactcgaccatcaagtcctgtctgaaaattccatatcaccttttgttgcaggttgtttatggcagagattatttaaaaaaatttgatttggaaatagttgaatatatacacgagaacacaaaaaacacaaaccgatacgttggcattccagtgtggtcggatgaaaagaatccggagcaattcgaaaaagcatggtttgagaaaagagtgctattggaatttgaaaatcacaaattctatgcgcctgaaaagtgggatgaacttttagcttatatttatgggaactatatggaacttcctcctgtagaaaaacgcgtagcttatcacgagtataagattgtgaccagaaaagaaccagaactctaaaatctatataaaaacgatcgagtccatgaagctttaaatgagaagaaaagattgatgcagatagtgcgtaaaaatctagctttttatggtgcaaaattattcgatgctcatgatgttcttatgaaaatgcataaacgttacataaaattcgatgaaaagcctacagaatatatgggactcccatgggatggtatcccttatgaaagcgactggctaaaaaatagaattgaaagcgaatttgagggaaggtatttttatgccccctcataaatcgacaaggtattgaccagatcttttggagattatatgcaactgccgccagagaataagcgagtttacaaataccacctgaaatgctatttggcagagcagtagcgttggagaacattaagaataacttgatgacataaaaacgcaatcttggattgcggtttcatgctggcatactgttcaccaaaaactgtggagaggtgtatatgaacaaacaagaaagcgatatcttgaatgcacttttgctagaaccgtttattaatcaaagaattctagcagaggtttcgggtcattccttaggggttgtaaaccattccctcaaggagcttattaaggcagggtatctgaacgaagcaatcagccccacagccaaggctgtgtcggagtacaagaataagactcccaaacgagcaattattctggcagccggttttggtatgcggatggtccccatcaacacagagatgcccaaaggcctgttggaagtcaatggggagcctttgattgaacgaatcattaagcagcttcacgaagtgggaattcaggaaatttacgttgttgtgggtttcatgaaggaaaaatatgaatacctgatggatgaatacggcgtggaactggtggtcaacccggactatgcctccaagaataatctgcattcgctaaaactggtaaaagagcatttggagaatgcatacattgttccttgcgacatctggtgtgaccgcaatccgttccaccgccatgaactgtactcttggtatatggtcagcgatcttgtggagaatgaaagcaatgttcgtgtaaaccgcaagatggaactggtaactgtaccagaaaacgctggcggcaatgcgatggtcggaatcagctaccttataaaagaggacgctgatacagtttccaatcgtatagaggaactttgcaagaagccgcagtatgatggttcgttttgggaagaagcactctataagaaggatcgcatgatcgtcacagctcgagttgtgcattcggcagatgttgtggagatcaacacctatgagcagcttcgtgagatcgacagcgattccaaccaactgaaaacggatgcgattcgtttaatctgcaaggcattgtgcgcaaaaccggaggatgtcacggatattacagtcctgaaaaagggaatgaccaaccgttcgtttctgtttacctgtaaggacaaaaagtacattatgcgtattccgggagagggtacggatcaactcatcaatcgccgtcaggaagcagcagtgtatcatgccatcgctgataaaaacatctgtgatgatatcgcctatattaatccggagaatggctataagattacagagtttctggagggcgcccgggtatgcgaccccaccgattatgaagatgtcaagaagtgcatgagccgtctgcgtgatttccatgcgatgaagctgaaagttgcgcatgagtttgatattttcgggcagatggagttctacgaaacgctgtgggatggcactccttctgtttacaaggactatgagaaaactaaggcgaatgtctggtctttgaagccttatattgatgcacacgcaggcgaaaagattttgacgcatattgacgcagtaccggataactttctgtttgtccagaaaaatggaaaagaggagattcgtctgattgactgggagtatgcaggtatgcaggaccctcatgtggatatagcaatgttctgcatttattcgctttacaataagcggcaggtggatcgcttgattgcggcatattttacagacggttgcgatgatgcgacacggattaagatttactgctacatcgctgcctgtggactgttgtggagcaactggtgtgagtataagcggaatctgggcgtggaatttggcgagtattccctgcggcagtatcgctacgcaaaagactactacagaatcgttcaggatgaactgaagaaatcaggggaaagtggggcacagaaaaatgcctaaagtagaaagagccattattatggcggcagggctgggaaaccggatgcaccccgtcacgctgacaacgccgaagccgctggtcaaagtaaacggcaagcggatgatcgatacggtaattgaggggctgcacaacaacggcatttcggagatatacatcgtggtgggctacctgaaagaacagttcgccccgctggtgacagagtatcccggtgttcgactgattgaaaacccctactatgatacctgcaataatatcgcatccctgtatgtagcaagagatcacatcgagaatgcaatcattctggacggagatcaaattatctataacccagatattctggctccggagtttgaacgctccggttataacagcgtatggacggatgagaaaacggatgagtggctgcaaaccgtagaagatggcatcgtcacctcctgcagtcgtacaggcggcaaaggtggctggcagttgtatagtatttctcgctggacggctgaggatggaaaaagactaaagcatcatctggaagttgagtttgagcagaagcagaatcgtcagatttactgggatgatgtggcactgttctgctatccggaagaatatcggctgggagttcgtccgatgaataaggacgatattatcgaggtggacaactttagtgagttgcttgccttggattccagctacaaaaaatacgagggggaagcatgaatgaacaaaaatagagagcgtgggaaaattgattggatgataacgctgctcccactgaccattatcattgccctgtgtattctgttcttctttgcaccggaacagtccaatgccgtgctgagccagatccggttctttttcggagatacctttggtacctattatctggtgattggactgggtattttcatcctgtcactgtacattgcgtgttcgaagtacggggatattgttctgggtgaacccaacgaaaagcctcagtattccttctttgcatggggctccatgatgtttacttgcggtcttgctgcggatatcctgttttactctttttcggaatgggtgctgtatgcaaccgacccccatctggcagagatgggcagcattcaggactgggcaggggtatatcccttgttccattggagctttatcccgtggggcttctatctggtgctggcggtagcattcggctttatgctgcacgtaagaaaaagaacccgccagaaatactcggaagcctgccgcccgattctgggcaagcacaccgatggctgggcaggtcgcatcattgacctgctggcggtgttcgctttgctggcgggtacagccactactttcagcgtagcaacaccgctgatggcaaccatcatcggagagctattccatgttgctgtgagtcgcacggtcatcaatattatcatcctgttgatcacttgcaccgtgtatacttactctttgctgcatggcttcaagggtatcagcaaattggccaatgtctgcatctatcttttctttgggttgcttgcctttgtcctcctgtttggcggcgagacccggtatattatcgaaacaggtttttcctcgctgggacggatgatgcagaatttcatcgacctttccacctttaccgacccgctgcgtacctccaacttcccccaaaactggaccatttattactgggcctactggatggtttggtgtgtggcagcaccgttctttattggcagcatttcccgtggcagaacggtacgccagacaattctgggcggctatgtgtttggcgtgggctctacactgaccagcttcattgtgctgggtaactactccatgggactgcaaatgactgacaaggcggattttatcgcgaagtatctggaaaacggcgatatgtacggcatgatcgtggatatgatcaaaactatgccgggtgcaccggtcgttatggtggctgttctgattacgatgatcgccttctatgcaacatccttcgactctatcgcactgacggcatcctgctacagctaccacaccctcaaggatgatgaacagcccaataagggcatccagttgatgtggtgcttcctgctgattctgttgcccattgcattgctgtttgccgaaagttccatgaacaacctgcaatcggtcagtatcgtagcagcgtttcccattggtgcagttatcgtgatgattgcggcaagtttcttaaaagatgctaagaaataccaatcagagcttgggacggatgaaaagcgatgaactaatagatggcttgacagaaatgtgctgcgaagttgctttggcctgtacaaggcctttgacgagcagggcatcggctacgccaagactgccgtgggcgacaagtatgtctacgagtatatggccaagaacggctgccgcattggcggtgagcagagcggccacatcatcttctctaagtacgccagcaccggtgacggcatcctgaccagcctgaagatgatggaggtcatgctggccaagaagaagcctctgagtgtgctggccgccccgctgaagatctacccgcaagttctggaaaatgttcgagtgaccgataagaaagccgcacaggatgatgaggcagtgcaggcagcagtcaaggctgtgctgaagcacttggtaacactggtcgtattctggtgcgcgagtctggtacggagcctctggtgcgcgtgatggtggaagcccctgaccatgttacctgtcagaagtatgtctctcaggtcgtggaggccatcaagggcaagggttacgccgtctaacgcaagttatgccgatatatatttcttgccatccaatatttgtaatgctatacttatgttataaatactgaatggaggtgtcccctatgccccgtcccaaaggtagcaagaacaagcccaagaccgtaaaagcaaccgttgactttgccgcacagatcactgaaaagcagtctgcaaaggaggccgctgccgccgaaattgcatcgatcgctgcgaatattgacactctgaaagcagacctgaaaaccaagaaagccgagatgaaaactatcgacaaagaaatcgccagaattgaagctaaaaaggtcaaagctgaaaccaaagcagcggaatccgcaaagaaagccgaagccgaagctgtgctgaagaagctactggcatccggtatgacggcagatgagattctcgaaaagctgaaataaatattttagagccgtgtggatcagtcggagcgtagagctaaagttctggcagttcacacggttttcttatataaatggtagttggtgtgactcggaacgaatagaactgttctatatcaaacataaatgactacatttcccacaccatggctcaaaatcacgtccggagaaatttcagttaatcagcaggaacatgttggcaatctagctgtcatagagcttctgaggagagtgcctgggagagctgctgccccgacggaagccctaggtttcaggcgtttgaaccgtggaatgtcgtaaaaatatccgctgaaatctgaaaaatgcaggtcagaagcgaaacggattgaatccttgcaaatggcgctgaaacgtgatataatcgtagtacgaacaaaccggttttggtacgacaacggtatgttctggtactgtaactgttgttacgaaactgtgaagaactacttggaaaagtgtaaaaattcagcgtagctgcgacgacacctatcaggttcaggtcgtgtcctggtacgacaacgagaactcctacacttctcagatggtccgtaccattaagtacttcgctgagaactgctgatcggagtttctcctgagctgaataaagcttgattgcgccctttctcttgtgtgatgcgagagaaagggcgctttttgctgaccattttgggcgcaataaggtgctttcgtaaaatggcacaacacatttgcagtgtgccgacaaaagcagcacgcattcgatctccatctattgcaacccttctcccgatatgataaaatggtaaaaataaatggagacaacgaaacagtatgattacgaaacgtgaaaaactgcagtatggatacctgtttctgattgatctgctctctctggttctcagcattgggctggcgtgggggctgaccgcaggtgttctgcacaagatgggggacttccagctggacgatctggtagaagcctgtttcttattgctgctggcctatatcctgaccttttttacatttgatcagagcgaaaatatcgtgaaccgtacgccgattcgtgaagttgaaattgcggtgcggttcaattttttgctgaccctcattgatgcggcctgcctggcgctgaccaaggcttccatgctgcactcccgctattttctggtgtttgtgcccgtcatcgatgtctttgtgatgacgggcgctcatgctgtcctcaaaaagatgctggtacgctcccgctataccaaggggattcagagccttgtgggagtggtgaccacgcaggagaacgcaagccccattctggaagagctgaaaaaggactggtccaagcgtgtgaccggccttgccattctggaagctgccccggagcagcttcacactgagatcgatggggtgaagatcgaggcgaacttcgataatttcatggactggctgcggcaggcagcgctggatgaagtgtatctggatgtggcgcaggagagtgaggagaacatgctgccctatctcgaggagatggagagcatggggctgacggtccatttccgcctgccggtgctggaccggatcgaaaaagcctgctgtgatgagaccagtgcggtgcgcatcagccgggaactgagccgctgtgcgggcggcaatgttgtgacgatgggcacggtggaactcaagctgcgggatcaggtgctgaaacggaccatggatatcgtgggcggcatcgtggggtgcatcatcagcatccccatcattgcgttggtggccattccgctcaagctggaaagccccggcccgctgatcttcaagcagcgccgggtgggccggaatggacgtgtgttctacatccacaagctgcgcagcatgtatgtggatgcggaagcacgcaaaaaggagctgatggcccagaacgaaatgaacggcctgatgttcaagatggaagatgacccccggatcacccgggtgggccgcttcatccgtcgcaccagcatcgatgagctgccgcagttttttgacgttgtgcggggctccatgagcctggtgggtacccgcccgcccacgctggatgagtaccggcagtacgagagccaccacaagcgccgcctttccatgaagccgggaattaccggcctgtggcaggtaagcggccgcagcgatattgatgattttgaagaagtggtcaagctggatgtccagtacatcgacaactggtccatctggatggatatctacctgctgttcaagacggtgggcgttgtgtttgaccggaaaggggcaaaatgaattatattctttttggtggatctggttttatcggcacccatctcattcatttgctgctgaaggagtgcgtcagacccggcgacgtgatctacgacctggatcttgtgatgcccggggaagagggcgtggtgccgggcattgtggaaaagaacgatggggtgcagtatatccggctggatgtgcgcaagcccattgattttgagttcgttccgactccggaggacgtgatctttgatctggcagcggtccaccgcacccccggccacccggaagaagcctattttgaaacaaatatccggggcgcggaaaatgtgaccgcatttgcggaaaaatacggtatccggaagatcctgttcaccagctccattgcaccctatggcgcgtctgaggaccttaagacggaggagactctgccaactcccaacacgccgtatggaatcagcaagctggtggcagaaaagatccaccagatctggcaggcccgtgatccggcccgggagttgaccatcgtgcggccaggcatcgtttatggcaaaggggagcacggcaacatgacccgcctgtacagggggcagaagaagggctactttttctatgccggccggaaggacaccatcaaggcgtgcatctatgtcaaggagctggtgcgcttcttcaagtaccggatgctggatcattctttccccggagcagagatctataactgtacctacgagccggcttataccattgaagaaatctgcaatgcgatgcagaaagcgaccggcctgcaccgccatgtgccgttggtgcccgccggactgctgctgtttgcggcgggcattctgggacccatcgggggcaaaaaggtgggcatccatcccgcccgtgtccggaagctgatggtatccaccaatgtctgcggcaggaagctggccgccactgattacaagttccactatacgctggaggagagcttccgggactggttcgaggattgtgaccgcaaggagctggtatgaccatggagcagaatgcacagcccatccgtgtggctcagatgatgacggatatgaactacggcggtgtggagatggtggtgatgaactactaccgccacatggaccgttccagagttcagtttgattttttcgcgctggaaggctcgaccctgccccagcgggaagagatcgaacggctgggcggccgggtgtatgtggtgccaaaatatacccacctgccgcagtatgaacgggagatcgggcggctgttccgtcagaacggataccagatcgttcactcccacatgaacaccctgagcgtgctttccctctggggggcaaagcgtgcaggggtgcccaaccggatcgcgcataaccattctacggtgggcaggggagaaggggcaaaaaatgtgatgaagtacctgctccgtccctttgccgcagtgtatcccacccggctctgtgcctgctccagaacggcaggcagctggctttatggtgaaaagcctttccgggtgttcaacaatgccattgagcttgaccgctttacttatgatgccgccaaacggaaagccgtccggcaggagcttggcctgggggatgaactggtgctgggccatgtcgggcggttctgctatgccaaaaatcacgaatttctgctggatgtaatggcagaggtctgcaagcaacggccggatgccgttttactgctgatcggagaaggggaaaacgaggccactgcccgccggaaagcggaggcgctggggctgcaaaggaatgtccgctttctgggccgacagagcgatcccgcaaagttttatcaggccatggatgcctttgttctgccctcgcggtatgaggggcttggaatcgtgctgatcgaagcacaggcggcggcactgccgatcatctgttccacagaggtgccgcaggaggctcaggtcctgcccgagatgcagtacctgagcttgcaggaaagcccggcagtctgggcggatgcggcgatccgggctgcagaaaatggccggcggcgggatacctctgccgagatgcgggcaggcggctttgatatcgtcaccgaagcgaagaggctggaagagttttacttcgacctgctgaaatgaggagataagatggaccctttggtaagcattatcgttcctgtttataatgtaaagccatatctgaaccgctgtgtggacagtctattggggcagagctatcagaacatggagctgctgctggtggacgacggctccaccgatggcaacgagaccctctgtgatgaatatgctgcgcaggatgcccgggtgcgggtgcttcacaagaaaaatggtggtctgtccgatgcccgcaacgctggtgtggacgcagcaaagggggaatatctctcttttgtggatggcgatgactgggtgtcaccttattacatcgagaacctgtaccgggcactggagcaggcgggagcggatttttcagccagctgttttgaagaggtgttcgagggccagccggtgcagtccgtgcccacagagcgtctggaagcattcgagatcctgagccgggaggaatgcctgcgccgcatcctgtatcaggagggcatggaggtgaccacccccaccaagctctataagcgtgcactgtttgagggcgtgcgctacccggtgggcaagctctatgaggatatcccggtcgcctacgaggtgacaaagcgtgcccataagacggcacatatcgcaaaccgggattactactatttccagcggggcagcagcatccagaatatggccttcaaccccagaaagctggatagtgtgcggcactgccacgcgctgatggaaaatgtgaagcgtgatttcccccagttgagccgtgcggcagaatgccgctatctgagcaatgtctgcaatattctgttccagattcaggacaggcagcatgaaaagattgaaaaggccctctggcaggaagtgaaaaaataccgccggaacgttctgctggacccgcaggcccgcaaaaaggcccggctggcggcggcgctctcctacagcggctatgccatgacccggcgggtctatgaaaaaacgcagtggcgtggaaaaaagtaaggtggagggatccggttggaggaaagaaaaccgcttgtatcggtcattgtgccggtctataatgtttatccgtatctgcgggactgtgtgcagagcgtgcaggcgcagagttaccaaaactgggagctgcttttggtagatgacggctccaccgatggcagcggggaactttgtgatgaactggctgtggaggatgaccgcatccaggtgttccataagcccaatggggggcagtctgatgcccggaatgtcgggttgcaacagacgcagggaaaatatttttacctgctggacagcgatgacctgatccgctccacggcccttgcccagttcgtggagcgctgtgaggcagatggtgctgatgcagccctgaccccgctggagatgttctcgacagagcagccggagggacggacggaaaatccgcaccagatcccagagctgctgaaccgggaagagaccatgcgccggatgctgttgcatcagggcatcgggcatggggcaggcggcgttttcttccggcgggaggtttggggagatctgcagttccccgttggcatcctgtacgaggactatgcggtgatgtatcgggccattgcccgctgtgcaaaagtggaagtgtttccggaaccgatgtacgattatcgcatccataccggttcgaccatgaagagcggcattgccgagaagaatctggtcattctggatgtgggcgaggacgtgacccgctttattgcggaaacggtccctgtgctgaaagcggaagcggaatacctgcagctggttacatacctgaagacactgaaaggcattctggatggcgattttgccagctatccggaggctcaggcacggatctgccgctttgtgcaggaacaccgggcgcttgcccggcggccctgggccaaaagagcagaccggatcaaggtggaaacacttttgatcagcaagcggctgttttatgccgtttatgggctgggagaatggaaaaataaacacacagtcgaaaaataaaatggagaagttatgctgatttatctgggggcttttgcggtttctgtgggcattgccgcctatggcgagcacctgcggacgaagaaaaacaacgagaagggcttttatctctgcctggcgctggcggtgctggtgatggcggtattggcaggcttgcgggacccgtccattggcacggacagcgtggtgtatgagggatgggtggcggatgcaaagctgcaggatggtttgctggcctgcatccggcagcggcacaaaacagagccgctgtttatgacgctggtctatctggcggcccatgtttttggcgatgtccattggctttactttatggtggatctgctggcctgcggcctgtttatgatcgggctggtgcagtataaggagtatgtctccgtgccctatggctggctggcttacctctgcctgtattatggcgatacctacaatgccgagcggcagtctgtggcgctgggtgtggcatttctggcgttcagctttgcgtggaagaaaaagtatcactgggcggtcctattgctggcggtctcctgcctgttccacaatgccacctttatctcgtttggtgcactgctgatctatatcctgcttcagcatttcgacaactggtgggtcaagggtggcctggcggcattttcggtctaccttgccttcttcagcaaggctgtggtcaggctggctctgaatgttgactttattgatcgactttacggatattattatgatgccaatgcgggcggcttcacgctgaatcccatcattgtgcgtctgccttttctgatcctgcccattgtgctgtaccgctggtatgccagagaggaaggggagggccgccgccgctttacccgctcggatgctgatttctggatcgtgatgatcctgatcgagatggcaacggcccagctgcgcaacatcaatgtgccgctctaccgcatctgcctgtattttgcgttcttccgttatctagccattggccgtgtggtcaagtgcgtggaggatgagcgtctgcgcaggctgctgaaggctgccatgtggggaatgctggtcatcatctggatctatcaggcgtatattcagggcaacaatgccatttgcccgtacacctcggagatcctccacatcggcagagaaacattcttctgagggaacggaacatggaaacagagctgatcagtgtcattgttccggtctacaatgtggaaccctatctccgccgctgcgtggacagcatcctgcaccagacctatcaggatcttgaggtcctgctggtggacgacggttccaccgatgccagcggagccatctgcgacgaatatgccgcacaggaagaacgcgtaacggcagtccaccagaaaaacgggggactctctgcagcacgcaacacagggctcgaacgggcacagggaacgtatctctgctttgtggacagtgatgactttctggacagccggatgctggaaacgctttgccgtgacctgcaggaacaggatgcggatgttgctgtggtgggcttccggatgtttgaacgggaggaagagcttgccccggcagaactcactgtaccggtgcagtgtatgacaggccgggaggccatccgcagcacccttgtttcggatgagctgggggattttgcctggaacaagctctacaagcgggagctgttccgggatatccgctatccgctggggcggatgatggaagatcagggcacgacataccgcatttttcagcagtgcagcaaggtcgtataccgcccggtgccgctgtattattactatcagcgcccggacagcatccttcaccgcaggaacatgaagttctacgaggataagctggatatgggctaccagaagtaccgggccatccgggaagcgtacccgggaatgccggagaatgatgccgccatgctgagcgtggtggagcactgctatccgtatctgatgcaggacacggagcgccgcgcaaagatggaggcctttctgcaggagtgtgacccggcggcggcaaagctgctctgcaccagcagccagcggaagtatcagttgctcagatgcagccggaggatatatgcaaaactgttcctgctgaaaaacggcccggcggcaaaataagggaggataatttgtgctgaacgatactgtcagtatcattgtgccgatctataacaaagaaaagtatctggaaaaatgtctggacagcatcctcggtcagacctatcgggatctggagatcattctggtggatgatgggtcaacagacaactctctttccatctgccagcgctacgcggaaaaagatctgcggatcaagatataccacaagccaaacggtggtgtttcctctgcgcgaaatctgggattggaaaaaagtacaggcacgctgatttcttttgctgatccggatgattcactccacgccgagtgcatagaacggcttaaaagagtgctggatgagaccggtgcggagatcgcttattgctacggtctggattttctgggcacgaccgggcgaacgcagacgaagagcgatgagacggagaaagtcagtgttatgccggtcagacgatatgactggaacagccggaaggcacatacagtgtgctggggtgcgctttaccgccgtgcggtcacacaagacgttgtgttcgatactgacttaaaaattggtgaggatacactgtttcttgcaaaatgtatccgaaaggcaaaaaaaattgcctgcatcgacaaggcactttactattactatgtcaacgatgactcggtgacgagcgggcattattcggcaggaaaactgacagagctgaaggcatggcggcgtatctgtgaagtgtttgcagatgaaccgttcgtgtatcggtctgcacgggccggatatgcgctccggtgcagagaaattgtggtgaaatactgcaaggatgatgcttttatggagcaggcgtgtgctgaagcggaacgggagtttaagagaaatgccggcccccttctggcaggctggcttcgtgcagggcagtatcggtattttataaaaacgttgtattcgtatctgctctggaatagctggctgaaaaagaaacaggccagaaaaacttacgaagtggagatctgaatgaaaaaatccctcagtctgaatgcagcaatgagcgcgttcaagacactgatgaatattatcttcccgctcatcacattcccttacgcttccaatgttcttcaggtggaaaacctgggcaaagtgaactttgcaagctccgtctgcgggtatttcctgctgtttgcaggccttggcatctcctcctatgcggtgcgtgagggttcccgctatgtaaacgatcgggaaaagctgtcggcttttgcatcggagatgttctccatcaatatgatctccacggccctgacctatgtggcattggcggtgacgatgcttttctggacaaagctccatgcctataccgacctgatgctggtgctgagtttacagatcttctttacgaccatcggcaccgaatgggtgttcacgatctttgaggagtatacctatatcaccatccggggcctgctgtttcaggtgctgtctattttcatgctgtttgccttcgtcaagacccgggatgactactgcatctatgcaggcatcacggtgtttgcggcggtaggtgccaatgtgctcaactttttccgggcccggcggtactgcaccatccggctgacaagaaagatcgactggaaaaagcacctcaagcccatcctcatcatctttgcatccacgctggcaacgaccctttatgtcagctcggataccacgattctgggcattctgggaacagattacaatgtaggtatttactcggtggcgggtaagatctacggcattgtaaagaatctgctttcggcggtgctggtggtgtctatcccgcggctgtcccattatgcgggcgtaggggacaaggcaaacttcaacaagctgttcaacaatatcttcaacgcgctcatcgtggtggtggctccggctgtggtgggactgtttgccctcagccgggaggtcgtcctctttatttccggggaaagctatctggatgcggtgatgcccctgcagatcctgagccttgccctgattgtctgcctgtttggctggctgtacaattcctgcgcgcttctgccctgcggaagagaaaaggaactgttctggatcacgctggtcagcggtctgctgaacgtggggctgaacatcctgctcatcccgcggttccgggagaatgcggcggcctttaccaccctgttggcagagctgtgctccatgatgctctgtatccgctgctccaggggcctggttacggtctctgctgaccggcgcaccgttggctcagtgctctgcggctgtgtgggcatcgttcttgtctgtaccggggtcaaggcactggctctgcccaatctcatctgcattctggcggcggtgctgggctcagtggctgcatacgcagtcatcctgctgggtatgaaaaatccgctggtgctggaatatctggaaaaagcgaagcagaagttccggaaaacatcctgaatggacaggacccgctgcgggggcaaacactccctgcggcgggtctttttcagaaaaaacggcgttttttggtgcgttccggcaaaatcaccacatttctttgcttctgcaacaaatgtttgttaataaattatccatctcccatccttgcaatacacacgctttttgtttataataaggatgtacggggaagttcgcagtgcgcggcccccgatgaagagcaaaattcgattccgaacgaaaagaatttgagaggagtttgttaccatgggtttaggtaagaaaacgatcgacgatcagaattactgcggcaagaaggtccttgtccgctgcgatttcaatgtcccgatgaaggacggcgtgatcaccaacgagaaccgcatcaatgcggctctgcccaccatccagaagctggtcaacgatggtgctaaggtcatcctgtgcagccacctgggcaaacccaagaacggccccgaggcaaagttcagcctggcacccgttgctgtggctctgagcgcaaagctgggcaagaccgttgtgtttgctgatgacgataacgttgtgggcgagaacgcaaaggctgctgttgctgcaatgaacaacggcgatgtcgttctgctgcagaacacccgtttccgcaaggaagagaccaagaacatgcctgagttcagccaggagctggcttctctggcagatgcatacgttgacgatgcattcggcagctgccaccgtgcacactgctccaccgcaggtgtcaccgactacatcaaggataccgctgtcggttacctgatggagaaggagatcaagtacctgggcaacgccgtcaacgaccccgtccgtcccttcaccgctattctgggcggtgctaaggttgctgataagctgaacgtcatctccaacctgctggagaaggtcgataccctgatcatcggcggcggcatggcttacaccttcgtcaaggctcagggctacgaggtcggcaagagcctgtgcgacgataccaagctggattactgcaaggaaatgatggccaaggccaaggagaagggcgtgaagctgctgctgcccgtggacgcagcctgcatcaaggacttccccgatcccatcgatgctcccgtggatgtcactgtggtgcctgtcactgccatccctgctgacatggagggttgcgacatcggccccgagaccatgaagctgtttgccgatgctgtcaaggcatccaagaccgtggtgtggaacggccccatgggcgtgttcgagaaccccaccctggcagccggcactctggctgttgccaaggctatggctgagagcgatgctaccaccgtgatcggcggcggcgacagcgcagcagctgtgcagcagatgggcctgggcgacaagatgacccacatctctaccggcggcggcgcttctctggagtatctggagggcaaggagctgcctggtatcgctgtgatccagaacgcataagcatctgaaccagcatcactgaggtgcggcggcatatacgccgccgcactttttattttgggtaataagatctctcaggcttgccggcgctcgccagctccccatccgggaggcaggagatgtcgtttatcctgcctctccagccgggagaggcggcaccgaaggcggcggggaggtattttgtgataaggagattgttagaatggataaggcaaagcgtaaggcaatcattgcaggcaactggaagatgaacaagaccgccactgaggcagccaagctggtggacgagctgatccccgccgtcaaggatgcttcctgtgaggtcgttatctgcaccccctacaccgatctggtcaccgctgtggaaaagaccaagggcaccaacatccatgtgggtgctgagaatgtccactttgagaagtccggtgcgttcaccggcgagatcagcgccgatatgctggtggatctgggcgtggagtacgtcatcgtcggccactccgagcgccgccagtactttgcagagaccgatcagaccgtgaacaagcgcgctctggctgccctgaatgcgggcctgaaggtcatcatctgcgtgggcgagagcctgcagcagcgcgaggagggcgtgaccgaggagctggtgcggatgcagaccaagatcgccctgcgcgacgtgaccgccgagcagatggcaaatgtggtcattgcctacgagcccatctgggccatcggcaccggcaagaccgcgaccgctgaccaggccgaggaggtctgcgctcagatccgcaaggtcattggcgaagtgtacggcgaggctgtggccgaggctgtcacggtccagtacggcggcagcatgaacgccaagaactgcgaggagctgctgagcaagaaggatgtggacggcggtctgatcggcggcgcatctctgaaggctcctgattttgctgttatcgtcaatgccgcttccaacggctgagaaggccctctgacctgttttcccagcgcccggctgcgccgtttttccagcgctgtgccgggcgctatttgttctaaatcaaaggagattcaacgttatgtccaagaaacctgtacttctgtgcatcatggatggctttggctgggtgcccaacgagacctacggcaatgccgtggtcgccgcaaagaccccccatctggatgccctgatggaaaaatatcccatgaccaccatcgatgcctccggcatggctgtcggcctgcccgatggtcagatgggcaactctgaggtgggccacaccaacatgggcgctggccgcatcgtttaccagcagctgaccctcatcaccaaatccatccgggatggtgagatgttcaagaaccccgtgctggtcaagaacatgaaggccgccattgaggcaggcaaggccatccacctgatgggcctggtgggcaccggcggtgtccacagccacgctgaccactggttcggcgtgctggaaatggcaaagcacatgggcgcaaaggaagtctacctgcactgcatcaccgatggccgtgataccgacccccacgccggcaagggcttcctggctgacctgcaggccaagctggacgagctgggcgttggcaagatcgccagcgtttccggccgttactacgctatggaccgcgacaacaactgggaccgcgaggagaaggcttacgccgcattcgtttacggtgagggcaaccacgctgccaacgctgccgaggccattgaggcatcctatgctgccgataagaccgacgagttcgttctgccctgcgtcacctgtgagggcggccgcgtgcaggatggcgataccgtcatctttatgaacttccgtcctgaccgtgcccgccagatgacccgcatcttctgcgatgacgacttcaagggctttgagcgccgcggcggccgcaagcaggtcaactatgtctgcatggccgagtacgatgccaccatgcccaactgcgaggtcgcctatcctcccgtggagctgaagaatgttctgggccagtacctgtccgagaacggcaagacccagctgcgcattgccgagaccgagaagtatgcacacgtcaccttcttcttcaacggcggtgtggaggctccctacgagggtgaggaccgctgcgtcatccccagcccgaaggttgccacctacgacctgcagccccagatgagcgcccctgaggtggctgctgagtgcgtcaagcgcatcgagagcggcaagtatgatgtggtcatcctgaactttgccaactgcgacatggtcggccacaccggcgtgttcgatgccgctgtcaaggccgttgaggctgtggataccgctgtggatcaggtggtcaccgctgtgctgaacgcaggcggctgcgcctttatcacggctgaccacggcaacgccgagaagatgatgaacccggacggcactcccttcaccgcccacaccaccaacgtggtgccctttgtggccgttggctgcggcgatgtgaagctgcgcgagggcggctgcctggcagatatcgcccccaccatgctgccctatatcggcctgcctgtccccgctgagatgaccggcaagagcatcatcgtggagtaagcactccgcaaaaaagctttcctgaaacgtaaaaagacctccccgtgcaggtgctgcctgcatggggaggtcttttgctgtatcgcttagtagtgcagctggtcagcggtcagtgcttccagcaccggcagcatggcggctgcctcggccttggcggcgggcagatccatatcgcggtagttgccgcattccacctcgctggcaccggggatatccccctcaaaggcggccatgaagcggaaggaatccacggtcaactccagtgcctgtgccggggtcagcccgcgggtgagcaggtagaagccggtgcggcagcccatggggccaacgtagatcacgccgttcttcaccgcgctgttgcgggcgtaggtggcaaacaggtgctccagcgtgtgggcggcaccggtggtcaggtaatcgccctgattgggcttcttcatccggatgtcccaggtcagcacatcaccgtcctggcggctcaggtacatgccccggtccagtttggtgtgatcgacacagaagcttgcaatgcgttccatgatgttctccttcaggatcaggcctgcaggcgctggacactgccgtgggcacaatccacagcgatatccaggccgtcgcggatgtggctgcaggcacctgcagcacccacgatggtgggcttgagcagggagttgcccacgatggcagcgtggctgttcaggccgggctcctcgaccaccagagcggcggcatcgcggacatagcccagcatctcgttggtggtggagggaacgaccagcaccatgccggggcggaactttgccttgacctcctccagagtgcggcagacgcaggccttgccgctggcggagaccagatcggtcttgccgcggcccacgcccacaccggtggccaggcagttgcccaccatgtggatcttgatcatgttggtggtgccggaaacgcccacgggcacgcctgcggtcacaacggccagctcgccgttgtgcaggtagccgttcttctgggccagagcggtggacatctcaatcagctcatcggtgctgtgggcggggcccatcagcagggaagtgatgccccagctcagggagagctgacgctgcacctgctcgtccataacgcaggcaataatgggctgcttggggcggtacttgctcagcaggcgggcagtgttgccggattcggacacggtgacgatggcggcagcgttcacgtccttggcggtcaggcaggcagcgtgagcagttgcatcgctgacgctgatctggatctcggcgtggcgctgggcgcggtaatgctcctcgttctcggtgcgctctgcaatggcggacatggtcttgagagcctccacggggtagtcaccggcagcggtctcaccagacagcatgatggcggaggtgccatcgtagatggcatttgccacgtcggagatctcggcacgggtggggcgggggttgaccatcatgctgtccagcatctgagtggcagtgacgatgggcttgccgaaggagaaggagcggtcgatgatgtccttctggatgccgggcagctcggtgaagtcgatctcaacgcccaggtcaccacgggccaccatgacggcatcggctgcggagaggatgctgtcgatgttgttcacgccctcgcggttctcgattttggcaatgatgcggatgttggaatcgtactcattgagcaggttgcggatgtcgtacacatcctgtgcggtgcgcacaaaggaagcagcgatgaagtcaaagccgttctgcacgccaaagatgatgtcctcgcggtccttctggctcaggtagggcatggacagatgcacgccgggcacattgacaccctttttggtcttgatcttgccgctgttcagcacggtgcagatgatgtcggtgtcggtgacctgctcaatgtgcagcatgatcaggccgtcgtccagcatgatggtgccgccgggctgcacgtcctggggcagatccttgtaagtgacggagcagatctccttggtgccctccacctcgcgggtggtcagggtaaaggtctggccggcttccagcatttccacaccgttcttgaactccttcaggcggatctcggggcccttggtgtccagcagggcggcaacgggcttgcccagctcctcacgcagagccttcagctttgccagacggccgccgtgctcctcgtaggaaccgtgggagaagttgaaacgggccacgttcatgccgtttgcgatcaggtcgcgcaggacatcgcccttatcggtagaagggcccagggtgcagatgatcttcgtttttctcataaaatacctccaacgttcacgctataatgctctctatcttgacgcagcagcccaagctggctgctctctggcgggcagtgattgctttgcgcccgcggcggcagtatacgccaatatggctgtttcaacaaaccataccactatacattataagctcttggatacaatagcgcaagaaaaatctttgcaaagaaactgctaagatttcatcaggtttgaacaaaaaactttccaccacaaagcgcttgcataaccggcgggatttgcttataatgaaggtaagcaaaagtgcgactgttccggggcagcccggaggaaaatggagtgaaaacatatggaaaagcgtgtatttttgatcgtactggacagctttggcatcggcgcggagccggatgcagccgcctttggcgacgagggcaccaacacgctgggagccattgcagggcatcccaatttcaactgccccaacctgaaaaagctgggcctgttcaacattgacggtgtgactgcgggcgaaaagaccgacgcgcccgccggtgcctttgcccgcctgcaggagcagagcatgggcaaggataccaccatcggccactgggagatcgccggtgtggtcagcccgaacccgctgcccaccttccccaacggcttcccggaggagctcattcaggagtttgaggcaaaaaccggccacaaagtcctctgcaatctgccctattccggcaccgaggtgctgaaggactacggcgagcaggccatgaaggaaaatgccctcatcgtctacaccagcgccgacagcgtgttccaggtggctgcccacgaggagctggtgcccgtgcacgagctttaccgctactgcgagatcgcccgcgagatgctgaagggcgcgtacggcgtgggccgtgtcatcgcccggcccttcctgggcagcagcgccgagaccttctaccgtaccaccaaccgccacgacctgagcctgaagccgccccgtgccaccatgctcgacctgctgaaggaggccggcagggatgtcatcgccgtgggcaagatctttgatatctttgacgggcagggcgtgaccgaaaagatcaagaccaccggcaacaccaatggcatcgccttcaccaaggcattgcagacccgggatttcgagggtctggcctttgtgaatctggtggattttgatatgctctacggccaccgccgcgacgtgcccggctatgccgccgccgccaccgaatttgaccgcttcctggccgacttcatccccgggatgcgggagggtgacctgctgatgatcaccgccgaccacggctgcgacccctcctacaccaagaccaccgaccatacccgcgagtatgtgccgtatctggtctgcggcaagggcgtgaagcccggtgtggacctgggcacccggctctgctttggcaccattgcacagaccgtgtgtgaatatctgggcgtggatgcttccagtctggacggccacagcgtgctgcaggagatcctgaagtaatatgagccctctcagtcacgcgacagcgtgaccgagagggctattttttgtgcaaagtcttgaacaatatggtcaattgtggtagactagcacgtgcacgcccggtgcgtacaaggtttacgccgggcgcaggaattgatatggtttcagaatagaaggagactatcacatgagaatcaatcgtactctgggtctggcactgaccgctgctgtgctggctgttgccatgactggctgctccaatagtgcatcttccaccgcatcctccaccgcatcctccgctgcttccagcgaggctgcttcctctgtggccgcttccagcgaagctgccgagagcgaggccgctgccgccagcgttgtcagcaccgaggatctggatgtgaacggcaccacctactccgctgactgctacggcgagttcaccctgtccaacggcgacaccatgaagctgtggaaggtgaaggacgcttacgcagacctgagcgctctgcccatgaagggcatggccgaggagttccccatcgaggccgaggccgagcagatctatgttgctgacgtgaccagcaacggcgagaccacccgccagtatctgcgcaccgacaaggctggccgcaacggcactgtctctgtcaagacctttgagctgggcgacgctgagta

SEQ ID NO: 1043 - DNA, 23226 bp, unidentified
  source 1..23226: mol_type = unassigned DNA
ttcgtatgtacagcattcagcagaagccggggctgctgttcctcagcggttccggtaggcctctgggccttccagatacagatccccgccgtgggcatccaggatgacagtcaggggcatgtcctgcacggtcaggcggcggacagcctcacagccgaggtcgggccaggcgatgacctccagcgtctggacgctcttggccatcagggcaccggcaccgcccagagcggccagatagaccgcgccgttgcggacaacggcctccttgacagcggcatcccgcttgcccttgccgatcataattttgttacccagatccagcaggcgggggctcatggcatccatccggccgctggtggtggggccggcagagccgatgacctcacccgggcgctccggggtggggccgacgtagtagatagcgctgccctcaagagcgaaggggagcggttcgccccggtccagtgcttcgatcatccgcttgtgggcctgatcccgggcggtatacaccacgccggagagcaacacggtatcgcctgccctgaggggggccagatcctgggcggtgcagggggtggttaaggtatattgcataggtttctcctttgtacaacctctcagtcgggcttgcgcccgccagctcccctggtaggggagcctctggcgtatccggcaagctttacccggctgccaagcattgacggagaggtttgacccttataaagtcgcgctggcccgccgggtgacatggcaggaaacgttcacggccacgggcaggcccgccacatgggtgggcatctgctcaatggcaaggcccagacaggtggtctggccgccaaagccctgcgggccgatgcccagttcattgatggcggtcagcagctcccgctccagaccggcatagtagggatcggggttgggaacatccagcgggcggagcagtgcctttttggccagataggccaccttgtcaaagctgccgcccacgccgatgcccagcacgatgggcgggcaggggttggaaccggccagctggacggtctccagcacgaacttccggaagccctccacgccgtcggcgggcttgagcatctggatgcggctcatgttctcgctgccaaagcccttgggggccacggtgatggtgcagccgtcgccgtccaccagatgaacggtgatggcggcgggggtgttgtcgccggtgttgccccggcgcagcgggtcggccacgatgctcttgcgcaggtagccgtcggtgtagccgcggcgcacgccctcgtggatggcggcttcaaagctgccgtcgatgtggacatcggtgcccagctccacgaacacgcaggccatgccggtgtcctggcagatgggcaggtctttttctctggcggcgctcaggttggaccacagcaggtccagggtattctttgccagcggccagggctcttcctgccgggccttgtccagcgccgcctgcacatcctgcggcaggcgggtgttggcctcgatgcagagccgggctacagcatcggtgatggcttgtgcggagatgttcctcatctcgtgttcctccctttacaggcgggcaacgccggtctcgcgggcagcctttgccacggcagcagccacggcctcggccacacgggggtcaaacgcgccggggatgatgttctcctcgctgcggtcggcatcggtgatcaggtcagcgatggcataggctgcggccagcttcatctgatcgttgatatcacgggcgcggacgctcaaagctcccttgaacaggccggggaagcagagcacattgttgacctggttggggaagtcgctgcggccggtggccatcacgcgcacgccgcctgccttggcatcgtccggcatgatctccggggtggggttggccatggcaaagacgatggcatccttgttcatggtcttgcacagctcggtggtcaggatgccggggcgggacacgccgatgaacacgtcggctccctcgatggcttccttcaggccgcccttgatctggcgggggttggtcacctcgcccagccagttcttgtgggcctcggcgctgttgcagcccttgtacagggtgccgaactggtccacggccacgatatccttggcaccggcggtcatcagcatcttgatgatggcagtaccggcagcgccagggccgttcaggacgatgtgcacgtcctccatctttttgcccaccacgcgcagggcgttgatgagggcagcggtcaccacgatggcggtgccgtgctggtcatcgtggaacacggggatatccagctcccgctccagcgtctcttcgatctcgaagcactcggggctcttgatatcctccagattgataccgccaaaggtgggggcaatggccttgcaggctgcgatcacgctggcggcatcgtgagcatcgatgcagatggggaaggcatccacgccgccgaactccttgaacagcacggctttgccctccatcacaggcagaccagcctcggggccgatgtcacccaggcccagcacggcggtgccgttggagacaacggccaccatgttgcccttgaaggtgtacttataaacatcgtcgggattttccttgatcttgcggcagggctcggcaacgccgggggtgtaggcggtagacaggtcatcacgggtcttgacctccaccttgctggtaatgcccaccttgccgtggtgggtctcgtgcatttcaagggcggctttgttgtaatccatggggtgttcctccgtttgtatcggacgcttcccgcggaagggagcggccggggtttctcgtatctcttttattttaacagaaccgggtgggcatttccaccggaaaagccgctttttcggccggtgccccgcaaaagtcggacaaacccggcgctctatttgtggaaattttgcaaaattcttttctttttcacttttgccctttataataaggtctgtactatgcgacccgaatctgaacccggcgggatgccggtgttccaacaggaggaactttattttgaaaaagatcatcacaaaggcggtctgcctgctctgcgccggtgcgctggtgctgggcgcagcaggctgctccaagtccgctgattcttcttctgctgcttccagcacagccgccgctgcttacggcagtgcggaggattacgattacgagaacttctcctacagcagcggtctggacgagaatggctactgggagggcgtgaaggcgcttgactatgtcaccctgcccgagaactttgcaagccttaccttcaagcgttctgagatcgagcccaccgaggaggaactccagagcgagatcgacagcctgctcagcgaccacgccaccgagaagcaggtgacggaccgtgccgcagcggacggtgataccgtcaacatcgactatgccggttccgtggatggcgttgcgttcagcggcggcacttacagcggctacagcctgaccctgggcagcggtactttcgtcgatggctttgaggatcagatcgtaggccacacccccggcgagacctttgatgtcaccgtgaccttcccggagggatacagcgattctaccgattccgagggcaacaccgttgtcctgagcggcaaaaaggctgtgttctccgttaccctgaactacatcagcgagaaggtcctgcccgagctgaccgatgcgtgggtggccgagaactacggcgagagcgatgatgttcacaccgtggaggagctgaaggcgctctaccagaagatgctctacaacaccaacctgcagaacgccatcatggacgacctgctggcaaactccaccttcaaggagctgcccaaggaggtcaccgattatcaggtgaaccagtgcctgaactactactacaccatggccaactactacggctacgatctggacagctttgtgcagaccgccgctggctatgagaacgccgatgccctgctggaggggatgagcgacagcatcaccacctactccaaggaggctctgctctatcaggcagtggccgagacactggacatcgtgcccacccaggagcagatcgatacctattcctcctacaccggcacctacggtgagaattactgcaccatggtcgccctgatggatgccgttaccgatgcgctgacggaaagcgcagtggtgagctgagtgccctgcccccatatcaagagaacttgtgccgcttcgggtctgccggggcggcatttttgtcttgtttgcaaacaatttgtgaattgttgccgtaccatcgaaaaccctattgacaaagtggggtgtttggagtatagttttagcagtcgaacagatagagtgctaaaaatgaaatggcaatcgatctgaaagactgctgaaataacacttccggtacgaatggaggtcgattctatgaataccaatcaatatacgcagaaaacgctggaagctctgcaggctgcccagcagctggctgtggagtaccagcacaacgctttggagccggaacatctgctgcacgccctggcttcgcaggagcagggcttgatcccgcagcttctgcagaagctgaacgtggacccgggcagctttgctgctgccgtggccgaaaagctgtcggccctgccccgggtgtccggctccggccgtgaccccgataaggtctatatctcgcaggcaacggataaagtcctgagcgccgccgcccgggaagccaaggccatgaaagacgaatacgtcagtgtggagcatgtgttcctgggcctgctggatgagccgacccagaacaccacggagctgttccgcgccttcaacatcaagaaggatgcgttcctgcagcagctgactgccgtgcgcggcaaccagcgcgtgaccaacgacaaccccgaggatacctacaacgccctgcagaaatatggccaggatctggtcgatctggcccggaagcagaagctggaccccgtgatcggccgtgatcaggagatccgcaacgtgatccgtatcctgtcccgtaagaccaagaacaacccctgcttgatcggtgagcccggcgttggcaagaccgccatcgccgagggcctggcccagcggatcgtgcgcggcgatgtgcccgagaacctgaaggaccgcatcgtgttcagcctggacatgggtgcgctggtggccggtgcaaagtaccgcggcgagtttgaggagcgcctgaagagcgtcctgaatgaggtcaagaagagcgagggcaagatcatcctcttcattgatgagctgcacaccatcgtgggtgcgggtaagaccgacggtgccatggacgcaggcaacctgctcaagcccatgctggcccggggcgagctgcactgcatcggcgcgaccacgctggacgaataccgccagtatatcgaaaaagaccccgctctggagcgccggttccagccggtgcaggtggatgagcccacggtggaggacaccatttccatcctgcgtggcctgaaggagcgctatgaggtgttccacggcgtgaagatcagcgataatgcgctgatcgccgccgcaactctctctgatcgctatatcaccgaccgtttcctgccggataaggccatcgacctggtggatgaagcctgcgccatgatcaagactgagatggacagtatgcccagcgagatggatgatctggctcaccgcatcacccagctgcagatcgagcaggtcagcctgaaaaaggagaccgatgccctgagccagagccgcctgcatgagctggaaaaggaactggccgagctgcaggataagttccgcagcatgaaggcaaagtgggaaaacgagaagaacgccattggcaaggtgcagaccctgcgtgagcagatcgagcagaccaatgccgccattgagaaagcccagcgtgagtatgacctgaacaaggccgctgagctgaaatacggcaagctgcctgagctgcagaaacagctggaagcagaggaaaagctggccaacgagaagaaggaggacagcctcctgcgtgaccgtgtgaccgacgaggaaatcgcccgcatcgtggcccgctggaccggcatcccggtggagaaactggtggagggcgagcgcgagaagctgctgcatctggacgatgtgctccacaagagagtcattggtcaggacgaggccgtgaccaaggtgagcgaggccatcctgcgcagccgcgccgggatcgccaaccccaaccgccccatcggcagcttcctcttcctcggccccaccggtgtgggcaagaccgagctggcaaaggcgctggcacaggctctgtttgacgatgagcgcaacatggtgcgtatcgatatgacggagtatatggagaagttcagcgtcagccgcctgatcggcgcgcctccgggatacgtgggttatgaggagggtggtcagctgaccgaggctgtccgccgcaaaccctacagcgtggtgctgttcgatgaggtggaaaaggcccaccccgatgtgttcaacatcctgctgcaggtgttggacgatggccgcatcaccgacagtcagggccgtaccgtggacttcaagaacacggtcatcatcctgacctcgaatctgggcagcgacatcatcctgaacgatctggagcagcgccgggccaatggctccaacgagctgagcgaggacgcaaagcatcagatcgacctgctgctgaggagcaagttccgccccgagttcctgaaccgtctggacgagatcgtctactacaagagcctgaccaaggacgagatgcgcaagatcgtggatctgcagctggcagacctgcgcggccgcatggacgagggcaagcatctgaatctggacgtgaccaccgccgccaaggactacatcatcgattctgcctacgacagcgtctatggtgcccgccccatcaaacggttcatccagagccgggtggagaccctgatcgccaaggcgatcattcagggccgctatgccgagggcagcaccctgactgtggattacgacggaaatgcccttgtgctgaaatgattttccacagttttgccagttttttacctctgtgccggctgtaatgcttgcatgggggtgcggaatatgatattataacaagtaacattgatgtgcttttcatcgcggaacagccacggtggaaagcacatttttgtatccctaggaaagaactccttccgtcatcgctgcgcgatgccacctccctcggtgagggaggctgaccgtgcggcaaggctccctctttgagggagctggctgcgaagcaaactgagggagtccgttctttaataaaaaacagaaagttgagtgtgattttcctttattatggacgatggcagtatgacgctctgggtggcgttggtgatcctggtgggattctccgcctttttctccgcttccgagaccgcattttcctccctgaatcagatccgcctgaaaagccgcgccgaggacggcgattcctctgccgcccgggtgctgaacatggcggagcagtatgacaagctgctttccaccatcctcatcggcaacaatatcgtgaacatcgccgccgcttccattggcaccatcctgtttacccggatgctgggtgccgagcggggcgcaacggtgtccaccattgtgctgacgatcatcgtgctgatctttggcgaggtgacccccaagagcctggccaaggagatgccggaaaaggtggccacggcagtctcgcccttccttgtgctcctgatggccctgatgaccccgctgacctggctgttcacccagtggaaaaagctgctgggccactttgtccacagcggcgaggccgataccatcacagagggtgagctgatgaccatggtcagcgaggctgaaaatgacggcgagctgaccgaccgggaaagcgagctcatccgcagcgccatcgagttcgatgacgtggaggtggaagagatcctgaccccccgtgtggatgtggtggctgtggaggatgatatcccgctggaggagctggcccagacctttgcggagtccggttactcccgtctgcctgtctaccacggcaccattgataacatcattggtgtggtacatgaaaaggatttctacatcgcccgcctgaaaaaggcgaccaagatcgatgatctggtggtgcccaccctgtataccacgggctccacgcagatctcccagctgctgcgcaccctccgggagcagcaccaccacctggccgttgttgtggacgaatacggcggcaccgagggtatcatcacgctggaggatattctggaagaactggtgggtgagatctgggatgagcacgacgaggtcaccgaggacttccgcaagcagtcggacggcagctggctggtgtccggttctgccagcgtcgatgatctgtatgaggaactcgacctgccggaggaagaggacatcgattccaataccgtcaacggtctggtgcaggaaaagacctgccatctgcccaaggtaggcgaccgctttaccctgggcgagtacgatggtgttgttacccgcaccgccaagcgccgcgtgacggaagtgcgcctgactcccgccgccccggctgaggatgccgagaaggacgacgaaaaggataagcgcttctcccgcattgcacagcgcggggagagccgctgacaggaagcataagatagaaacagtgaaacgccgccgagtggagcttttggctctgcccggcggcgttttcttgattcaagtccttgcccgcggccctgcactgtgctaaactgaataaaatacagaacgcaggaggacaaggaacttgaaacggatgtcaaagtttgcgcgccggtgtgcggcgctgatgctggcggtggtgctgctctgcatggcagtgcctgccgcctttgcggcggaaggggacgccctgcccgccggtgccaccaccatgggcggtgccaacactactctgatcccggacgaggaggaaaactgcctgagctggctcttcggctccggcgataccatcaccatgccctacctgaacgtcaaggggcagggcctgcgccggaacgtgaccctggatcttgaggactgtctggtgggcatcacctacaccgagctgggctccatcggcagctatgtcagtgacgcggcggcacagcaggcgtggaaagcgcaggcggtggccatccactcctatctggaataccacaagaaatacggctcttcggccaacgcgctggtgtacacccccgtggatcagatcccttcctctgcccgcagcgccatccgcagggcagtctctgaggtcaaggacgaggtgctgacctgcaacggcagcgtcatcgatgcagtgtggtcggccagcgcggggtacaacacccagaccggcgtgtacggcacctgctccggtctggatgcctggggcaccgatgtgccctatctgcagagcgtggaaagcccctacgaggagcagtatcacaacctgatgcgccgggtcatcggcaaggattaccgctacatcgagtataacgacagcaagaccggccagccctacgagagcgccgacaccacccataaggatctgggcggctttgtccagtacaatacctttgtctcgaacggaaagagctaccgctacatcggccagttcgtttcctcccgctactgctttgatttcagcgcggacgagaacggaaccccctgcatgaactactatggcttcggccacggtgtgggcatgagccagtgcggcatggtgggctatgcgcaggagcagggcatgggctaccgggacatcctgcgccactactataccggcgtgtcctttggcacggtgggcagcggcagctcgaacggcggcctgttcggctggctgtggagcctgctggggctgtaataaattttgcaccggaaagcgcaggaaatgcggaaaagcgcttctcaaacgggacgaaatctggtatactattatagtttgtaataatgcgtctgggcggtggaatggcccagtgaagtggagaagtcggaatgcagttggagaaagcaaaggaaacaaagcaggacatggagcgctgccgcctgctggcacagcgcattgcggaggagctggccccggcaacagctgcggtgctgaacgccgagaccccggcactggaaaaggccctgcaccgggcgggcgtggatgccaatccctttacagtggctgcccggcaggcagacctgctggtggtggaggaccccgcctgggtggagatgcccgcgcagctgcccgggcaggtgctgctggtgtttaccggcagcaacgtggctgagggctgggccgaagagctggcccggcggggctactaccgggatttccgctggcgcagccggggccgtgcccagcagtctgctctgtactgcacagtccagcctgccaccgccgagatgatcgcgggctatgagaaggagctggatctcctgcgtgaccggatggtgcgtgccgagcgcacctgcaacgaggaagccgccctcattgagcggctccgcagcgatctttccctgagccgcagccatgccaagaacctggaaaagaccctgaacgaggtgaccagctctaccttctggaagctgacctggcccatgcggtatgttgtcagcaagagccgccagatctggcacaccttcccgcttttcgtcctgctgggtgagctgcgccgggacggcatttcgggagtgcgggagcacgcccgcgccaggcgggaatatgccgccctcttcccggggaacctcctgcgggctgaccgctttgccccggtggagctgctggtcaggcaggcaaacgatcagcctgccggtcccaagatcagcatcgtggtgcccctgtacaacaccccgctggatttcctggacgagatgctggattccgtggtgaaccagacctacaagaactgggagctctgctgcgtggatgccggtaaggacgaggccgtaggccagcatgtgcaggcccgtgcgaaggccgatgcacgcatccggtatcagaagctggaaaagaatgagctgatccctggcaacaccaacaagggctttgagatggccaccggtgagtatatcgccctgctggatcacgatgacctgctgcatccctgcgccctgtggtacgcggccagggccattgccgagcagaaggccgactttgtctacaccgacgaggcaacctttgaggggaagccggagcatgtggtgctctaccacttcaagcccgacttcatgctggacaacctccgctccaacaactacatctgccacctgaccgtgttcagccgcgccctgatggagcgggccggcggcggcgagcggatggagtacaacggcagccaggattacgagctgttccttcgcctgacggagcaggctgagaagatcgttcacattccccatgccctgtattactggcgctccagccccggcagcacggcggcggatatctccgccaagacctactgcatcgacgcaggcattgcggccctcaaggcccactatgcccgctgcgggatcgctgtggacgatgttgccctcatccccggcactccgggctattacaagaccgattacaccatcgagcacccgggccgggtgagcatcctcatccccacctgcgaccacatccgggatctggagctctgcgtggattccatctatgcccgcaccacctacccggattttgaactcatcctcatcgagaacaacagcaagcagcccgagaccttccgcgcctacgagcggatgcagaaggaacacccggacaacctcaaggttgtgacctgggagggcaagggcttcaattacagcgccctgaacaactttggcgagcagtatgccaccggcgaatacctgctgctgctcaacaacgataccgaggtcatcacccccaactggctggaggaaatggtcatgtacgcccagcagaagcgggtgggctgtgtgggtgcaaagctgctctaccccgatgacaccattcagcatgccggcatcggctttggcatcggcggcgtggcgggccacctgcacaagtatttcccggcggcatccgatggctacatggggcggctgaactatgtgcaggatgtttacggcgataccgccgcctgcctgctcatccgcagggagatctatgatgagatgaacggcctggacgagagctatgccgtggccttcaacgatgtggatttttgtgtccgtgtgcgggaggcgggctacaccaacgtgtttaccccctttgcccagctctaccactacgagagcaagagccgcggcaccgaggacaaccccgaaaagcagaagcgcttccagggcgaggtgctccgcttccaggcccgctggggagacctgctggccgcgggcgatccctgcaccaaccccaactttgatatccagcgtgaggacttcacgctgaagatcctgcctttggagtgaattgatgaaactatcagcctgtattgttgtatataacggctatgacgaggcgctgaaggcggcgcagacggtgctgcactgcacgcgccgctacccggtgaccctgtatctggtggacaatgccagcccggacggcagcggcaaaaagctggagcaggccgtggcggacggcctgctggcagcaggcccgggccagcaggtggtggtacactgccgcaccgagaacggcggctttggcaccggccataatatgatcctgcccgagctggacagcgatttccactttatcctcaacccggatatccagctgaccgctgataccctgagtgatctggccgactggatggccgcccacccggatgccgtgatggcccggccctcgctggtgttcccggacggcaagccccagcagctgcccctgcgtcggtgcgccctgcggcccatgctctaccgccagctgccccggctcagcttctggaaaggccagaacgaccactacctgatgctggatgaggacctgaccaggcccatcgagatcgagttctgcaccggcagcttttccggtgtgcgcaccagcaccttcaaggcggtgggcggctttgacgagagctacttcatgtatgtggaggatgcggacctcacccagaagatgcgcacccggggcaaggtgtatctggtgccccagtataccgccatccacgcctggcaccgcgctgcccaccgggatctcaagcccgccctctggcagacgggaaacctgctgaagtatttccataaatggggcttcaggtggtaagaaacgctccaccatcgcgatgtgctgccgccgtgggcggctgaacggttctgtttgacggcctgttccggaaaaaattctggaacaggccgtttttccttgcttttttttcgatttgagagtagaataaggtgtaaaactatctgatgccgccccacgcggccggaacttttaccctgtaactttgttgacagcggacgcagctccgctttgaatattacgaggtgagcgtttcatcccgtatagctgcacaactttttcaatacaaataaaggagtgcacaaattatgaaaggcattattctggccggcggtgccggcacccggctttatccgctgacgatggtcaccagcaagcagctgctgcctgtctacgataagcccatgatctactatcctctgtccaccctcatgctggcgggcattcaggatatcctgatcatctccacccccactgatacgccgcgctttgaggcgctgctgggcgatggcagccagtacggcatccatctgcaatataaggtccagccctctcccgatggtctggcacaggcctttattctgggcgaagagttcatcggcgacgactgctgcgccatgatcctgggcgacaacatcttctacggcaacggcttctccaagatcctcaagactgccgccgccaatgcagagaccaagggccgctgcaccgtgttcggctactatgtgcaggaccccgagcgtttcggcatcgtggaatttgaccagaacggcaaggtgctgagcgtggaagaaaagcccgagcacccgaagagcaattacgccatcaccggcctgtacttctacaacaaggaagtggttcagatggcaaagcaggtcaagccctctgcccgcggtgagctggagatcacgaccctgaacgatatgtacctgaagaaggacgagctggatgtccagctgctgggccgcggttttgcatggctggataccggcacgatggagagcctggtggatgccgccgactttgtccgcatggtcgagaaacgtcagggcatcaagatcagcgcccccgaagagatcgccttcaagtatggctggatcgaccgcgagaccctgctggagagcgcttcccgttatggtaagagcccctacggccagcacctcaagaacgtggccgatggaaaactgagatattgatgcaggaggggaatcacccatgaaaatcatcgtcaccggctgcaagggccagcttggcactgagatcatcaagcagctgcgggagggccgcagcgagatcggccccatccccgaaaagctgatgaatgccaccgtgatcccggtggacctgccggagctggacatctccaactataagatggtggatgacttcatccgccgccagcgcccggatgtcatcatcaactgcgccgcctacaccaacgtggacggctgcgaggtgaaccacgacgcagccttcaaggcaaatgctctgggcccccgcaatctggcacaggccgccgaaaagaccggtgcccgcctggtgcatgtctccacggactatgtgttctccggccgtgagaacggcggcattgcacaggacgaggccaccattcccggccccatcagcgcctacggctccaccaagctcatgggcgaaaagtatgtggagcagttctgccaccgccacttcatcgtccgcacggcatggctgtacagctactacggcaagaacttcgtcaagaccatcgtcaacgccggccggaaattcggcaagctggaggtggtcaacgaccagtgcggcaaccccaccaacgcggttgacctggcccatgagctgctgcagctctgcgtgacccatgagtacggcctgtatcactgcactggtgagggcatctgctcctggtacgattttgcttccgagatcatccgcctgtctggtgtggatgcctctgtggccccctgcaccagcgaggagtacaaggccaagcaccccgaaagcgccgaccgccccaagtggagcgcactggacaaccggatgctccgctgcaccgtgggcaacgatgtgcgggactggaaagaggccctggcctgcttcttcgcccactgggacggcgagaatgggatgaaaacgaattaaacctctcagtcaatgcttcgcattgccaggcccgggttgcggctcccagcatccatttcgtgttgtaaacaacacttatgtcttgctggccgcggccccaacagcaacgccctttatccgccactggcggcggttgttgctgttgctcctagtaggggagcccttggcatagcgagaaacagctgcgcaaaacctgagaatgatagaaataaagggaagataatactttatgaaaaaatatctgatcaccggctgcgccggttttatcggctccaactttgttcactatatgctcaagaagtaccccgagatcctgctggtcaacctggataagctgacctacgcgggcaatctggagaacctgaaggatgtggagggcgacccccgccatgtgttcgtgcagggcgacatctgcgacaaagagctggtggagagcctgtttgcaaagtacgatttcgattatgtcatcaactttgccgctgagagccatgtggaccgttccatcaagaaccccgagatctttgtccagagcaacgtcatgggcaccgtgaacctgctgcagcgcgccaaggaagcctggtacgatgccgatgccaagacctggaaggaaggcaagaagtatctgcaggtctccaccgatgaggtctacggcgctctgggtgccgagggctacttcatggagaccaccccgctgtgcccccacagcccctactcctcctccaaggccagcgctgatatgttcgttatggcattccacgatacctacggtatgcccatcaacatcacccgctgctccaacaactacggcccctatcagttccccgagaagctgatccccctgatgatcaacaacgtcaagcaccacaagcagctgcctgtctacggtgacggtatgcagatccgtgactggctgtacgttgaggatcactgcaaggccatcgatatggtctgcaacggcggcaagatcggcgaggtctacaatgtgggcggccacaacgagcgccccaacatcttcattgtcaagaccatcattgagcagctgcacgaccgcctgaaggacgacggcatcagcgaggatctgatcaagcacgttgccgaccgtctgggccacgaccgccgctatggcatcgaccccaccaagatcaagaacgatctgggctggtaccccgagaccccgttcgagaagggcatcgtcctgaccatcgactggtatctcgagcacgaggagtggatggagcacattaccagcggtaattaccagaaatactacgaggaaatgtacaagaataagtaagttcttgctcggtatgttgaaaaagagggaacgtccatccgcagactgttcgtaaaacagtattcaacaaatgacacggcaactggatgtcaggattggttactgttcactccgctcggtctaaaaagcaaaaagtcccatgcccgcaccgccaaagtgctgggcatgggactttttgcgtctgggaacgttacacctctatcgaggtgtaacatactagactttggtacaaagtcgtgtgccaaaggagattttgctcctttggaatttccgtcatcatagaggaaagaaacaatctattaactttcccatgcagcaacaatgcttctttttgggttttgaggatcaatagtcacctttataggtgttcccttgctcacgagaggattgaaccaaaaccaatgggactgtccataataagtgtcttttccaatcttatattggtaccggatcacccaaggataaattacatcttcatcagcaaggtgataggtactcatgtggaattttatgtgaaccctctttactgcattaacttttccggaaacaatctttccgtttttcagtaggtctgctttgcggatgtctgtaatccatgctaccccgataattgcgatagcaataagccacgcagctatgagtgccccgattccaacttgcttataggcgatagaaatcagaaaagcaacaaaaatcccaacagcaccaagaatatggagcaaatctttagaaaagaacttatggatttttttcatggagagacacttcctttcacgaggttttgttacacttggaatacggataaaccgggaagaagattgcggtcatgccggaaagatttctcagcccaagctgatccccatgcgttttgccacggtgaggagctcgcagccctcggggatattgcgggtcttaccggcgatatcctccagacggttggagatgacgtggttgttcacgagagccaccgtaacgccatactgctcgatctccaccagcttggcggcgtagctgccgaactgggtggccagcacgcggtcgtaggcgctggggctgccgccgcgctgcatgtggcccgggatgcagacgcgggtctccatgccggtctttttctggacggcggcggcaatgcggttggtggcggtggtgtaaccggcctcggcgcgcttggcggtccactccttgcgcttcagcttggcctcgtccacgttcatggcaccctcggccacagcgatgatggagaagttggagccgcgctttgcccggcgctccacggcctcgcagacgcggtcgatgtcgtagggctgctcgggcagcaggatgatatccgcgccgcctgcaatgccggagtagagggtcagccagccggccttgttgcccatgatctcgatgcacatcacgcggctgtggctgccggcggtggtgtggatgcggtcgatgacttcggtggcaatgtccacagcggtgtggaagccaaaagtcacatcagtgccgtagatatcattgtcgatggtcttgggcaggccgatgatgttcaggccctcctgcgagagcaggttggcggttttgtgggtgccgttgccgcccaggcagagcaggcagtccagctttgcgtccttgtaggtctttttcatggccgcgaccttatcgatcttgtcgtcctcgaccacgcgcatcaacttgaagggggtgcgcttggtgcccagaatggtgccgcccagtgtcaggatgccacggaagtcatcctcgcacatctccctgtattcgccgttgatcaggccgtggtagccgttcaggatgcccacgatctccacattatcacccatccgggcatacagtgcctttgccacgccgcgaatggttgcgttcaggcccgggcagtcgccgccggaggtcaggatgccaacacgttttttcatctcacaaatccctcgtttcctcttgatctttcccgccgcagagcaggggatatctggtactataagagtattcccaaaggggaaatgtgtcaagaaaaaattttgtaaaaagaaaaaagagacacaccgaagtatgtctctttttcgatcggagcagcgggatttgaacccacggcctcctcgtcccgaacgaggcgcgctaccaactgcgctatgccccgaaaataccgcagccggaaggcgactgcggttttctggttggggatgagagaatcgaactcccacaagtagagtcagagtctaccgcactaccactatgcaaatccccatcattctgttgtcatcagctttgaacctcgccgctgacaagggatattatactatacggcccgggtcttgtcaacactttttttgagatttttcgcctgagcagaaaatgccaaaaactttctctttccggcaaagtatgttagaatagagccactaagattcaggaggatatttttatgctgaaacgtctgcgcgcaaagcatcccatcggcttctgcgttttatccgaggtgctgtttctgggcagcctgctgctggcatcctatctcattgtgtttgcactggtgctctttggggtggacctggaacgggtggactcctacttcctcagcgccgtgcaggaggcggtgggcatggtggtggcgttggtcattctgggccgcaccggtaagatgtacctgctccgccgccggggcagcggctttttcaacgggctgctggtgggaatgtatccgctggtgctcatcggttacagcctgtatgccaagctgatgttcgggatgcccgaggatggccagctgcagcctgcgttcagcatcttcagcttctttttgagcatggcgctggtgggcgtggcggaggagttcatcttccgcggggtcattgcccagagcctgctggagcgcttcggcaccggcagggcgggggtctggaaagcctgtctgctgtcgggcctgctgtttggcgcggcccacctgaccaatctgctgtccagcgctcccttcggtgtgctgatgcagtgtgtctttgcggcatcgctgggcacgctgttcgcagccatctatttccgcaccggcaacctgtgggtcacggtgttcctgcacggggccatggacattgcctctatgctggtgggcggcctgtacggcacggaggacgtggccgagagcatttcgggctatgatgccagcatgatgctctcgatcttgatctatcttatcccgactctcttcctgctgcgcaaaaagaagatcggcgaggtggcgctttactttggccgggactgcgccccggcagctgctccggccccggaggaaaacggggaacggctccggtaagccctcttgccttttgaaacaaaaaggattacaatcagtcaaggcaaaccgagagacaaatacttcgattcggaggagaagatattatggcatgtacaacgcttctggttggtaaaaacgcatcctatgacggctccaccatgatcgcccgcaacgacgattccggttccggccatttcacggcaaagaaattcgtggtggtccagcccgaggagcatccggcggtctaccgctcggtgctgtcccatgtggagatcccgctgcccggtgaccccatgcggatgaccgccatgcccaacgccgtggagggcaaggggatctgggccgcagccggtgtcaatgccgccaatgtcggcatgaccgccaccgagaccatcacctccaacccccgcgtgctgggcgctgacccgctggtggtgtaccagcctgccaggggggagcagcccgaggtgcccggcggcatcggcgaggaggacatcgtctatctggtgctgccctacatccacaccgcccgcgagggcgtggagcggctgggcaagctgctggagacctacggtacttacgagatgaacggcatcgcgttccaggatgtgaacgagatctggtggctggagaccatcggcggccatcactggatggcacgccgtgtgcccgatgacagctatgtggtgatgccgaaccagctgggcattgatgcctttgatctggacgatgcctttggcgcgcaggaaaaccatctctgctcggctgatctgagggagttcattgcaaagtatcacctcgacctggcacaggacggcgtgttcgaccctcgtgccgcctttggcagccacactgattccgaccacgtttacaacacgccccgcgcctggtacatgctgcgcaccctgaaccccaccacctgggtctgggatggccccgatgccgactataccccggcttccgacgacctgccctggtgcatggtgcctgagaagaagatcaaccccgaggacgtgaaatatgtgctgtccagccattatcagggcacgccgtacgatccgtatgcaagctacggtgccagagagaaccggggcgtttaccgctccatcggcatcaaccgcaacgactttgtggcgctgatccagctgcggcctgatctgcccgccgacctgcaggcagtggagtgggtggcctacgcctccaatgccctgaacgccatggtgcccttttacgccaatgtggagacgaccccggcctatctggccggcaccaccggtgaggtgtccactgacagcttctactgggtcagccggatgatcgctgcgatggcggatgcttcctatggcaagtcggtgttccatgtcgagcgctatgagctgggcgtgctctccgcctgccgtgccctgctgaatcagtatgacgcaaagcagctggccgagaccgaccccgcccgccgcgccgccctgcgccaggaggccaacgaggccctggccgctgaggtcaaggcccgcgccgccgacacgctggataaggtgctgtttgagctgagcagcaatatgaagaacgcatattctcgttcggatatgtgatatttgaacgatataatccacctggtagaaataagaatgccctgtaccatgcaaaacggtacagggcattgttgttttgaaagataatttaagcggccagagcggtcttgatggcgttcatcacggcatcgctgttctcacagcacaccatgaccacttcgccggtggggacagtggccaccttggcggaggcggcaatctggtactgatcctcgaggtagtgctccatcgtctgctgctggttctggatataggcatccattgcgtccacgacctcctgcgtcttgccctcagcaggcttgacgatggcaacgccgtagctctgcaccatcatggcagagagggaagcggcaagatcggtgtagctgccctcgggcaggtccagcagggggagcagcatgttctggatctcatcgttcaggtcatccgccggatagctggcgctgtaaccgtactgggcggtgaacttgccgtcctctgccggggagaagatcatataataatcattgtcctcggcttcccgggcatcgtggatgatctgggtgtagtttttgggggtggtatcttttttgctgccgcagccggtgaacaccagcagggcacagccaagagccagcagagcggcaagaatgcgttttttcatggtcgtagttcctttcgtctgacaaaggcagggtgatcgtgatcagtctgcccgcctttgggggcgtttatgcagccgctgaacggcggccttgtatcaggaatacggcccggtcggccggaagattgcacggcagttgtaacagttctgtgaacggcttacagctgcagcgcttccagatcaccatgattgaccggagtagaaaggatgatctgggtgctggtggtgcccagcttctggaactgcaggatcaggtgctccagctggggcatactgccgcagctgaccttgatgaggaaggtgtaggcaccggtgacatggtagcactgcagcacctccttgctgttctgcatcagctccaccagctcgtcccggtggctgggtgtgacggacaggctgatgagcgcgtccacatagacacggtctgccgggcggttcagcaccacggtgtagccgctgatgataccgtcggtctccagcttgtggatgcggctggaaacagccgggctggtcagtgccacctgctcggcgatctccttgacgggcatccgggcattttttgcgagaagggagaggatcttgcggtctaaatcgtccatgagaaaggtctccttttacgtttttgttgaattgtacaaaaatttttaaaagtaaagttttactgttgtcgcaatcgcataaactgcggaaaaactcgcttttgtgttttctgtgttaattatataaagttttggttgaaatgtaaagtgctaaattaaagcaaatgtcaaaaattttgtttgacaagaaaagaaaaaagcgtataatacatatcgcagagcacgcaaagcgccaaagactgcgcaaaaacacgttgtttctcaagtgcctgcatttgaattgcgattcccaactttatatactttcccacccctctatacacaaaaacccgctgccaggcgggtttttgtgtttgttggggatttttttatttgttcgagacgataggacggcggggagtttcccaaagcaagtgtccggagggtgggacccgactgccgtcaggcagttgggcgggggatggaatgccc

SEQ ID NO: 1044 - DNA, 7907 bp, unidentified
  source 1..7907: mol_type = unassigned DNA
ttatttaccctcgtatgctgcctgaatctcttttttgaactcttcctcgcccactctctgaagagtaagtctgaaacgctcaccaccgtttgcatgcttctcgaagaaactaattgctgcatctgtcactctgaaaagagtttccttgtcgcggataatcgggactagctgctctcctttatagatgtggtttccgaaaagtcctccaaacgatacgatatatcccggagttcccttccatgcatctgtcggacagctctttacgcagcgcgcacagttgttacatttgtctctgtcgatgacaatcctgccatcctccatgctaagtgcaccctcgcggcatgccttcacacatacaccacactggatacaatcgtcatggctgcactctactgtcattccgcccttgattccgacatcgttttcctcagcctttaagcagttgttctgacagcctgtgacaccaaacttgaacttgtgaggaagctctcttccgaagtatctttcatcaagttccttagccagagtgtatgtatcgatacatccgctaggacagatttctgagccctgacacgctgtgacagtacgtactctcggtccgcagacacctgttcctacaccgccctttgccagttcctcttttaccacattgatatcctcaaccttgataaaaggaatctcaataccctgacgcgatgtcatatgaacatatccgtgtccgtatttctcagcaacctctgctactgttttgatattttctgctgtaagatttcctcctacaaccgcaattctaagcgagaaacagcccttttgcttctgtctcatgaaaccgcccttttttagggccgcgtaatcaactttctccgccatttttaatctccttactgtgtaaatatgttaatgttttgttttatatgtaaatgcatatgcacgctctcatttgcatacacattgataccttattatgatggcttaatcagctatatttgcaaaagcctgtgcaaaatcatccttcaggtcatctatatcctcgatacccacactgactcttataagatcctcaaatactcctgcatcctccttctgcttatctgtgctgtgaagactgattgtggagcccggatgaatgacaagtgtctttgtatctccgatattgctgagtgtgtatggaatcgtcaggctgtctataaatttaaatgccttttccttgctgccaaccctgattgtaaggattgctccatagccgtttgtgagctgtttttttgctatttcatgccatttgctgctacaaagccccggataattaacctttatatcaggataattattttctatccacgccgcaagcccgagtgcattagaacattctctttccattctaagaccgagtgtttcaagtcctataatatttaagtatgcattcaccggagctaaacaggcacccatatttctgaaaagactgtttctcagctttgcgacaaatgccataggtccacacttcacataatctgcaaaccccggatatctgttcttgtcccatttgaacttacctgagtctgtcagaataccactgattgcattgctgcttccattgatatatttggaagatgaattgaccacgatatcagctccatgctttaaaacctgtatcaggtaagctgtcgatgtggtattgtcaactacaagcggtatatcatgtgcgtgtgctatctctgcaagcttctcaatatctgtgacatccagacagggattaccgatagtctctgcaaaaatcagtctggtatgctcattgatgctgtcctctatctgctgccagttgttgttctcgacatatctggttgtgatgccgaaggcctcaagatcatggaacaaatctattgtgccaccgtagaggcttgcacttgagattagctcatctccactgcttagtatatttaagaaggtattcatcagtgccgccattcctgatgcgcatgccaccgatgctattcctccctcgagctttgttattctgttctcaaaagctgtaatcgtaggattggcaactcttgtgtaacagtagcccggagctttgttttcaaatattttttccagatctgccgcgctctcctgctcgaaggcgcttgtctgatataccggtggcagtgtagagccatttgtctcttttgtcacgccggcatgaagtaagcttgtattaaatctcattgttttcttcttctcgttaattcttacatagtctattgtgttactaggaattgatgagattattatacaaacgtgtgtgttgaaagtcaatgctatcagttatacaaattatttgtgcgtggttatatattttgtttatagccattaatgtcccttaaatactctgcggctgtcgttgcggcatttgctccgtcagatactgcagttaccacctgacgcagtgtcttggtacggacatctcccgccacatacagtcccggctggacgcttctatcatggtcaccattttttgttgcagcatatgtgatgccgtcctcacctgccactacatatcctctctcatcgagctgcaccagattctttataagctctgactgcggtactgagccatatgccacgaatactccgtctacagccagtgtcctgccacttttaagctttatgcctgctggctttttttctccatatatttctgtcactgtttcgtttaggacaagctctacattttctttctgctttaagagctcaactgtgctctgtgcaccgcggaagctgtctcttctgtgaaccagatagaccttctcacatatatctgacagatataatgcatcatccaaagcggtatctccgccgcccagcactgcggctgtctttcctttatagaatgctccgtcacagattgcgcagtaagatactcccttaccggtatactcatcctctcccggcactcctgcctttctcggatatgctcctgcggtatagatgagcgctcttgcctctgctatcgtgtcatcatcgaatttcactctgtatatctctgattcttctttctcaccattttgcactgcttctatctgcactgcttctttttcgataaattctacatcaagagacactgcatgctccctgaatttttctcccaggtcgtatccgtttatgtttggaagccccagatagttgttcacatttccgctctcagctatctggcctgtcccctcgtattctttttctgctactgccacattcagattggctctctttgcatatattgctgcagacagccctgccggaccactgcctattattattatatcaaacatggaattggttcctttcatcgtccattgaattttttcggtaacttattatatacattatccttaaaaaatacaataataccgcctgcttttataaaacacctttataaaaacaagcggtatcaattttatctatcgtatatacatcctggcctcataaggtctgagcactgacatatcagaggtatccttataatttgaaatcagcacctccatgccctcacactcctttgcaagcggcattggtatctccttgtcaaagaaattgcacacaacaatcatggttttttcttcattctttctgctgtatgcaaaaatattctcatcatcctcaagtaaaagtgtgaatttaccatcaacaaataccggataatcctttctcagctgaacaagcttcttgtagcagctaaagattgaatcagggtcatccacctgtgatttggcatttattttgtcgtaattgtcatttacctttatccaaggtgttcctgtggtgaagccggcatttgccgagtcatcccactgcataggtgtccttgcattgtcacggccctttgcgtaaatggacttcatgatttcatcctttgagtatcctttttcaaggcgctcatggtacatgtttatgatttcacagtccttataatcttcgatattatactgtacatttgtcatgcccagctcctcgccctgatagatgtatggtgtaccctgcatgccgtgcagcaatatagcaagcatctttgcagattccactctgtactccctgtcattgccccatcttgacacgatacgcggcaggtcatgattgtcccagaacagactgttccagccacagttgtagagctcattctgccagtgagccattatctttttgagctttttaaacggaagcggtgcaaggtcccatttctcgccgccctccttctggtcaagccctatgtgctcaaactggaacaccatagaaaactcgctgccatccggattgctgtaaagctttgctcgctctgtgtctgcgccccatgcctcacccacggtaatcaggtcgcccttctggaaggtctccctgctcagttccttaaaatattcctgaagccttggtccgtttatggtgattctcttgtccggctcttttgctatctggtcgattacatcaagtctgaagccgccgactcccttgtccatccaccagagaatcatatcgtagattgctcttctgacctttggattctcccagtttaaatccggctgctccggtaaaaactgatggaaataatactgtccgatttccggcacatattcccatgcgcttccaccgaaacaagccttcatatcacttggcggcacgccttcatctccgtctctccaaatatagtagtcatggtatggattgtccttgctctttttagcctccttgaaccacctgtgctcgtttgaagaatgatttaagacaagatccatcataatccttatattgtgcttctttgcctcgtttatgagctcctccatatcatcgagactgccaaacgtcggatcaatatccctgtaatccgaaatgtcataaccgttgtccgcctgcggtgatttgaataccggcgaaagccatattgcattgattccaagcgtctcaagataatcaagtcttttgatgataccctgtaaatcaccaaagccgtctccgttagaatcctgaaagctctttggataaatctggtaaactaccgcctttttccaccatttttcgttattgtttttgctcattatgccctccttgtctcttcattatctcttttagttatctctttttgtaaaaattcagcctggtttctttaatgctgtatcaaattatgctattttacaagcaccaccaaaacctcacagctttcaagcttaagctcagatgctcccactgaaacagtgctcttttcagcatcatttgtgttggacaaaagcacctttttcacactgccatcaagcctgatttgtacctctttactgccaaaatttgccacaaccagcacgcgcttattttcatcctctctgtaataagccatgatgccatctgtatcctcatatgccggaacacatctgccgtaggtgaacagctccttaaattcatctgactttcgcagtgccacaagccttctgtaatagttcaaaacagatgaaggatccttttcctgcgccgcaacattgatagccttatagttttcattgaccttaagccatggctttgctgtggtaaaaccggcatttgcctcatcactccactgcataggtgtccttgcattatccctgctcatccttccacaggctgcaagtgcctgctcctttgataagcctgctgcaagtgctgccttgtactgatcctttgtgctgatatcgtcatactcatctatactgttccattttgcattttgcataccgatttcctgtccctggtatataaacggaatgcctcgaagcagtacgctgacagttcctaacatctttattccggcaggattttgagcatgctttggtaaaaatcttgaggcacctctcggctcatcatgattttctatgatattggccttaaagccgtacttttctgtctcaagctgtgaaccaagaatggtctttctccatttgtcaaaatctattttcggtgcatcataccagccatgctctccatcacttaagcactgtgcacaaaaatcaaatatcgttgaaaaatgcccattctcaccgataaactccggcagctcctcaggcttcatattgaatacctcgccaaccgtaaatgcatcatacttcttaaatgtattgttctttaattcctctaagagctctccgacaccttctgcactttcaaccatcttgtagcaggcagccagtccgtcctctgcatccggctcaaaatcagggaaatcgagatttttctttatattgattatcgcatctattctaaatcctgacaagcccttatccagccaccagttaatcatctcataaagcttttgtcttagcttttcattctcccagtttaaatccggctgctccttcgcaaacatgtgcagataatacttgtccgtgcccggcaccttctcccagcagcttccgccaaaataagagcggtaattgctcggcggattgccgtttttaccttttctgaaataaaagtaatcagcatactctccatccggatccttaagtgccttttgaaaccattcgtgcttatccgagcagtgatttattaccagatccatgatgatgtgcatatcacgcttctttgcctcggcaaggagctcatcaaactcctccatagtaccgaactcttcagctatcgcatagtaatcagatatgtcatagccctgatccacaaatggcgatttatatatcggagacagccatatgatgtcaattccaagcgattttaaataatccagctttgaaatgatacctcttaaatctcctattccgtcaccgtttgtatccagaaagctctttggataaatctgatatgccaccttgtcatgccaccattttctctccataatgtgtacctcttatctaatcataaattttgcacctatttacatcttgagaactttgtcttgatgtattatactgctattatagaaagtggttagtataaattcttgcaatattttttcattttataacacaatactgctcttataattttaaagggtatagttttaaaagctatggagaaacaacaatatgaaaaacaataatccgcctgccctcgggcagaaagaaaacgcaaagcacggagaagtatttttccccgttcaaaaatatataacaagacttgcagcagattaccctgtcatcactacacactggcacgatgaggcagagctcacactgattacaaagggctcatgcacctatcagattgatttgctcgaatatgaagcaaaggaaggcgatatcatctttatcccgccactgctgctgcattccatttcaataagggactgcgacgaattttactcggaaacgtatgtattccatatcaattttttaggtggaaacaataccgatatatgctcttcaagatatctgactccgctaatcaaccatgagttcgccatgccttacctgattgcaccgaagcatccggcatattcatccctttgcaaatgcttcatgcgcataacaaagctatactccagtcaggaattcggctatgagctggctctaaaggcatttctgcttcaggcaatatttctattgctgcaatacagtgaaaaaaatgctgatttcggtgtcaacacatcctccgataagctcaaaaatgtgctcgattacatcgaggtgcactatgccgaaagcatccaggtttcagagcttgccgggctttgctatttcagtgaataccacttcatgcgtttcttcaaaaaacacatgaacatgacctgcgtgcagtatatcaacaatgtgcgtcttgaaaaatccgtggaacagttcgagcgcggcaacacctcaattttagatgtctcactgtctgtcggatttcacaatctgagctattttcacagggcatttaaaaagaggtatcatatgacacctctttcctttatcaaaagccttgaataa

SEQ ID NO: 1045 - DNA, 17777 bp, unidentified
  source 1..17777: mol_type = unassigned DNA
atgaaagtagtaatcctggctggcggccttggcacgcgcatcagcgaagaaagcgtctacaagcccaagccgatgatcgaaatcggcaacatgcccatcctgtggcatatcatgaaggaatattcctactacggctttcacgactttgtcatctgcgcgggctacaagcagcacatgatcaaggagtggttcgcggattacttcctgcataccagcgatattacgtttgatttcacccgcggccagaacgagatgatcgtccacaaccaccacaccgagccgtggaaggtcaccgttgtggacaccggcctcaacacgatgaccggcgggcgcatcaaacgcattcgtccctacatcggcaatgagaccttcatgatgacctacggcgacggcgtctgcgatgtggacattgccaagctggtggcattccaccgcgagaacggcaagatcgccacgctgaccgccgttcagcaggagcagcagaagggcgttctggatattgccgaggataattctgtccgttctttccgtgaaaagaaggccagcgacggcgcgctcatcaacgcgggctatatggtgctggagccgcagattttcgactatctggacggcgacgcctgcgtctttgagcagaagccgctgcagaagctggccgaggagggtcagctgatgagctatatccacaagggcttctggcagtgcatggacaccgcccgcgagaagcaggtcctggagaaaatgcttgccaccggcaacgcgccctggaagaagtgggaggattgatgatggtacattacgatcctgaattttaccgcggcaagcgggtgttcgtcaccggtcacaccggcttcaagggcagctggctctgcaagatgctgctgatggccggggccgaggtcacgggctacagcctgcagccgccgacgcagccgaaccttttctccatcgccggcgtcgaggacaagatgcacagcgtcatcggcgacatccgcgactttgacgcgctgaaggccgcttttgacgcggcgcggcccgacattgtgctgcacctggccgcgcagcccatcgtgcgcgacagctacaaggacccgcgctacacctatgagacgaacgttatgggtacggtcaacctgctggaatgtgtgcggctggccctgcagcagggcagagcgccccgctcggtgctgaacgtcaccaccgacaaggtctaccacaacaacgagtgggcctggggctaccgcgagaacgagccgctggacggtttcgacccctactccaacagcaagagctgctcggagttggcgacgcactcctacatcaacagcttttttgccgataagaccgtggccgtctcgacggcccgcgcgggcaatgtcatcggcggcggcgactttgccaatgaccgcatcatccccgactgcgtccgcgccatggccgcgggccgtaagatcggcgtgcgcaacccctactcgacccgcccgtaccagcatgtgctggagccgctggcggcctacctgctgatcgcccagcgccagtacgaggacagccgctttgcgggctactataatgtaggccccgacgactgcgactgcgtcaccaccggcacgctggtggatctgttctgccgggcctggggcggcgacgccgcctgggagaatcaggccgaggccaatgccccgcacgaggccaacttcctgaagctggactgcagcaagctgaaaacgaccttcggctggacgccgcgctggcacatggccgagtgcatggaaaagaccgtcgccttcagcaagatctggcttgccaacggcgatgtcccggcggagatggaaaaggaaatcaatatttttttggaggaacaataattatgtggaagaacgaggcagaagcccgcgagcagatcaaggcgatggtcgccgagtattatcacgacttcaaggagaaaaagaccccctatcaggagggtgaccgcatcacctacgctgcccgcgtctttgacgagaaggaaatgtgtgccctgactgacgccacgctggacttctggctgacgacgggccgctttgccgaccagttcgagaaggagttcgctaagtggatcggcgttaagttcgcccatctggtcaacagcggttcctccgccaacctgatcgccttcatggcgctgaccgcccccgagctgggtgaccgccagatcaggaagggcgacgagatcatcaccgtggcctgcggcttccccaccaccgtgaccccggccatccagtacggcgcggtgcccgtgtttgtggatgtgaccgtgccccagtacaacatcgacgtcaccaagctcgaggccgccctctcccccaagacgaaggctgtcatgatcgcccacacgctgggtaacccgtttgacctgtccgctgtcaaggcgttctgtgacgcccacaacctgtggctggtcgaggacaactgcgacgcgctgggcacccagtacaccatcaacggcgagacccgattcaccggtacttggggcgacatcggcacgtccagcttctacccgccgcaccacatgacgatgggggagggcggctgcgtttacaccaacaacccgctgctgaaccgcctgatcctctccttccgcgactggggccgcgactgcatctgcccctccggccaggacaacttctgcggccaccgctttgacggtcagttcggcgagctgcccaagggctacgaccacaagtacgtctacagccactttggctataacctcaaggtcaccgacatgcaggccgccatcggctgcgagcagctgaagaagttccccaccttcatcgagcgccgccgccacaactgggaccgcctgcgcgccgcgctggagcccgccgccgacaagctgatcctgccggagccggctgccaacagccgcccgtcctggttcggcttcctgatctccgtcaagccggagagcggtctggaccgcaacgccgtgacacgctatgtggagagccacaacgtgcagacccgtctgctgttcagcggcaacctcatcaagcacccctgctttgaccagatccgcggcaccgacgcctaccgcgtggcgggcgagctgaccaacaccgactttatcatgaacaacaccttctgggtcggcgtttaccccggcatgaccgacgagatgatcgactacatggccaagacgattatcgaggctgtgaatcagtaaaattttgacaatgaggtacagatccctatgatgcagcaaaaggtgaaaacgacccgcgcacccagactgcggttggacaaaaacaggcggctgacgcctatgcagatctactgctgggcgacggtgggctgtctggcggtgctgctgcttgccctgctggccagccgtggtgcgctgctgcatcgattcttcttttatgatgtcaccgataccggtatggactttttccatagtattgagtatacgcgtggacgtatgccctacggacagttcgatacgctgtacccgccgcttgcaaatctgtttttctatgtgttgtatttgcttgtgccaaagacacaatcagctacgtggacggaatcgtttatctcgtctctcaacatgaagggaacagaacgggatttgcgtctacagcaagcgacgatgatgctgtttatcgtctttgttatcgtggtggtcttaggaattgtatcgatgacagaacgcctgacgcgcagctgcggggggcggaaagagctgctggcattctgtgcagtgttcagctatggggtactgtacggcttggaacgcggcaatattctgctgttgtgctggccgttaatggcattttttatcctgtaccgcaattcagaaaacccacttttgcgggaattggcctgtctggcgctggcgattgccgccggtttcaagctgtacccggcgtttctgggcgtgctgttgctgcgcgataaaaactatctggccgcggtgcgcacggtgctgtacggtgttgtctgcctgtgcttcccgctgttcttcttcaatgaaggattgtttggcctgacactgtggttccgtgtactgtttgattttagcggcagcagaggtgaaccgtggatcggcaatggtttctccaacattttggcagaggccggacatgcggtggacaagctgctggacacgcagctgggctatggcagctacgcactgctgggcattgtgctggcagcggtgctgctggtgtgcagcttttttatggataaggagtggaagcgcatcacagcaatcattctggcgatgctgatgttccagtcccagtatgattatgtatggtgcctgtttttgattccgctgttcctgtttatggagcaggagcgtgagctgcgcagggacaacgtgctgccctatctggccttgatggtgccggtgctgccgctgccgctgttccggcgggatcagatggagccgtcctttgtaccgcgcaacacgatttgtcatgtcatgctgctgctgctcattgtctggtgctttgtccagacggtgcagggggtgcgtgtacgctgtgcggaaaagccggtcaagtcggcacacggacacccggcagccacggtgctgctggccgtttgtgtggcggtggccggtgtgggcggccagcagctgtggcagcacacccacaactggggctttgactacagctacaacggccgactggatgccgagggcatccggcagaaggacgtgcaggacagcgacggcaacccggtagaggcaacatggagcggccgcggtgcgtatattatgatttacaaccacgcgccatttacgcaaaggatgacggtcacattccagacaggctacggcatggatttgaagcgcgcctatacgatgacgtttgaagcaccgaatctggaagatgctgatggtacaaccgggaagcagaagcagacggatattaagattgatcatgaggggcagaccgtgtgctacacggtagatgtggttcccggccagacccaaatcgatgtgagctatgacggtccgatggcggtttatgatgcttcttcgcgcaaaaacggcaccttcacggtgacaaacctggcggttgtcagtgagggcgctgtggagaaaaccgaataacggaaggaaacatatactatgcagaaattgctggccctgctgggcgcaaaaaataaagaggaatttgtggagctgttcaagcagttcatcaagttcggcctggtgggcgtaagcaacacggctgtgtccatggcggtctactatatcttcctgtggatcagcccagacctgtatatggtcggcagcatcctgggcacgattctgagcattgccaatgcatttttctggaatgataaatttgtctttaccggcaacgccaatgactggcgcagcaagctcaagcggctgggcaagacctatgtcagttacggcggcacgtcgattttgtccaacgtgctgctctggattgaagttgcattcttcagcgtcagcaagtcaattgcgcccatcgtcaacctgctggtgacgattccgctgaactttgttatcaacaagctgtggacatttaaggaaaaatgagaacaagcacgatgcaattagtaatggaaaaaccacatacgaataagcgccagaacgcgcgaggctgggtattggctgcactgctttgtgtggtgattctggcctattcctcaatttatttcgccaacacgatgcccattacggaaggctggaatgtaaactatgcagagctggtattgcacgggaaatttccataccgcgatttttactattacctgccgccactgaacatcctgattgatgtggtgctctggaagctgtcgtttggcagcctgttcatttatcgtgcgtggtggctggtacagcggattgctatttatgagttgatgtttcggctgctctgccggtatttcaatagatatgccgcctttgcagcgtgtgccttctctgcgattctgtgcacggcctctgtctacgatttatttggtgattataaccagacgattccgtttttgtctgtgttgctgctctattgtgttctgggatttgcagaggcggtagataagaaagccgccgggaaatacctgtttgctgccggcgctatgctggggctgctctttctgaacaagcagacgatttttgtggcggcgggggttatttatctgctggctttgagtgtctactgctggaagaaaaaagacaaaggctttctgcaatattgtgcggcagtcatacttggcttttgctggtgttcgtcgtggccatgggaatccttgccgtcaatggcgcgttgcttccgttctttgagcaggtctttatgcacacgggaggcaaaggcagtccgcttttcattttgatgaaaatctttactggctggacaatcaatgcgccggtatttttactgatggtgggatgtgtaactgccataacactggcgcagaaaaacgagagccagacagcaggacggatgcttttgctgctggtcataggcggcggctatgttttggaaaggcaggctgcgaacgactttatcgaagtgctcgttggtacgaaaagcgtccaagccgttgtcatcggtggagggttgctactgttgctggcgtacagccaaaagcgcagaagcggcagcaagataatgcacgatgtattttacggtctgtgtgccgcctatgtggtgattattctagttacggcccgttatgcgtcattaggcgaagataacgggagctttttggaagcaatctatgaatcaggcacgctgtttaagagtgtgactggtacgctgtatacgatcatcagctttttggatctatatctgattgcccgctcccttatgaaaataaaagcggatggcaatggcggctatgcacgtgagcacttttggatggcctgtgcggcattttctacgatatatgcagccagtatggcatcggcatcagaaatttcctaccatgggatcatgttggctatgccgtttgttctgtgtgttgggctgaacagcgtatttacagataaagttacggaaaaagcggtcaaaatcggtacgattgcgctgtgcacagtactttcgatggcttgtattgcacagaaggtcgtatgttcctattcttggtggggctgtgaacaggcagaacatgacaaaaaaatctacgccaccggcatccccgcactgcgaggcttccgtttttctgcggaggacgacaagatgttggaggaagttacacagctgattcttgacaatacaacagaagatgcaacggtttttggctatccttatgtaaaactgtttaacatcctgacgaaccgctacacgatggatacatttgttccggttctgttctatgacgtggtagacgaccagtacgttttgcaggaggacgagctgctacaggaaaatctgcctgacattgtaatctggaaggatgatgttccaaactgcaagaaagttcacgaagaaagataccgcaatggtgagaaattgaagcagcgtgagctggaaaagaattttggacgactgctgggcacacgctacaccctgttgggcgtgtatggtgaggaaaaaactggtaagatcaaggtgtacaagctggcagacgagacagactggggtagcttcaccttggaaggaaagggaaccgaggaagagccgtatctgattcagtcggcggaggatttgcaggcgttcagcaattatgtcaaccgcggcatgagctttgcagatcagtatgttgaacagaccgctgacattgatatggacggtaaaaaatttacgcccattggtgcattcagcggggaaagctatttttacggcacctataatgggaagggccatgttatctgcaatttgacaatcagaaatgagaacaaggaaaatgtcggtctgtttggccgtctcggcggcgcagtttataaccttggtcttgaaggcggcagcctggatggtgcttgtgtcggtgcaattgccagccatgcagttggcagcgatgcaaggattgtgaactgcttcacagatatggacgttacagccctgcgcgcaggcggaattgcggataacttctccggcagcattgtgaactgtgtcagcgcgggtgtgctgaatggtgaggaaaatgctgctgcaatttcctacaacaatacattgactgtggacagcgtatatcagctggcaggaagtgcatcgagcctgattatgaccccgagcattcaagagcagaatatcagcagtgcagacgcagaagtacttaatagcgactatctggtcaagcgtttgacggcgtacgcacacaatgtgaatgcaaatggattgaagctcaagaaagcaacgagtgaaacaggcggagaagcgctcgaagaagtggaaaattccatcgagcttgtcgaatggacaaagggaacggacggccacccggtattggtccctgaaaattgactaaatggaaaaggagcaacccaatgaaacagcgtttagcggattatgttgccgactttctggcggcacgcggtgtgacggatgttttctctgtcgtgggcggcggcgctatgcacctgaacgatgcgctgggccataacccccggctgcatgtgacctacaaccaccatgagcaggcctgcgccattgcggcggaagcctacgcccggctggaaaataagatcgcggcggtctgtgtgaccaccggccccggcggcaccaacgcgctgaccggcgtcgtgggcggctggctggactccatccccatgttcatcgtctccggccaggtgcgctatgacaccacggcccggtacgccttgcagtacactggtacgccgctgcgcgccatgggcgaccaggagtacgacatcaccaagtccgtccagtacatgacgaagttcgccgccatgctggaggaccccaaggacattcgctacctgctggaaaaggcgtggcatctggctacaacgggccgccccggcccggtctggctggacatcccggtcaacttccagggcggctacattgagactgacgagctgcgcggctacgaccccgccgaggatgacgcccagctgcccccgccggtggacgacgccacgatccggacgattctggaaaaaatcaagaacgccaaacggccagtgttccacgcgggctatggcatccgcctgtccggcgggtatgcggcgttccgctccgtggcggaaaagctcaacatccccatcgtcacctactggaacgccgtggacctcatcgaggatgacaatccgctgtactgcgggcgcgccggcaacatgggtgaccgcccgggcaactgggctatccaaaacgcagacttgattctggccgtaggcacgcgcatttctatccgccaggttggctacaactggaagacctgggcccgtgcggcagaggtcatcatggtggacattgaccaggccgagctgaaaaagccgaccctgcacgtcgaaatgccggtctgggccgacgcgaaggactttttgaccaagctggataaggtcgccgcggcccccgtgaacgcgggcggcgagtggctggccacctgccagcgctggaaacgcgactaccctgccgtgttgccccgccagtgggaggaaaacggcgagaccgccaacgtctacgcctttgtgcgctatttaagcagtcgcctgccggagaacagcctgaccgcggtctccaacggtgcgtgctgtgtcgtcggtaaccaggcgtatgtcatccagaagggcagccggatggcaaacaacagcgccattgccagcatgggctacggtctgcccgcagccattggcacctgcatcggcggcggacgccgccagacgatctgccttgagggcgacggctccatcatgatgaacctgcaggaactgcagaccatcctgacgaacaagctgccgatcaaaatcttcctcatcaacaacaacggttaccactctatccgcctgacgcagaacaaccttttcaaggagcactgcaaggtcggcatcggccccgagagcggcgacctgtccttcccggagtttgaaaagattgcaaaggcgtttggctacccctactacagcgcccacagcaacgccgagatgaagcaggccgtggacacggtgctggcactggacggcccggctttctgcgagattttcaccgacacgaaacaggtctgggagcccaagagcagcaccaagcgcctgcccgacggcacgctggtcagccccccgttggaggacctggcccccttcctgccgcgtgaggaactggaaaagcagatgttcatcccgctgatgccggaagtgtaagggagtgcgtgattcaaaaatggcaagcattcaaagacaaatccacaccgccatcatcaccggccctacgggggcaatcgggatggcgctgtgtgcaaagctgctggcggagggcgtgacggtttacgcggtcacccacccgggcagtgcgcgggcggcgctgctgccgcaggacgcgcggctgcatgtggtgccctgcgatgcggcggagttggccgcgctgccggagctgatcccggaaaaggccgatgcgttcttccactttgcgtgggcgcacacgatcggcccgggccgcaacgacatgccggcgcagatcgagaacatccgctacaccattgcggcctgccgcgccgcggcgcagctgggctgccaggtctttatcggggctggcagccaggccgagtatggccgcgtggagggtgtgctgaccgcgcagaccccctgcttcccggagaacggctacggcatggccaagctgtgcgccggccagatgagccgcgtcgagtgccagacgctgggcgtggcccacatctggacgcgcattttgagcgtctacggcccgcacgacggtccggccacgatgatcagcggaaccatccgtaagctgctgcacggcgagaagcccgctctgaccgcgggtatccagcagtgggactacctgtacgccgccgacgcggcagctgcgttctacgcgctggccgtcagcgggcaggacggcagagtctacccgctgggcagcggcacggcccgcccgctgaaggactacatcgaggcgctgcgggacgccatcgacccggcgctgccgctgggcttgggggaggtcccctacggcccgctgcaggtcatgcacctgcaggcggacacgtcggccttacaggaggacaccggctggcggcccgcgaccccgtttgaagaaggaatccgcgaaaccattgagtgggtaaggaaagagacaaaatgagtgagaaaaagacgatttcggtaatgatcccctgctacaacgaggagcagaacgcccgccccatctatgaggctgtgcgcgatgagctggtcaagagctgcccgaactacgactatgagattttgttcatcgacaataagagcgaggacggcacccgtgccatcatccggcagatctgcgccgaggacaagcacgtcaaggccatcttcaacgtcaagaacttcggccagttcaacagcccgtactacggcatgatccacacctctggtgattgcacgatcacgatgtgcgccgacttccaggaccctgtggagatgatccccaggtttgtggccgagtgggaaaagggctacaaaatcgtcattggccgcaagacccagagcaaggaaaacccggtcatgtactggctgcgcggctgctactacaagctcatcaagaagatgagcagctgtgagcagatcgagcagttcaccggctttggcctgtacgacaagagctttatccagacgctgcgcaacctgaaggacccgacgcccttcatccgcggcattgtggccgagctgggccccgagcgcaaggaaatcgagtacacccagccccagcgccgcgcgggcaagacccacaacaactggtacagcctgtacgacgctgccatgctgagctttaccagctacaccaaggccggtatgcgcattgcaacgttcgcgggcttcctggtggcggggctgagctttctggtcggcctgttctatctgattgccaagctgctgttctggcagagcttccgcgccgggtacgcgccgacgatgatcgccatcttctttatgggcggtattcagctggcgttcctgggctttttgggtgagtacgtcatggctatgaacacccgcatcatgaaccgcccgctcgttgtggaggaagaacgcctcaactttggtccggacgaccggtgaccggcatgaagcaggagcttggttatttcctgaaaaacgcgaaattccgcgcggcgctggggctgaccctgctgctcagctacggctatgccatcgccacgacacgggtcagcattgactcgctggaaggggaccgctacatcggcacgggcggcgtcatgctgtccaccggacggttcggcatgaacctctgggccgcggtgctgggctacggcagggccgagccgagctatgcctttggcattgacctgctggcggcgctgctgctggcgctggcggcggtgagcttctgtgcgctgctgcgcaaggccgcgcaggaccgcatcagcatgttcggctatgggctgtttgcctgcctgtttgtctcctacccgctgatgaacgaaatttgggagtacagcggcgcgaatgtctgcgtctgcggcggctatttgctggacgctactgcgctgaatctgctgtgggacgcgcgccagcccggcgtgccgtggcgcggcagggctctgcgcatgtgcgcggcggcgctctgcctgatggtggtctgctcgtcctatgagtcactggcggcggtgtatgtgctggctgtctttgcgcttttaacgctggagcagctactggccgccgagcgcccgcggcttgcggcagtcctgaccgagggaatgtggtacgcggcggcgctggtcggcggtctctgcctgcgcgtgctggtgacgtcgggcatccatcttgtgctgccgcaggctgcggccaacggcgccaccgaaattttgtgggcgttctacccatttgtctatcttgcaaagctgcttgtcaagggcattctgattaactacgcactgcgcggctgtttctacctgcccattgctgaattggcggtggcggtgccagtgtttgttgctctggtcatcgtgctggcggtgcgcaaaaagcggcccctgctgctgctcaccggtgcgggaatgctgctctcactggtgctgctgtcgtttgtgcaggggcggtactcgccctaccgcacctgccaggtgtttgcgctgtttgtggcgctggcggggctggccgtgtatgagctgctgcgccgcgctgcggcccggcgggctatgctgctgggcagcgtgcagctgctggcggtgctgctctgtctgcaccaggccatgtacctgaaccatctgctggccgtcgattaccagcgttccgagcaggaggccgccgtggtgcgcactctgggcaccgagcttgtgcgcgactacggcaccgacaagcccgtggtgctggtgggccgttacacgctgggggagaatatcacccggtacacgacggctgacccgatgcagcacccgctgtaccgcttcttccgtgagcacacgagctgggagagcggcgacaccgtcaagtacgtcgacaccaactgcaactcggtgctgaactggtcggtcacggccttctccgaggtggacgacgtctacggccaggcagcggagcacctgttccgctactatggctttgctttggacatgacccacagcgctgccctgcatgagcaggcgcagacctacgccgacgcccacgacctgccgggatacccccgggcgggggcgattgtcgattgcggggactatgtgctggtaaatctgcaataagaataccgcggaaaagtttgcgcttctccgcggtttttgctttctttctgtattttgccgatgttttcagccggtcacggtctcaaagggcttcgtcaggtgcccgttcctgtcggcctcgcaggcgcggcgggcctacttcaaatactccaccaaaaacgccactgtcgtctcccgcagcgctttgtccagcgcggcggcggtggcggcgtcctcggatagatagttgtggttcccctcggcaaacggctccagcacggccctgccgtcgggcaggctctcgacggcggctatcgtctcggcctgggtcgtgtcgctcaaaatgccctcatggccggtgtaggtcaaaagcgtcggcagggcgctctcccgcagggcggcgttcgggtcggaatcgcgcatttcggtgaacagcgttccgctgacatcgacgccccaggtgctgatgctgccgctcgcctcggcctcagcggccagcgcttccacggcggaaaagtcgtcgatgttcaaaaactccatgccgcgcaggcccgcgccgttggcggggctccacagcgccagcgccgtgatgccgcccctgcgctgcgggtagaggctggccagccgtccgcccatgctgtgacccaccagcgctgtgcggcccgtgccgtaggtctgctgcatgtaggtgatggcgctctcgacgtcgtcggtcatgttggacagcgtgtaggccgtgaacggctcggtgctgttgccgcagccgggaaaatccagccgcaccgtcgcaatgccctgggcggccagatcggcggccagcggcgcaaagtggccgtcgccgctgcggctgccggtaaagccatggcagagcacgacgagcggcagctcctccccgcgggccagcttgccgggcagctgtaccgtggcgtaaatgtccccgcgcgtgccgggtatggtgacgtcctgcgctttcggtgcgggcgtcagcagaaagagtgatgccgccacgcagagcgccagcgcggcaatgcagcctgcaaggatataaaaagcgcgtttatgcgtttgtttgtgcatagaattacctccgtaatgcctctattaaagcctatgcggggcaaaaagtcaagacgcacagaatacacacaaaaaaacaggtgacaaacccggggcggatgtggtatactaaagattacaaattggttaaaaagtcagacccggggcgcaggcgcagccttgccccggcttttgtcctgttttaccggaggtgcttgactacgaattctatagcgaaccgtatcccccgcctgctggctatgctgtttgtgctgctggggctgttctgcgcggcggcactgcccgcccatgcggaggactacgacacggtgctggaccgcctgtcccgcctgcaggcgctggcgcgggagtactcggccggtcaggccgacacgcccgacccgatcgagctgacgctggcctacacccgcacgggggagtacaactccacgatctggcagctgaccgccggtgtgcgcgacgccgggtttgagagctacgtcaacagcagcgaccccgagctggcgtcgctgcagaatatgaacaccgtcgtcctgcccaacggagaaagcatcgactttgggcacctgctggcgtcgatgaaccttgtctacaacggcatacccatcacgggcagctggggcggcgactgtgaggagctggccaggcagtattacggccaggccggcgatgccgcgggctacgccgaggcgatgcgcgcttcctttaatatagacgatgacggcacgctgagccgcttcagcaacggggacctgcgggcggacctcgactccgtcgtcgtcggctccaaggtgacaaaggacaccgacctggccgaggcgctgcgcagctactacgcgaatctgaccgagtatgaccgcgtcaaggagttcatctcgctgagcttcggcacggtggatacctcgagcaaggcctttgcggacgccgtgtacagcgctctgctggaggattccggtatgcagctgctgttctacatgaacggtatgtggaccgtcaagggctggcagatcaaggacgactacgcccccgccgtgcgcggcgcaacagacctgtttgccgagtacctggccaacgcggtcaatcacgagaagatcaagagcgagacgaatgaccgtctggttgccatgggcgggcaggcactggccgacgcgctggaggcgttgggcgacaccgacgccgcccaggccgcactgaccgccgccgaggagatggccaataacgcccaatcgacggtttcctccggttcggatgtggtctccgccgcgcgggagaatttgcagacaaactttaacgtgaaggtcttccagctgattttgctgattgcggcagggctggcagcgttcatgctggtgttcagcatggtgatgtttgtagtgcaccgaaaagaaaattgagtttggactgcgtgccgctctcttgtgggaaagagagcggcacgctttttctgttcacaccccgttcacattccgtatattcaccccgagttatccacggcgtataacggttatccaccgtggaaatgttgaaaactccgtggaaagcgtggaaaactctgccgcccggacccgttcaaaagcggaaaaccgggaaaatctacgtagaaaaaacgtttattttccacattttccacagcgacgctgttgaaaactgtggaaagccgggggaaaacgcgaattgcgctttttgcaacacaaaatacacgttttgtaaataagggcttgcactcgccgcgcgacagcgctataataaacctaatcatcacccgcactgctgtgcggcggtgcgcttgagtataaaagggagagtgtgaaattatgttggacattaaaatcaccaaaacgacccatccgaaggaaaagccgcaggacgagtcgaagctcggcttcggcaagcagttcagcgaccacatgttcctgatggactataccgcgggcgagggctggcatgacgcccgcatcgtcccctatggcccgtgggagatggacccggctaccaccgtgttccactacgcacaggaaatttttgagggcatgaaggcctaccgcaccgcggacggcaagatccagctgttccgccccgactgcaacgcgaaccgttttaatgattccgcggaccgtctcggcatgccccccatcccgccagaggacttcgtgcaggctgtcaaggcgctggtcgatgtggaccgcgactgggtgccccactccgacggtgcgtccctgtacatccgcccgttctgcatcgctaccgatgtgggcctgggcgttcatgccgccaagcattaccgctttgccatcatctgcgcgccctccggtgcctactacgccgagggcctcgaccccgtccgcatctatgttgaggatgagtacatccgcgccgccccgggcctgaccggctttacgaagtgcggcggcaactacgccgcgtctatcaaggccggcgagctggccgaggagcgcggcttctcccaggtgctgtggctggacggcgttgagaagaagtacgtcgaggaagtcggctccatgaacatcatgttcaagatcgacggcgagatctacactgccccctgcgtgggcaccgttctgcccggcgtcacccgccgctccatcatcgagctgctgaaggactggggctacaaggtgcatgaggagcgtgttgccattgccgacatcatgaaggctgccgacgagggcaagctggaggaagtctttggcaccggcacggctgccgttgtctcccctgtcaaggagctggattgggagggcaaggttgcccacatcagcggcggccacatcggcgagctgacccagaagctgtatgacacgctgaccggcatccagtggggcaagctgcccgacaccaagggctggatcgttcctgtggaataa

SEQ ID NO: 1046 - DNA, 7534 bp, unidentified
  source 1..7534: mol_type = unassigned DNA
atgttaaactatagtgttgcggaattaaggaagagattgattaataaagtattcaattggtattttggcagacgagccctcccctattggttggtggttattttcgatttgctaacgtgctttgtaggtggactactcatggtgtggatgcgccatccgcttacagaaatgttgcaacatttgccagagttactccatacattcctaatgtttgcagtgttcaacctcattgggtttagagcattccacacttattctggcattctgcgatactctcagttcgtagacctcatgcgtgtggtgtgtgccaatggtgtatcgcttattatggcattggggctcaacttccttatttgccacaaccattggcatggcacattttatgcccttaccggacgaatgactttggtggtttaccttggcacgatgactttgatgtgcttgagccgcgtcattgtgaaattgttatttgaccaagcattgatgggtaaaaccgcacaaaacacctttgtgtatggaacacaagccggtgcagtagccttgacaaactatgcatatagcatcaagcctacacagtttatcatcaagggctatatgggcgatgaagatagctacaataatcagcgactcatgggtaaaaagatttattctatccatgacaacttggctaccgtgcttaaagacagaggtatcactgccgtattggtaagtccgctgaagcacgatgactttttgaaaaacaaaaagttgcaagacttgctgattgagaatggtgtaaaaatatacgtctcgcaaaatgcaaaagaacttgtcaaagatggcaaggtgcaaggcgaagtgcatctgcgcgaagtgagaatcgaagacttgctctcgcgcgacgaaatcccaataaacctcaagtcgattaagcaaaacttaaaagacaagagggtgcttatcacgggttcggctggtagcattggttctgaaattgtgcgacaagtcgcatcgtttgaacctgcagaaatggtacttattgacgctgccgaaactccccaacacgacattcgcttgatgatgcgcaacaagttccccaacatcaaagccgaaaccattgtaaccaatatttgcaaggaaaaacgaatggaggaaatctttaaatcgtttaaacccgatttcgttttccatgctgcggcttacaaacacgtgcccatgatggaggataaccccagcgaaagtgtgcaaaacaatgtgtggggcacaaaaatcattgctgaccttagcgtgaaatatggcgtaaagaagtttgtaatgttttcgaccgataaagctgtgaaccccaccaacgtaatgggatgctctaagcgcatttgcgaaatctatgtgcaaagcctcaacaaggcgattcaagagggcaaggtaaaaggtgtcacacagtttgttaccacccgttttggcaacgtgcttggctctaacggctcggttatccccttgttccgcaaacagcttgctgcaggtggtccacttacagttacacacccaaaaattattcgcttcttcatgctaattcctgaggcatgtaagttggtgctcgaagctggtattcatggcaagggcggcgaaatttatgtgttcgacatgggcgaccccgtacgcattgctgatttggcaaaacgcatgattcaacttagcggtgccaagaacgtagaaataaaatacacgggattgcgcgaaggtgaaaaactctacgaagaggtgctcaacgaaaacgagaatacgcttccatcattccatcctaaaattcgcattgcgttagtacgcaattacgaatacgaagatgcagaacgcgaactcgaagaattgcacaacatctcacttcaatacgacgatatggaaaccgtaaagaagatgaaagaaattgtgcctgaatacatcagtaagcactcgcgttatgaggcactcgaccctaaaaaagaagaggcttaaaacaagatttctataaaagttcgagagcttgactccgactttcaaacgaattacaccgaagagtggaacaccgtttataatttttaaaacggttttccactttttttttgctttatacaccctcaatattcaagggtttacattaaatttgcactacaatcaaacaaaaaaacaagcaatatgaagaaagcattctactgtgtacccgctttgctctgtatggctttggctattcccgtgcaaggcaaccgcacctacacccacaaccatgtggctgtagccgacaccgttgtaaccgacgactctatggacatggaatataccgaggacgacgattgggcaggcacgaacgataacacagctatcgactctgtggctgaagattcagacactgatattttttgtccatacaacgacgaactactgagcgaatatagcaacaaaagtgccgactttaatctgcaaaatagtaccgatgccaatcaaggtgtatcgtttgacgcttcactctttgtgcctaatgccgatagcaaaggcgaagctaaaaagggaggcgcatatagcttaatggttagcaacattcttacaggtacactcgactcgattaacgcaagcaagtggaaaattaattcactcgaaaaaatgcttgaagctaagtggaatgcggtgaaggtgggttaccaaaacgaccaaaacgaaaccaaagctttctgccaaaaagatggcgtagaatataacccgacttcctattcataccgcaccagtgttacacctgtgtggagttggacaaacaagggcatcactacctatagcattgaagacgaatgctacacaggtggtgcacacggcatgctgtttcactattacttcagcattaacaccaaagaagattgcttaatgggattgacagacatcttcaagtccgaagccttaagcgaagtctttaaattggtaggcgagaaactcaaaacatgtccgcaagctgcacaagaccaagaaacttggccagctatagcggaggtagttcctgccccttcggcagacgactattctgttcgcaccggacaaatggaacagtaccaaggcaaatggtatccacgtcccgcagtaacagaatgcggcattgtgttcacttatccgccctatatcaaaaattgctacgctgctggcaccatcaatattgtgttgagcaacgaagaagttaaaaactggttgaaataatgaaacataaaatagccactatgcttatagcagcatcatcggcactcggtgccgcagcacaaactaccgacaattttaaatataccgatgagaaatttgccgacattcaaatgcttcgttacaaagtagagggattcgacaaactcacactgaaggagaaaacatttatttattacttacaagaggctgcccttgaaggtcgtgacattctcttcgaccaaaacggacgttataatttgcgcattcgtgctttgctcgaagctgtgtatacaaactacacaggaaagcacgatgacaaattttacaaagcacttgccgtatacttaaaacgtgtgtggttctcatcaggcatacaccatcactatggttgcgaaaagttcttgcccgattttacggaacaagaattgcgtaatgctctcaacaagattccggcagacaagttaccgctcaacggacaaagtctcgatgccttttgcaacgaacttttccccgtaatcttcaatcccgaagtgatgtctatgcgcgtgaatcaaaaggatggcgaggacttgatacaaacctctgcttgcaactattatgcaccaggcattacacaagccgaggctgaggagttttatgcacaacgcaaaccaaccaacgacccttaccccattatgatgggtatgaatagccgtcttgaacgcaacgactatggcatgcttaccgaacgtgtgtggcgtgtgggaggtatgtataccgcagccatcgaacgcattgtcgacaatctgttaaaagcacgcccctttgccgacacgcccgaacaacaaaaggtaatcgacctcttggttgaaacctatcgcacgggcgacctccgcactttcgatgattactctatccattggctcaaagacactaagagcatggttgactttaccaactatttcaccgaatcgtatggagaccctctcggcatgaaggcttcgtgggaggcgattgtcaacttcaaagacattgcagcgactgaacgcacaaagaagctctctgaaaacgcacagtggtttgaagacaactcacccgtagcccccgaatttaaaaaggaaaaggttaagggtgtttcggctaaggttatcactgctgccatcttggggggcgacctctacccttctactgccatcggtattaacttgcctaactcagactgggttcgtcgcgaatttggttcaaagagtgtaaccattggcaaccttaccgatgcttacaacaaggcttcgcacggcagtggcatggacaaggaatttgtgattgacgatgctacacgcgctcttattaacaagtatggcgatgcttgcgacgacttgcacacggacttgcacgaatgcttaggacatggtagtggcaaactccttcctaccaccgaccccgactctctcaaggcttatggatcgactattgaggaagcgcgcgccgacctctttgggctttactatgtagccgaccaaaagcttgtagatttaggtcttacaccgaacctcgaagcctacaagagccaatattacacctacatgatgaatggtttgatgacacaacttgtacgcattaaaccaggcaataacattgaggaggctcacatgcgtaatcgtgcacttattgcgcgttgggcatacgagcatggcaaagccaataaggtggttgaattggtgaaaaagcatggcaagacttatgtaaaaatcaacgattatgctgccttgcgcaatctctttggtaaactcttaggcgaaattcagcgcatcaagagcgaaggtgattataacggagcacgtgatttggttgaagagtatggtgtaaagattgaccctgtgttgcacaaagaaattcttacacgctacgaaaagttgcacctctcaccctataagggctttatcaatcctgtgtatcacgctgaacgcgatgcacaaggcaacattaccaacgtaactatcgactacaccgaaagctacgaccaccaaatgttgcgatatagccatgactatgccacactccccttggttaatgaataatacttgtgttttaaaatcacatgattatgacaaagaacgaggaaaattggcaacgcaactatttgcaacttaaagagtttgtgaaaatccacggaagtttacccaacaagaaaaaagtggaaaaacgtggtttactaaattggtggaaatataaccaaaaactcattaagcttgataaaataacacaggagcgcaaacagttgttgcaagaaaacagcgatatgcggtttagcaaaaataaataacttttgggggctatacgcacaattatcaaagccctactaccgcatataaaaataccaaaagcaagcattgctcgcacatataccctacagaatgtatatagcgaagcaatgcttgctttgtttattaactaaatctacattgagacgaaaaaattatgccttatcaagtgcttgcttcaaatcgtcaataatatcatcaatgtgctcaatgccgatgctcaaacgcactgttgagggggtgatatgctgttgtgcaagttcctcgggcgacatctgagagtgtgtggtggtataagggtgaattaccaaactctttacatctgccacgttggcaagcaacgagaaaatcttcaagctatcgcagaagcgccaagcctcttccttgccaccttttatttcgaaagtaaagatgctaccagccccattagggaagtatttttcgtagagcgcatggtcaggatgggtaggcagcgagggatgatttaccttagccactttaggatggtgcgccaagaaatctaccacctttaaagcattttgcacatgacgttctacacgcagtgaaagcgtttcaagaccttgcaacaaaataaaggcattgaacggagagattgttgcacccgtgtcgcgcaatatcacggcacgaatacgagtcacaaaagctgctttacctgccacgtcagcaaacacagcaccatgataagaagggtcgggctttgccaaagttggatacttgtcagcattagctttccaatcgaaagtacccccatctacaatcacaccgcccaaacttgaaccatgaccgccaataaactttgtagcagagtgaaccacaatgtctgccccatgctctataggacgaattaagaaaggcgtgccaaaggtgttatctacaataaaaggaatgtgatgacgatgtgccacctctgccacagcttccaagtttgttacgtctgagttaggattaccaaaggtttcggcatataccaccttggtgttaggctgaatggctgcttcgagtgcttcaatatcgttcacattcacaattgtgtgcgacacgccctgcgtttttagtgtgtgcgtaatcaagttgaacgaaccgccatacaaattgtcggcagccacaatatggtcaccattttgcacaatgttttgcaaagcatacgtcacggcagcagcaccacttgccacagctaaacctgccacaccaccttcaagggctgctacacgattctcaaacacgccctgggtggaattagtaagtctaccatatatattgcccgcatctctcaatccgaaacgatcggcagcatgctgcgaattgcgaaaaacataagaggtggtttgataaataggcacagcacgtgcatcggttgcaaggtcgggctgttcttggcctacatgtacttgaagggtctcgaagtgataattcttttcgctcataatattttagtttttgttgttattattttcgcttgcaaagttacggcgtttagtgaaaagcaccaaacaattttaaaaagtaggaaaatattactatctttgccacttataaaagaaatatcacaaagtatgaagccagaaaataaccccgttgtagaaaatatcactatcgacgatgtcgacataaaaattttgcgacagttacaagtcaacgcacgattatctataaaagagattgctgccaacgtaaaccttagcaccacgcctgtttacgaacgcatcaagcgtcttcagcgcgatggcattatcagtcaatacattgctgtgctcaatgccgaaaagctcaaccgaggctttgtggtgttctgttctgtaaagatgaacagactgagccgcgacattgcccaaaactttgcacagaccatttctgccattcctgaggttacggagtgttacaatatttcggggcaatacgattatttattaaagattcatgcccccaacatgaagtattatcaagaatttgtgcttaatgttctcggcaccatcgaacatctcggctccctcgaaagcacctttgttatggacgaaattaaacacgaatatggtgttagcatttag

SEQ ID NO: 1047 - DNA, 5735 bp, unidentified
  source 1..5735: mol_type = unassigned DNA
ctattcagtcttctccttcaggtattcataaaaagtatattgtgaacgtactttttccttttgtggatgagctgatttccaacagttacgcagattctcatctacaaaacaggctttacgcttatctgagagctggatagaaagcatatctatcagttcctgctttgcatccgggtccagtatgggggtgacggcctcgatgcgacggtacaggttacgccgcatccagtccggtgagccgaggaatagtttcggatttcctccattaccgaaataccatatacgtgcgtgttccagaaatgtatccacaatacgtgtgacacgaatgttacgactgtatgtttgccccggtatcaggcagcagatgccacggacgatcaggtctatttccacaccggcttgcgaggcttcatacagacggtttatcatggtaggatcttgcagtgcattcatctttagtatgatgcgaccggcttttccttttttcgccagctccatttcatgatcaatcagacggttcagttccggtatcaggttaaaacgggctaccagtaagcggtggaacttcagattctctttaccttgcagggtacggaacaagttgtacagatcgttcacgatgatccggttacaggtaaatagaccactgtctgcgtagagcgtagcagtcttttcattgaagttaccggtgctgatataggcataactggttagttttttcccttctgcgtcgcgccgaagaacgagggcaaccttggcatgtacctttaatttaggaatactatatatgatattaatgcccgaagctttcatcatttcagcagtggcaaggttgttttcttcgtcgaagcgggctttcagttccacaaaaacagtaacctttttgccattctgtgcggcggctatcagagtgttgattacagctgagttctcggcaacccggtattgtgttaccatgatttcacgcacggtaggttcgtgtacggcttcgtacaggaagtggatgaaatgttcgaatgaatggtaaggataatgtagtagcaaatcctttttctccacatagcggaatatggattcccgttcatcaaggcaggtcagtttcatcggttgcggcttccgtatagggtgtatattggggttgggattaggcaaatggcgtaagtcttccaggttgaggtgcttgtctcccggaaccaactcgcggcggtcgatatggaaagcgtctaccaggaaatcaagaaaatcctgcggcatggcacggtcgtacacaaagcggcatacatctcctatcttgcgtttctttactttagtctttacctgttcgatgatttcggaagtgttggcggcatcgtctatcagtatatccgcatcgcgagaaatcttgatgcaataactgctttctacatcatagcccgggaagataacatccagattagccttgatgatatcctctatgaacatcagataatagttgtttcctactttgggcaactctatgaaacgtggaactttgctgtacggctgtttcattacgaaatattgcgtacgtcccggagcaccgggtggcaatcctttctgttgaagacggacggcaagatacagacggttgtcgcgcagaaatgaaatgaccttgtccttggacaccggcacaggttgcaggaacgggaaaatctcttcccggaagaaacgacgtacgaagtcgtgatggaagggttccacatttcggctctgatagaaaatgatatgatttttcttcagggcaggaagtatcttttgctcgtagatacggatacggtcctccatttggcggtttacttcaaggtttatcgcatccaccagttcgatggtagactgtacggtttcctcgtcactttgtgcagcaccggtagctattgctttatggtcggcaacgcgtattttgtagaattcttccaggttggaagaataaatggatataaagttaatgcgttcatacagaggcaaggtgtcatcttccgcttccaacagaacacggtaattgaatgacagccaactaatgtcccgtttaaaatattgatattggttttccatactcatcaagattttcccaaatatagttacctttgcacagataaacaaaagaaagatgacaaaagttggtttattatccgatacacacggatattgggatgaaaagtatctgcaatatttcgaaacgtgtgatgaaatctggcatgccggtgacatcggttcgctggaagtggcgcagaagttggcggcattccgtcctttccgtgccgtgtatggcaacattgacgggcaagacatccgtcaggtctatccgcaaatcaatcgttttactattgacggtgccgaagtgttgataaaacatattggcggctatccgggcaattacgatccttccatacggggaagcattctggtgcgtccgcccaaacttttcattagcggacattctcatatattgaaagtgaagtatgacaaaacactggatatgctgcacatcaatccgggtgccgcaggtatttccggattccataaggtacgcacaatggtccgtttcattgttgacaatggagtgttcaaggatcttgaagtaatagagttggcaggttgagaaagctcctaaaaataaattaaattattttgtactacatttgctttgcattatctttgcggcttgaatagcaaattgagagccgtggggcttggtcctccttcttattttattctatatttgtatcaaccgaaaaaagaactgaaatatgaaaggaattattcttgccggtggtagcgccacccgcctttaccccttatcaaaggctatttccaagcagattatgccggtttatgacaagccgatgatttactatccgctttccacgcttatgttggcggggatacgcgaagtgttgattatttccactccacgtgacttacccatgtttcgcgaattgctcggtacgggtgaagagctcggaatgtccttctcttataagatacaggagaaacctaacggactggcacaggcttttgtcctgggtgccgagtttttgaacggtgaaccgggatgtcttatcctaggtgataatatgttctacggtcagggcttctctgctatgttgaagcgtgccgcttcgatagaaaaaggcgcatgtatcttcggctattatgtaaaggacccacgtgcctatggcgtggtggtattcgatgccgacggcaaagccatttcgctcgaagagaagcctgcgcaacccaaaagcaactatgccgtgcccggtctttatttctatgactctactgtcactgccaaggctgccgctttgaaaccatctgcccgtggcgaatatgaaatcaccgatcttaaccgcttgtatctggatgaaggcactctgaaagtagaaatcttcggccgtggtttcgcatggctcgatacgggtaactgcgacagtctgctggaagcaagcaactttgtggctaccatacagaaccgacaaggtttccgcgtcagctgtatcgaagaaatagcctggcgcaaaggttggatagatgccgatcagttatatcgtcttggtgaacaactcggcaaaacggaatacggtacatacctgatggaacttgccaattctcaccgttgagaaaatcataaattataaattataaatcataaatcaatgaagacttatctcgtaaccggtgcagccgggtttattggcgcgaattatatcaagcacattctggcaaagcatgatgatgtcaagcttgtgatactggatgctttgacttatgccggcaacctcggtaccatcgccaaagacattgatgatgaacgttgtatctttgtgaagggtgacatttgcgaccgtgtattggctgacgaactgtttgccaagttcaaattcgactatgtggtgaactttgccgctgagagtcatgtagaccgcagtattgaaaatccgcagcttttcctggttactaacattctgggtacgcagaacctgctggatgcagcgcgtcgtgcctgggtgacgggtaaggatgaaaatggttatcctacctggcgcaagggtgtacgctatcatcaggtttctaccgatgaagtgtatggctcattgggtgccgaaggatacttcacagagcaaactccgctttgcccgcacagtccttacagtgcttccaaaacaagtgccgatatggtggttatggcttatcatgatacgtataagatgccggtaaccattacccgctgctccaataactacggtccgtatcatttccccgaaaagttgattccgctgattatcaagaatattctggaaggaaagaagcttcctgtttatggtgacggtagcaatgtgcgcgactggttgtatgtggaagaccactgcaaagctatcgacctggtagttcgcgaaggcgtagaaggtgaagtctacaatgtaggcggtcataatgaaaagaccaacctcgaaatcgtgaagttaactattgccactatccaccgattgatgacggagaaaccggaatatcgtgaagttctgaagaagaaagtgaaggatgaagacggtcagattgatatcagctggattaatgaagacctgataaccttcgtgaaagaccgtctcggccatgaccagcgatatgccattgatccggcaaagatcactgccgctttaggctggtatcccgaaacgaaattcgaagacggtatcgtgaagactatcgagtggtatctgaataatcaggactgggtggaagaagtaaccagcggtgattatcagcactattacgagaagatgtacggaaagagatgatgttagtgattaacggttagtgattgctattataacactaagaagaatccccataaacagcatattgcgcgaagtctcgcccagtatgctgtttaattttttaccgcttcgtatctttaccatgcgtttccaggtagttacgtggaaataaaggtaggtgaaaggcatgaagatacctgcatagttccagccttgggcaaaccagaaggaaagcaatgtcgcgatgatgccgagccagaggtaaaggtatctgccgaaaggttctccgaaacggacgatgagcgtacgttttccgctgagggcatcctgatcacggtcgcgataattgttcacaactaataaggtatctattaccagtccgctgatgagcgaagcaatgatgacgtttggggtgaatgtatatgcctgcacatagtatgtgccgcctaccggaacaaagccgaagaatatcagcaccagtaagtcgccccaaccttgataggagaggacggtggtatataggaaggcaaatattacgcagaatactcccagcacaatgagttcccatcctccgtgaggcagttctccccaacttgtgtatagcaatccgagaccggaaatgcaggacaaaatgacgatgacaccgattcccactttcatggctcccggtgtaatccagccttgtgcgcaggcacgttccgggcccaggcggtcggtacggtcggtacctttcaggaagtcgaagaggtcgttgatgaagttggcggcgatctgcataccgcaggcaaagagcatacacagcagagcgggaacaattttgaattgtccgtcggcaaatgccagtgaagtacctatcatcacaggaatgatagctcccgtcaaggttttgggacgggctgcaaggagccatgcatggggggaattctgtttgatctctttcat

SEQ ID NO: 1048 - DNA, 27953 bp, unidentified
  source 1..27953: mol_type = unassigned DNA
cgacatcacacccatcacgggaggcatttcgaccgtgaaatagggcgcaagggccgccccttcctcgggcaatacggcggcggagccttcgagcagcgccggaaagagaagccgccccgtcagataggtcccgaaccccgaaaagagcgtgaaggcataggccagcgcggcggtcagggccagcagacgcccggcgttccggcccagatcggcgatgcccggagccaccagcccgagaatcagcagcggaatggcgaaacccaggaactgtccgaaaatcgcattgaaggtcagcgcaatgcgcgtcgcccagccggggaggaagaatccgcaggcgacgcccagcgcaatggccagcacgacgcgcggcaaaagtccgaatttgaatttcataaaacggtattttggtaaaattaggaattaattttgaattcctaattcttaattcttaatttcgcaccatgacagcgctatttcacgacattatcttcggcccggtgcattcgcggcggctgggcctttcgctgggagtcaacctgctcccgctctcctcgaaactctgctcgttcgactgcatctactgcgagtgcggctggaatgccgagcacccgggcggacgacgcttcaacagccgcgaggacgtgcgcacgcagctcgaagccaccctgcggcgcatggtggccgactccacgccgcccgacgtgatcaccttcgccggcaacggcgaaccgaccatgcaccccgatttcgaagccgtcatcggcgacacgatcgccctgcgcgacgcgctgtgccccgcggcgaaggtctcggtgctctccaacgccacgcagatccaccgcgacagcgtccgccgcgccctgctgcgcgtggacaacaacatcctcaaactcgattcggcgttcgacgcgacggtgcggcggatgaacaacccgcaaagcgcgtcctacacggtgcggggcatcgtcgaagcgatgaaacgcttcgacggccgcatgattctgcaaacgatgttcctgcgcggggagtgcggcggacagcccgtcgacaacaccaccgaagaggaagtctcggcctggctccggctcgtcgccgaaatccgcccgcagcaggtgatggtctactcgctcgaccgcgacaccccctgcccgacgctcgaaaaagtcaccaaagaggagttgcaggccatcgccgcgcgcgtcgaagcgctcggcatcccctgctccgcagcttaacgcccgaacgccatgcaactgctcctctcctgcgccaagacgatgacggagcgcagttccgtcccgacgccccgcacgacccggcccgcctaccgcagcgaggcctctgaactggccgccgggctggcgacgctcccgaccgacgaactggcccggctcctgcgcgtcaaccgccgtatcgccgccgaaaaccgcctgcgctacggccgcttccacggcgacgacgacgcggcgatcccagcccttacggcctacacgggaatcgtcttcaaacgcatcgacccggcgagtttcaccgacgccgatttcgaatacgcccaacggcacctcaacatcacctcgttcctctacggactgctccgcccgctggacgccatccgcacctaccggctcgaaggcgacgccgtactgcccggccgcggcgacgaaacgatgttttcctactggcaaagccggctgaccgacgacctgctgggccggattcacgccgacgacggcatcctggtcaacctggcgagcggagagatgaagcggctgttcgactggaaacgcgtctgccgcgaagcgcgggtcatcacgcccgaattccgcgtccgcgagggcgaccggctgaaaaccgtcgtggtctatacgaaaatgtgccgcggagagatgacgcggcatatcctgaaaaaccgcatcgccgatcccgcgacgctccggtcgttcgaatgggaaggcttccgcctggacccggccctctcgaaaggcgacgactgggtgttcacgctctgacaaatgcctttacggcgaagacggcggagttccccgcccctgatccacgaacaacagttacccggtgcggcagccccgcgcttcggccggccgcaggtcgaacacggcgacaggcatgcggtcggtgcggtccgaagccgccgcgacagccaccacacccggaatcaaaagggcggcagcaagcaataaaatggcgattttcacttcccggtcgttttgggaagcaatctcgcagaatttgtgccgaaaaaatgcgttgcggaaaatttatgcgcgggtatcgagcagggcgcgcagaatgccctcctcgtcgtagccgcacagggcgtacaactgcccgggcgtgccgtgttcgacccactcgtcgccgatgccgagccgctgcacccgcacgtcgtagccgcggccgttgaagaacgccgcgacggcttcgccgacgcctccgcgcagcgaaccgtcctcgaccgtgaccacacggcggaacttacgccccacttcgtccagcaacgcttcatccagcggtttcacgaaccgcaggtcgtaatgcgcgacgctcacgccttccgcggcagcgcgtccggcggcccgtgcggcggcgttgccgacggtccccacggtcaacagcgccacgtctgcgccctcgcgcaggcggcggccacgtccgacgggcagcgtctcgaacttctcgccgcgccacggcaggccctcgccgtgcccccgcggatagcggatcataaagggatgtcccgatccgagggccgtatacatcatgttgcgcagttcgggttcgttcatcggcgcggcgatcgtcagtcccggcacggcgccgaaagcggccatgtcgaaaaccccgtggtgcgtcaccccgtcctcgcccaccaggccgccccggtcgagacacatcaccaccggaagatcctgaatcgcaacgtcgtggatcacattgtcgtaggcccgctgcatgaaactcgaataaatgttgcagaagggaaccatgcctgccgcggccagtccggccgaaaaggtcacggcatgcccttcggcgatgcccacgtcgaaacagcggccgggcatctcgcgcagcagaatgttcatcgaacagcccgacggcatggcgggcgtgacgcccacgacgcgctcgtcgcggcgcgccagttccagcagggtttcgccgaacacgtcctgataacgcgctgcgccgcccggagccgaaatccgctcgcccgtatcgggattgaaacgccccggggcgtgccaggcgggctggtcgtgctcggccggcaggtagcccttgcccttgaccgtcatcacgtgcagcagtttaggcccctcgatgtcgcgcaacgcccgaagcgtccgcaccaactccttgaggttgtgaccgtccaccggaccgaaataacggaaattgagactttcgaaaaaattgctcttgttcagcagcccctgcttcacggcgttgcccgccttctggcagagccgcagcagccgcggcgtatgcgacatcagcccccacagccgttgtttgaaacggttgtagtgcaccgaagtcgagattttcagcaggtagtttttcagcgctcccgtggcctggtcgatggccatgttgttgtcgttgagaatcaccagcaggttggtgcgcttcgaggccccggcgttgttcagcccctcgaacgcaagccctccggtcatcgagccgtcgccgatcacggccacgacctgccgcttctcgccgcgcagttcggcggccttggccatgccgaacgccgcggagatcgacaccgaagcgtgcccgcccccgaaagaatcgtattcactctcggacatgcgcggaaaaccgctgatgccgttcagctgccgtttggttttaaacgcctcgcggcgtcccgtgatgatcttgtgggcgtaggtctgatggccgacgtcccagacgatccggtcctccggggtgtcgaagacgtaatgcagggccgcagccagttccacggccccgaggctcgatgccaggtggcccggattgaccgcacactcgtcgatgatgtaacgcctcagctcgtcgcagtaggcggacagctcctccggcgggagttttttcaactcccgcggtgaggaaatcgtatcgagcagtttatattcttccgacgacataaggattgcaaagatagaaaaaagaacggacgcctccaaaaccgaatcgcgcgcggcccggcaaaacgctccgaccggtaaaagtgtcgttacgacaccaaagataaggaatatatatgaattttttcgaaaaaatacctatcttcgcactacgataaaacgcgacccacgatgaaatacaagcgaatactcctgaaattgagcggcgaatcgctgcaaggcggacagaaatacgggctttcccccgagacgctgcaatcctacgccgagcagatcaaagccgccgcagcaacgggcgtccagatcggcatcgtcatcggcggcggcaacatcttccgcggcctcacgggcgccaaaaagggcttcgaccgcgtgaagggcgaccagatgggcatgctcgccacgatcatcaactcgctggcgctccagtcggcgctcgaagacaacggcgtccgatgcaaggtgctcacctcgatccgcatggaacccatcggcgaatactactccaaagcccgtgccatcgaatacctcgaagcgggctacgtggtgatcgtcggaggcggcacgtcgaacccctacttcacgaccgactcggcgtcggcgctgcgcggcatcgagatcgaggccgacgtgatgctgaagggcacccgcgtggacggcgtctacacggccgacccggagaaggaccccgcagcgacgaaattcgacgaaatcacgttcgaggaggtcctcgaccgccgtctgaaggtcatggacctcacggccttcacgctctgccgcgagaacggtctccggatcatcgtcttcgacatggacaccgcgggcaacctcggcaaggtccttgccggggagaagatcggaacgctggtaaaactgtaagactatggcaaccaagaaaagcaacaaatcgctgtgggtgatgctggcgctgatcgccgcgatcatcgccgtcatcctgctgctgccctcgtgcggcaaccgcaacgccaagaagggcgccgagacggacgccgaatcgacaacgctcgtaaaggccggagacacggctccggacttcacggtcgagatggtcgacggcagctccgtgacgctcggcgacctgaagggcaaagtcgtgctgctcaacttctgggccacgtggtgtccgccctgccggcaggagctgacccgcgtgcagacggacatcatcgaccgcttcgccggcaaggagttcgtcttcctgcccgtatcgcgaggcgagaaacgcgaggccgtggaggcgttccgcgaaaagaccggctacgccttcccgatgggactcgaccccgcacgcaccgtctacgaccgctacgcctcgaactacatcccgcggaacttcgtgatcgaccgcaagggcaaggtcgtgctggccacggtgggctacgacgaacatgaattcgaggagctgatccgcaccatcgaaaaaacactcggaaattaaaccccaacacttatggataccaagacgattctcaacgaagctacgggccgcatgcagaaggccatcgaccacctcgaagaggaacttttgaacgttcgcgccggcaaggcgtcgcccaacgccctgaacggcgtgatggtcgactatttcggctcgcaggttcccgtttcgggcgctgccagcgtcaccgtacccgacgccaggaccatcctgatccagccgtgggacaagaacatgctgcgcccgatcgagaaggccatcatcgactcgaacatcggcctgacgccctcgaacaacggcgagcagatccgcctgacgattccgccccttacggaggagcgccgcaaagagctggtgaagcaggtgcgcgccgaagcggagaccgcccgcatcagcctgcgcaacgcccgccgcgacgcggtggaagccttcaagaaggcccagaaggagggcatgcccgaagacgaatcgaaggacggcgaaacgcagtcgcaaaaactgctcgaaaagttctccaagacgctggacgaagcgctttcgaagaaggagaaggagattatgacggtctgacctgccggcttccgcaagacgaaaagcccggctggaaatttattccagccgggctttttccatccgtttgtccggcaaaccccgcacgcacgggcgcggcaaccccgcatcgccccggcaaaaccgacagcgaccgacaaaaccgacagcgaccggcgcagacggatcgcctccgatcgcaaacccgtccgcacacatccaccgtcatccgccgcccatccaccgtcatctgccgcccatctgccgcccatccgccggaccgtgcctgttccacaacataaaaaatcccggtctccaattgcggaaaccgggattcatctatttgcagcggctcaagccgcagggaattactttaccttcgggcctgcggttacgagcttcttgccctcctcgttgcccgtgaacttcacgaagttcttcacgaagcggttggccagatcctctgccttaacctcccaatccttggcgctcttgtaggtgtcgcgcggatcgaggatagcggggtctacgcccggcagggcggtcggaaccacgaaatcgaagataggcatggtcttggtcggagccttgtcgatcgaaccgtcgaggatcgcgtcgatgatgccgcgcgtgtccttgatcgagatacgcttgccggttccgttccagcccgtgttcacgaggtaggccttggcgcccgacttctgcatcttcttcaccagctcctcgccgtacttggtggggtgcagcgacaggaaggctgcgccgaagcaggccgagaaggtcggcgtaggctcggtgatgccgcgctccgtgcctgcgagcttggcggtgaagcccgagaggaagtagtacttcgtctgctcgggggtcaggatcgaaaccgggggcagcacgccgaatgcgtcggccgagaggaagatgaccttcttggcggccggagccttcgatacgggcttcacgatgttctcgatgtggaagatcgggtacgatacgcgggtgttctccgtaaccgacttgtcggcgtagtcgatcttgcccttcttgtccaccgtcacgttctccagcagcgcgttgcggcggatggcgttccagatgtcaggctcgttctcctgcgagaggttgatcaccttggcgtagcagccgccctcgaagttgaatacgccgtcgtcgtcccagccgtgctcgtcgtcgccgatgagctgacgcttcgggtcggtcgaaagcgtggtcttgccggttcccgacaggccgaagaagatagcggtctcgcccttctcgttggtgttggccgagcagtgcatcgaagccatgcccttcagcggaagcaggtagttcatgtaggagaacatgcccttcttcatctcgccgccgtaccaggtgttgatgatcacctgcatcttctcggtgaggttgaagacaacggccgtctccgagttcagacccagctccttgtagttcttcaccttggccttcgaagcgttgagcaccacgaagtcgggctcgccgtaattctccagctcctcgtccgtcggacgaatgaacatgttcttcacgaagtgagcctgccaggccacctccatgatgaagcggatcttcaggcgcgagttctcgttggcgccgcagaacgtgtccacaacgaagagtttcttgcccgaaagctcctcgacggcgattttcttcagctccttccaggccttcttcgtaaccggcttgttgtcgttcttatattcgtcggaagtccaccagatcgtgtccttggtggtctcgtccatcacgaaaaacttgtccttgggcgaacggccggtgtaaacgccggtcatcacgttcacggcgccggtctcggtcagctgacctttctcatagccgcgcaggccttttttcgtctcctcacggaacagttcgtcgtaggagggattgtacacgatctcggtcacgcccgtgatcccgtactttttcagatccattttgtccataattgcaatttatttgattaaaatcctcttttcaacctgacgtttcagtccgcaggtccggacttcaacggcacaaaggtagaaaaactttcataattgtgaaaaaaataacagccgaaattacaaaaaatatttattattttttccgatagtgctatacgcctcattgatagcgtcgtacaacgccgccgaaaagcccttcgcaaacccttgcgaggatcgcccggcaaaaattttgccgcaatttatccgcgccggacgggacgcttcggttttcttccgccggtttttatcacctttgggggagcgcggattttccgcccggaaacagccctcccccggaacacgtttcccgccgacccgcaaccgccggccctccatgaaaacacggccggaaacgactccgacgctctgcccgccgccccgtgcgttccgggcgacagacggggagcatcgcgctgaaaatgaagaatcgccgccccgacttcccggcctcccgcgggcggaggcggggccgcagccggaaaaattttccgaaccggatgcgattccgttttgcagtcatccgtctttttcgtatctttggataacatggccggactttatttccacatacccttctgcaagcgcgtctgcgcctactgcgacttctacaaaagcgtcgacctgcgccgcatggaccctcttctggagtccatgcaccgcgaactggacgcccggcgggaatatctgggcggcgagccggtgcgcacccgctacttcggcggcggcaccccctcgctgtgcgccccggaggccatcgcggggctgctggaccatgccgcaacgctgttcgattgcactgcggcggaggagaccacgctcgaagccaatcccgacgacctcacccccgcctacctcgccgcgctgcgccgcgcgggcgtcaaccgcctgtcggtcggcatccagtcgttcgacgacgcgtgtctcaagctgatgaaccgccgccacaacgctgcgcaagccgtcgaggccgtgcggagcgcgcagcgcgaaggttatgaaaacatcaccgtcgacctgattttcggcgtcccgggtttcgggaacgacacgctgcgccgctcgctcgacagcgccctcgcgctgggcgtgcagcacatttcggcataccatttgaccgtcgaacccggtacggccttcggacggcgggccgcccgcggacagttcgccccggtggacgaagccaccagcgaaacggaatacgccctcgtgcacgaaacgctgaccggagcggggttcgagcactacgaggtttcgaatttcgccctgccgggcttccgcgcccgccacaacgcggcctactggcacggcgtgaagtacctcggcatcggtcccgcagcccattcgttcgacggccgggaacgccattggaacgtcgcctcggtgacggagtacatcggcggcgcgcccgccgaagcggaaaccctcaccgaccgcgaccgcttcaacgaatacgtgatgacccggctgcgcacggccgaaggcatcgacctgcgggaggcggaaagactgttcggcaaggagcgcgcggcacgggtcctgcgcgatgcggaaccgtggctgaagagccgcacgctcgttctcgcagcgggacggatggccgtcccgccggctcggatgctggtctccgacgcggtgatcgaaacgtttttcgaaacggaaccggacaccgcaaccaagtgaaactgaaatgttaagttattattaaatatttttagaaacccccgactccgattgtttaatataaatataagtgttacctttgtggccgaattcttcttcggttcgtcacgaaaattacaaattagcataagtatatgagcaatgccaaacactcccccgatttgctgttcgaagtaagttgggaagtatgcaacaaggtcggcggcatccacaccgtcatttcgaccaaagcgcagaccgtcacccgcaaattcgcagaccgctacgtcctgctgggtcccgacctctcgcacgagggcgtcaacccggagttcgaggaggaccccaatctgctgaaggcctggcgccagagcctctacaacgaaggcatccgcgtccgcgtcggccgctggaaaatcaagggcgagccgacggtggtgctggtcgatttctcgtcgctgatcccccgcaaggacgaaatactcaaaagcctctgggaatcgtaccacgtggactcgatctcgggccagtgggactacatcgagccggtgctgttcggatgggccgcaggcgtcgtgatcgcctcctacgtcgagaccttcggcacgccgaccgagaaggctgtcgcgcatttccacgagtggatgaccgccgcgggcgggctgtacctgcgcaaacacgccccctacatcgccacggtgttcaccacccacgccacggtcatgggccgctgcatcgccggtaaccgcctgccgctctacaacgacctcccgaaattcaacgccgacgagctggcgcgccagttcaacgtcacggccaaacactcgatcgagaagatggccgccgcctaccacgacgcattcctgacggtgagcgacatcacggccaacgaatgcaaatacctgctggggcgcgaaccggacggcgtgacgcccaacggcttcgagaacgacttcgtatgggccggcgaggagtactacgccaaacgcgacgaagcccgccgggcgatgatctcggtggccgaggcctgcctgggcgaaaaattcacgggcgacccgctgatcgtcggaaccagcggccgctacgaattccgcaacaagggcatcgacgtcttcatcgagtcgctcaagcagttcgccgcctcggaccgtctccggcgcgaggtgctggcctacatcaccgtgccggccggcaaccgcggcccgcgcctcgatttgcaggctcatctggccgacccgtcgaagcccatcgacgcaggccagtacagacattcgacccactaccttgaaaacgcgacgtgggaccccatcgtgaacgcgctgaagaacagcaacctcaccgatcccggatcgaaggtgaaggtgatcttcgtccccacgtacctcaacaaggccgacggcatcttccacaaggattactacgaactgctcgtgggcatggacatcacggttttcccctcctactacgagccgtggggctacaccccgctggagtcggtggccttctccatcccgacggtcaccacgacgctggccgggttcggcagctgggtcgacaagcagcgcgagcacgccggcgtggaggtcatccgccgcgacgactacaacgacaaggaggtcgaggcgaagatcgccgatacgctgctgcgtttcagcctgctggacgaaaaacacgtcaacgaacagcacacctcggcctatgaaatctcgctgacggcgctctgggagcacctcttcgcggcctacgaacaggcctactccgaggcggtcgagagttcgatcgtccgcaccaaccgcgccgtgctcgacggcggtacgaaaaccgagcagatcaacttcgtgcgccagcagcttttcgtcgagaaacccgtctggaaccgcatgatggtcgacaagacgctgcccaagcggctgcacgccctcgaagagctttcgcgcaacctctggtggtgctggaaccccggcgcccgcgacctgttcgaaggcatcgaccccgcgctgtgggccgaatcggaccgcaacccgatcgccttcctcgacaagatgagcgtcgagcggatgaaggaactggagaaagacacgaacttcctggcgcagctcgacgccgtgcacacgcagttccgcgactacatgaacgagaagcccgatccgaaggcgacgacggtttcgtacttctcgatggaatacggcctgcactcgtcgctgaagatctactcgggcggcctgggcatcctggccggcgactacctgaaggaggcttcggacaagaacgttccgatggccgccgtgggccttctctaccgctacggctacttcacccaacgcctttcggcgcagggtgcgcaggaggccacctatgaggcgcagaatttctacaaactgccgatctcgcccgtgcgcgacgaggccggaggctgggtgacggtcaccatcgccttcccgggccgcacgctctcggcgcgcgtctggaagtgccaggtgggccgcacggacctctacctgctcgacgccgacatcgaggacaacctcgaagaggaccgccagatcacccactacctctacggaggcgattgggagaaccgcctcaagcaggagatcctgctgggcatcggcggcatccgcgcgctgcgtcagctgggcatcaagcacgacgtgttccactgcaacgagggccacgccgcattcatcggcgtcgagcgcatccgcgacctggtgaaccaccgcaagctctcgttctccgaggcgctggaggtggtgcgctcgtcgtcgctcttcacgacgcacacccccgtgcccgcaggccacgacgcattccccgagtcgatgatccgccagtacatgtcgcactatcccgacgtgctgggcatcacctgggagcagtatatcaacctgggcaagaccaatcccaacgaccccaacgagaagttctcgatgtcggtgctggcctgcaacctctcgcaggaggtcaacggcgtttcgtggctccacggcgaggtctcgaaggagatcctgggcaacatgtggccgggctacttcaagaacgagctgcacatcggctacgtcaccaacggcgtgcacttcccgacgtggatcgcctcgtcgctgcgccgcctctacgcccgttacttcggcgacggattcgaaggccacgtctatgacatcccggcctggcagaaggtccacgacatccccgacgcggagctgtgggaggagcgcatgaagctcaagaacaagctcatcaagcatatccgccggcgttacagcgacccccggcaggtgcgcctcgactcgccgcgccagatgcttcaggtcatcgagggcatcaagcccgacgtgctgaccatcggtttcgcacgccgcttcgccacctacaagcgcgcctacctgctgttcacgaacctcgaccgtctggcggcgatcgtcaacaacaaggagcgtcccgtgcagttcatcttcgcgggcaaggcgcaccccaacgacaagccgggacaggacctgatccggcgcatcgtcgaggtggccgccatgccgcagttcgtgggcaagatcctcttcctgcaaaactacgacatggaactcgcccgccgcatggtgcagggtgtcgacgtatggctgaacacgcccacgcggccgctcgaagcctcgggcacctcgggcgagaagtgcgtgatgaacggcgtgctgcaattctccgtgctcgacggctggtgggtcgagggctacaaggagggcgccggatggatgcttccgatggagcgcaccttcgccgaccagcactaccaggacgaactcgacgccgagatgatctacaacaccatcgaggagcagatcgctccgaaatactacgcccgcgacacggacggcatcccgcacgagtgggtttcgtcggtgaagaggtgcgtggcggacatcgcctcgaacttcacgaccaaccgcatgctgaccgactacgagaaccggttctacgacaagctcgccgcgcgcaaacgcgagatgagcgccgaggcctaccgcatggcccgcgagatcgcggcctggaagcgcaaggtctccgccgcatgggaccaggtgcgcatcgtcgacgtgcagcgcgtgaagatcgacaaggaggccgtctgcgtcggcgagaagtaccagttcgccgtgacgctcgacatcgccaacctccgacccgaggacatcggcgtggagatggtcgtcgcgcggcagatcgtcggcggacagtccgtcaacgtcacccgcacgatccagctggaacgcacgaaggccgacggaagccgggtcacctactcgctcgactacacgcccgacgaagccggcacgttcgacgtggcgctgcgcatctacccctcgaacccgctcctgccccaccgcatggacttcgcgctggtgaagtgggcctaatgccaatagaaggtattaaatttgaataattaacaataacaagttgtaactgttcgaaaatttcaatatctttaaaggacgaaccgtattttttagcgatatgtcagcacttactttcgacaaaagcgaattgggcaatctggagtactcgctccagcgcgaaatgctcgcaacggaccgtatcggcggctatatgagcacgaccatcgtctgctgcaacacccgccgttaccacggcctgatggtggccccgatcgacgacagcgaccggacctacgtcctgttgtcggcgctcgacgaaacgatcatccagcacgaccagacgttcaacctggcgctgcaccgtttccaggggacctacgagccgcgcggccacaagtacatcaccgatttcgagtacactccgacccccacgatcacctatcgcgtaggcggcgtgatcctcaagaaggagatgctctggattcacaagcgcacgcaactgatgatccgctacacgctcgtcgacgcccattcggaaacgcgcctccggctgcgcccgttcctcgccttccgcgacaagcatgcgctgacgcatgccaacatggaggccgacgggcactcctatccggccgtcaacggcgtgaaatgccgcctctacggttcgtttccgtggctgtatctccagaccagcaaacccggcgcggagttcgtgcccgcgcccgactggtactacaatttcgaataccggcaggacatcgcccgcggctacgacggctacgaggacctgatgaccacgggctatttcgaaaccgagctgaagaagggcgagagcatcatcttctcggcgtcgctcgacgaaatgggctcgacgaaaaccatcgaggaggtcttcggcggctccatcgcgcgccgcacgcacaagatcgacttcatcagctgcctcgaacactcggcgcggcagttcgtgatccgccgcccgggcaaccggacggaggtggtctcgggctatccgtggcacggggtttcgggccgccagaccttcgtctcgctgccgggcatcaccctgtggcaaaaccacaaggaggactgcatcgacgccctcgacacgcaggtgcgcggcatgcaggacggcatgttcgccgggaacgcttcggcggcagcggccgcggacgccccgctgtggttcttctggacccttcagcggctcgaagcgcagatcggcgcgaaaaagatctggaaacactacggcgaggccatgaaacaggtgctcgagtcgtacaaacggggcgtcgcgggccatgtcgtgctcaacgacaacgggctggtgtgggcctcgtccgacgaggttcccctcacgtggatgaactccgtgatcgacggccgttccgtcaccccgcgcaacggctatcaggtggaggtcaacgccctgtggtacaacgccgtccgctacgctctccggctggccggcgaggcgggcgacacgaagttcgtgaaggcgtgggagaaactgcccgaacgcaccgcggcgtcgttcaacgaactcttccgcctgcccgaaggctacctggccgactgcgtgggctgcgacggcgccaacacggacatccggccgaacatgatcgtcgcctgcgggctgccctacaagatgctcgacgagcagacccagctggaggtgatccgcacggtgcggcagcacctcctcacgccgaagggcctgcgctcgctctcgccccgcaacccgctttacaagggttcgcaggagggtacgcccgccgaacgcgactttgcgggcaagaacgggtcggtatggccgtggctgctgtcgttctacgtcagcgcctgcttcgacatcgacggcgacgcctttctgccgcaggccgaggagattctcgccggattcgaggaggacatccagacctacggcatcggttcgatcggcgaactgttcgacgccgatcctccgttcgcgccgcgcggagccatttcgcaggcgtggagcgtcgcggccgtgctggacatctacggcatgatcctcgcacgcaaaccggaagagacacccggaaagtcggaaaaacccataaaaaaagcgaatccgaagactgcgaaggcagcaaaaaacgttggtaaggaagaggttgccgcgaaggccgtgaaacccgcggcaaaggccgccgcgaagaggacggccggccaaaagacaacgaagaagaaaacgacggaaaaaacgaaataacgaatacggcccgggcgcacaatgtgaaagagagttgtgccggatggcgaggctccttccgaggggaggggttcgaagcggaatctgacttacggacacggccgggcgccgtgaagggatgcggagaggaagcgcacaggcggcaaaatgaaacaacaaaaagataaggtatgagagttttaatgttcggatgggagtttccgccccacattgcaggcgggctgggaacggcctgctacggaatgacccgcggactggcgcgcaacggcgtagacgtcactttcatcgtcccgcacgcctacggcgacgaggaccagcgtttcacgcacgtcgtgaacgccagcgacgtggaggccttgtacggttcgacgggcagcggcgcggacgacattctggagaagatgtcgttcatccacatcgactcgaacatggtcccctatatctcccccgaggagtacgagtcctaccacgagcagtacgtcaagtcggggcggaagacctggtcgacgaccgatgcctggaaacagcgctacaccttctcgggcaagtacggcgccaacctcatggaggaggtggcgcgctacgccgtggtcgccgcgcaggtggccagggacctcgaaggacagttcgacgtgatccacgcccacgactggctcacctactacgcgggcatcgccgccaaacgcgtctccgggaagccgctggtggtgcacatgcacgccacggagtacgaccgctcgggcgagaacgtcaacacgcaggtctacgccatcgagcgggccggcatgcacgccgccgaccgcgtgatcgccgtttcgaacctcacgcgcaacatcgtcatcaaccgctacggcgttcccgccgaaaagatcgtcacggtgcacaacgccgtgcgcttcgcccagaacagcggcaaggttcccgagcggggcgtcaccgacaaggtcgtgaccttcctgggacgcatcacctaccagaaaggccccgactacttcgtcgaggcggccgccaaggtcctcaagcgggttcccgacgtgcggttcgtgatggccggctcgggcgacatgatgaaccacgtcatccgccgcgtggcgcggctcggcatcgccgaccgtttccacttcacggggttcctccgcggggaggacgtgcacaagatgttccagctgtcggacgtctacgtgatgccctccgtctcggagcctttcggcatctcgccgctggaggcgatgcgctcgaacgtcccggtgatcatctccaagcagagcggcgtggccgaagtgctggactacgccgtgaaggtggactactgggacgtggacgccctggccgacgccatctacggactgatcaaataccccgccctgtcgggcatgttcgcctcgaagggtctcgaagaggtgaccaacctcaagtggaacgacgccgcggcgaagatcaaatcggtgtacgaagccgtgatcgaagagaataagaaacaattaaaatagcaacccgcatgaaaaccgtctgtctttattttcaggtgcatcagccctggcgtctgaagaaataccgcttcttcaacatgggcaaggaccacaactacctggacgacctcatgaaccgttcgatcatgcagaaggtcgcccgccagtgctacctgccgatgaacgccctgctgctcaagctcatcagggagaacaagggcaagttccgctgttcgttctcgatcacgggcatcgccatcgaacagttccgcgccttcgcccccgaagtgctcgactcgttcaaggagcttgccgcgacgggctgcgtggagttcctcgccgagacctactcccactcgctggcatcgctggcatcgaaggaggatttcacggagcaggtcaaactgcacacgaaccttatcaaaaaggagttcggggtgaaacccaccgctttccgcaacacggagctgatctattcggacgagatcggcgcgatggtcgccggcatgggcttccgcacgatgctggccgaaggagccaagcacgtgctggggtggaaatcgcccaactacgtctacgccaacgccatcgaccagaaactgcgcctgctgctgcgcaactacaaactctcggacgacatcgctttccgcttctcgaacaagagctgggaccagtggcccctgacagccgacaagtacgtgcagtggctcgcctcggacgagacgccaggcgaggtcatcaacctgttcatggattacgagaccttcggcgagcatcagaacgccgacacgggcatcttcgaattcatgcgcgcgctgcccaaggcgatcctcgccaggaagaacggcctggagttcgccacggtgaccgaggccgcgaagaagcaccagcccgtcgccgtgctccactgtccgcacgtgatgtcgtgggccgacgaggagcgcgacgtgacggcctggctgggcaacgaattgcagaacgaggctttctcgaagctctatgcccagaaggagaaggtcgcggcgctgaaaaatcccgatttcgattatgtctggagtttcatgcagacctccgaccatttctactacatggccaccaagtggctgtcggacggcgacgtgcactcctacttcaacccctacgattcggcctacgacgccttcatcaactacatgaacgtcctctcggacttcatcatcgagctggacaaggctgtggctgccaaggcggcgaaaaaacgggcctgacgccccgacggacaaccggaaaacgggtctctgcggaggcccgtttttttatttcgcaaaacggcgcgcggcatgtacaacggatgctttatttgcttacatttggcgcatcgaaaacacacatgcatgaatagcgtcttcatcctgctgaacagcctcaacgactggaaaccctactgcgaaaccgattcgctgatgaccgtcaccgactacctcgaacaccgttacggggagcggacgcccaagctggtcatcaacctgagcgacgaatacggctacaactccgaaggctactactgctcgctgctggcccaggcccggggacaccgggtgctgccgggcgtcgagacgctcaacaagctcgaatcgggcgccggaatccgcatgaaccgcaacctgcaacagctctgccaacagtggatcgaacgcaaccgcatcaccgacgaaacctggcagctgaacatctacttcggaacctgccgcgagaagggtctggagaagatcgcgcggttcatcttcgaccactacccctgcccgatcctgcgcgtgacgatgaacaaccacgcccgcaaccagatcgagtcggtgcaggccctttcgctgcgccagctctcggagagcgggcaggacgatttcgccaatgcgctcgactgcttcaacaagaaggtatggcgctcgccgcgctcggccaaacccgcacgctacaacctcgccatcctctacgacccggacgaaaaattcccgcccagcgacaaggacgccctcaacaaattcctcgaagtggcccggaaaatgaacatccacgcggagctgatcaccgaggaggaagccacgcggctgatggagttcgacgcgctgttcatccgcgccaccacagcgctcaaccactacaccttccgcctcgcgcagcgtgccgcgatgaacgacatcgccgtgatcgacgatcccgagtcgatcatccgctgcacgaacaaggtctacctctgcgagcttttcgaaaaggcccgcatcccggccccggcctcgcagctgctgttccgcagcaacgaatactccttcggcgagatcagcgaacgcctcggcgcgcctttcatcctcaagattcccgacggatcgttctcggtgggcatgcacaaggtggccagcgacgaagagctgcgcgcggcgctcgacgagatgttccgccactcgtccgtgctgctggcccaagagttcatccccacggagttcgactggcggatcggcctcctggacggcgaaccgttgttcgcctgcaaatactacatggccaagggccactggcagatctacaaccacgcccacgacgacacgggccgcaacctgtgcggcgcatgggagaccatacccatctacaaggcgccgcagaaagtgctcgacaccgccgtaaaggccgcggcgctgatcggcaagggattgtacggcgtggacctgaaactcatcaacggcagggccgtggtgatcgagatcaacgacaacccgtcgatcgaccacgaagtcgaggacgccgtgctgggcgacgaactttactaccgcatcctcaaccacttcgtccactgcctcaaccgcctccacgcgcaatgaaccccgcagtcggaatacgtcccgcgacggccggggacctcgacgccgtggagtgcgtcgagcggcgttcattcccggaaggggaggccttcacgcggcggcagctgcgctacctgctgacgcatgcgcagggagcgtcctacgccgccacccgcgacggtgcggtcgtcggctacatttcattgctgatgcggcgcacggcgcaaaacctccgcatctactccgtggcggtggaccccgcggcgcgcggctgcggagccggacaggcgttgctggacgccgctatcgcgctggcccggcggctcgggctgcgtgaagtgacgctcgaagtgcgcaccgacaacgactctgccataaggctttacgcccgcaacggcttccgctccggaaaactgctgcgcggctactaccccgacggcacagacgcccggcggatgtcgttcaggacctcctgcggccgtccagaatagcctccttgttcgcctcggcccattccaccagtccgaaaatatgcggcaggagactcccgccccgctccgtaagacggtattccacccgcggcggaacctcggcgtagacttcgcggcggatcattccgtcggtttcgagcatccgcagcgtgacggtcagcatgcggtgcgaaatgtcgcccagcgtgcggtggatctcgctgaaacgcatcacgccgttggcattcaacgtcagcaacaccagcatcgaccacttgtcccccaggcggcacagcacgtcccggaccgggcaggaacccgtgggcgtgaaatttttcaattttttctccggctccatccgtttggtatccagcaatggttacacgcatgtaaccatctcatttttaagtgcgttattgtttttacgggctgtctgtcctatctttgtacgcaaagataacaaacttaccgaaaataaccattgtaccactaaaagaattgcaatcatggcaaaaaaagcagctgtcgtggccgtgaatcccgtgaacgggatgggcctgttccagtatctggaaacgtttttcgaaaacaagattccctgcaccgtgttcgccgtggccgaaagccgcgagatccgcaccaactcgggcgtcggtctgacggccgacgacgtgatcgccaacctcaagggtcacgaagaggagtacgacgctctggtgttcgcctgcggcgacgccgtgccggtcttcgcgcagcatgccggcgagccctggaacagggacctgatggaggtgctgaaaaccttcggggagacgggcaaaccgatgatcggccactgcgccgcagggatgatgttcggattcgcaggcgtcgccgccggacggcgcgtcgccgtgcacccgatggccaaggccgccgtgacgggccccgtggcgacggacgccccgttcgaaatcgacggcaatttcttcaccgcgcaggaggagcacgccatcccggcgatgatcggccgcgtggtcgaagcgctgaaatagcggcgtgtcatagcggacacccgcgagccgccacctgaaaaacaaggttcggttttttgattttagaggagcggattttatcctgacacagttcgacccggacgggacatacaaacgtattttccgttcgggccggacaaggcagggcggaagaggccctgtaaaatcgaaaactatcctttccgcttgtaacgcgagggcgaggttccggtgtgctgtttgaaatacttgccgaagaaggactgcgtcgagaaattgaggtggtaggcgatctcctgaatgctcattccggaatacttgagcagggccttggcttcgaggatcaccgactcgtcgatccaccgcgcggcggtcttgccgctcacctccttcaccacggacgagaggtatttgggcgtgatattgagctgcttggcgtagaagctcacgttgcgctccctcttgttgtactgttgcagcagcgacatgaactcgtcgaacagcacctcgcagcgcccctgcttcatctcgccgggctgctcgcgctggttgatctcggtgatgatgtagaacgccgtggtgaagagcgtgcggatgatctcgtggcggtaacgctccttgtcgctgcgcagcatggtcttgatgagctggaacagctggcggatttcgtccacgtcctgcggcgtgacctccagcacgggggccttgccgaagcgcatgtagaccggcagcgaggtcgagaggtcgatctggatctcgttgacgaacgatttcgagaaggccagcaggtaggccgcggcgttcgacgaacacttgattgtgcggatgatcgaatcggggttgaaaaagacgatcgtgttgggcttgatgctgtaattctgcatgtcgatcgacacggtggcctcgcccgtcatcataatgatggccgtaaagccgtcgatcgaggtcggataatcggccgtggtgttcttgtcggccgtgagtgcggaaatcaccagatcgtccgaaaggtaaaagacgtcgctcatctccttcttgatccgggagatggagaccttgcgcaaactttcgcgtcctccgctgcgcgccgttttgccgttatccgccatatcgtcgtaatttttccggcaaaagtatgaattttcgcagaatcaaacaagccggaccgtaaaaatcaggaattgcccgagacctgtttggcgcacatcacgcgcaggccgcccgccagacactcgatgtgcagcgggaattcggcgcccttctgcccgtcgacgtccgtgggttcgttgaccgacgaacggatgtcgatccgccgcgcccggaggtggcggacgatcttcgggctgccgcccgccagatagcggcacatggccagcgtcgaacgaaagaaattcttcttctccagcaggatgcagtcgaacagcccgtccttgatcgacgaccgccgcgccaggtggaaaccgcccgccgtctcgccgttgaagatcagcaccatcagcgaccgcaggtcgaaccgctcgccgtcggcctcgatctccagcggcacggcgtgcatcgtgcggaactccttgaccccctcgatgatataggccagcttgccgatcttgtgcttgcgttcgtcgggcgtgcgctgcgaggtggtcgtgaagatgccgaacgaaaagatattgacgaaatacaggtcgttcacccgcccgcagtcgacccgctcgacgctgcccgacgcgatctgccgcgccgcttcgagcggctcgcgcgacatgccgaccgccccggcgaaatcattggccgtaccggccggaatcacgccgatgggaatgtccagccccttgcgtttcatggcgttgaccgcatagttcaccgtgccgtcgccgccggcgacgaccatcaggtcgatggtctcgttgccgtcgaacggattgaccgtaaagtcgatccgctgcggtgtgacgtcgtagccgtaggcctgaaaaatcgtactgatgcacccgacgttgcgggcgattttgcccttgcccgattcgggattgtaaaggaataccgctgttttcatttatctcgctatttcagaatcaacgcttccatggccggcgagacgtactcctcgtactctccgccgtcacccgccaggatgaagtacgccttcacgccgggcatccgttccacggccgccagcgcatcgtcggcgcccatcgccaggaacatggtccccagcgcgtcggcctcggcgcaggtcggagccgcgacggtcaccgacagcaggcgcgacagggcgctgcgccccgtgcgggggtcgatggtgtgggcgaccttgttgccctccccgtcgaggtagaaacggcggtagttgcccgaggtggccagcccgccgccggtcatctgaatccgtttctggaggtattcgccgtccgacatgttgccgtcgaaaggcgtttcgacgccgatgcgccacgcccggccctgccggttgagtccccggcagcggacctcgccgccgatgtcgacgatgtagttttcagccccgtatttctcgaccagtccggccagcagatcgaccgtatagcctttcgccacggagttgaagtccagctgcacgcgcggatcgtccttcaccagccgccctccctcgacgcggaccttttcgcgacccacgaattcgaggatcgaatcgacgttcgggttttcggcgcgctcccggccggcgaagccccacgcctcgaccagcggcttgacggtcacgtcgtaacgcccgtcgctcaacgcgccgatgctgtcggccagatgcaggttgaaggcgatatgacggtcgacgctgtcggtctcgttgcggttcaggcggctcacgagcgacgtcgaatcgtaaatcgacatcgacgccttggcctcgcggtccagctccatgacggccgcatagagacgctgccgcgagacgcccttcacgtcggccaccacatgcagcgtcgtgccgagcatcgtcccgtcgacggtgacgaaatccggctcgctcccgcagccgcacaacaccgcggcgacaagcgcggcgaaagttccgcgcacacccgttttccccataattttcacttgtttagccgcaaaaatacgattttctcgattaatttgttatttttagacgccaaattgaaaataattgtgaattatgaattatgaattatgaattatttcgtacctttgcggaacgctctggcgttatccacggtaagggggatgcgtcgtagagtggaacgtaaaataaatttacacaatggcttatttaacagctgagaaaaagcaggagcttttcggccagtacggcaagtctaacaccgacacgggttcgcccgaaagtcagatcgcgttgttttcctaccgtatcagccaccttacggaacacctcaaaagcaacaagcacgacttcggaacccagcgcgcactgctgcgcctggtcggcaagcgccgcgcgttgctggaatacctgaaggaggtcgacatcgagcgctaccgcgcaatcgtgaagacgctgaatctccgcaagtagtcccgaggaagaaatgaaggcaattcccgagaggggttgccttcattttcgttgcgaaaaacaattcgaaaacattataggtttaaaatttttatggaagaaaagaagctgtacaacgcagtccgcaagatcatcacgctggccgacggtcgccagatcgagatcgagacgggcaaactggccaagcaggccgacggctcggtcgtcgtcaagatgggcgacacgatgctgctcggaaccgtcgtggccgcaaaggatgcaaaacccgacaccgatttcatgcccctccaggtcgaatacaaggagaagtacgccgccgtaggccgcttccccggcggtttcatgaagcgcgaagcgcgcgccaacgacagcgaggtgctcgtcgcccgcctgatcgaccgcgccctccggcccctgttccccgcggattaccacgccgaagtctacgtgacggtcaacctcatctcggcggacaaggatattcagcccgacgcgctggccggtctggccgcctcggcggcgctggccgtatcggacattcccttcggcggccccatctcggaggtccgcgtcgtacgccgcaacggcgaatacgccatcaaccccacctattcggagatgcccgaatgcgacctggacatcatggtcggcggtacgatcgacaacatcctgatggtcgagggcgagatgaaggaggtttcggaagaggtgatgctcggcgccatcaagttcgcgcacgaggagatcaagaagcactgcgccgtacagatcgagctgtcgaaggagctgggcaaggacgtgaaacgcacctactgccacgaggtcaacgacgaagaactgcgccagacgatcatcagagagctttacgacaaggcctacgccatcgccacgagcggcacgatgaagcacgagcgcgaagacaagttcaacgcgctcgaagccgagttcgcagcccgctattcggaagaggagctgatcgagaaggcgccgctgatccacaaatatttccacgacgacgtgcagaagaaggccatgcgcaacatgatcctcgacgaaggcgtccgtctcgacggccgcaagaccgacgagatccgcccgatctggtgcgaggtgggctacctgcccgcagcccacggctcggcgatcttcacccgcggcgaaacgcagtcgctgacgaccgttacgctcggcacgaaactcgacgaaaaggtcaaggacgaggtgctcgtgcagggtaccgagcagttcgtgctccactataacttcccgcccttctcgacgggcgaggccaaggccgcccgcggcctctcgcgccgcgaaatcggccacggccacctggcatggcgcgccctgaagccgatgattccgctgggcgaggacaacccctacgccgtgcgcgtcgtgtcggacatcctcgagtcgaacggctcgtcgtcgatggccacggtctgcgccggaaccctcgcgctgatggacgccggcgtgaagctccgcaaacccgtgtcgggtatcgccatgggtctgatctccgattccgagaccggcaaatgggccgtgctgtcggacattctgggcgatgaggaccacctgggcgacatggacttcaaggtgacgggaaccaaagacggcatcaccgccacgcagatggacatcaaggtcgacggactctcctacgaggtgctggccgccgcgctggagcaggcacgcaaaggccgcatgcacatcctcggcaaactcaccgagtgcatcgccgagccgcgcgaggactacaagccctgcgtgccgcgcatcgtgcagatcgtcattccgcaggatatgatcggtccggttatcggcccgggcggaaaggtgatccaggacatccagaagaccaccaacaccaccatcaccatcacggaggtggacaacaagggcatcgtggacatcttcggcatcgacaaggaggccctcgacggagcgctggcccgcatcaaggccatcgtagccatccccgaagtgggcgagacgtaccacggcaaagtccgctcgatcgtcgccttcggcgcgttcgtcgagatcatgccgggcaaggacgccctgctccacatctcggagatcgactacaagcgcttcgagaccatggaggagacgggtctgaaagagggcgacgagatcgacgtcaagctgatcggcgta

SEQ ID NO: 1049 - DNA, 7433 bp, unidentified
  source 1..7433: mol_type = unassigned DNA
ctaaccattcacgtactccaatgcaaacctcgtccctttctccaaatcccggttcacgttctttcccaatatatctttcagatatttggggtgcaggccgaagcccggacggacggagcgaacgttccgctccgtaatcacttctccggccttcatatcctcggccacatagagagaacgtgatgcggaacggctacctctcattttctccgtcaattcgtaagtcgttttccccaaagataactcagccatgcgcacatcttttaccatttgggcaaaatctttctcttccatagaaaaagaacaatccggaccaccgatggaacgattcaaaataaagtgcttttctatcatactcgcaccttgagtaaccgccacaatgggagagacactccccagggtatggtcggaaagtccactttttacctggaaacgttctgccaaatcacgaatcatacaaagattggcttcctcaactggagccggataagaagaggtacacttaagaaccgtaatatcattatttcccattctgcggcaagcttcaacagccaattgaatatcttcttcggtggctatgcctgtagcaagtaccatcggcttatgcttcgaagccgcgtattctatcaatggaatatccgtaatttcgaaagaagctatcttataaacgggacagtccaaagcctcaagcatatcgacggctgtcttatcaaaaggagaagaaaaacagatcagtccttcttccttggccacatggaacaactcttcatgccactcccaaggagtataagcctgttcatacaaatcataaaaatattgcccgtcccatatagagccttcattaattataaaatcaggcttgtcacagcgaagcgtaatggtatcagcccgataggtctgcaacttgacggcatcggctccggcacgttttgcagccctgacggtttcaatggctgtttctttcttaccgttatggttggcagacatctcagccacaatcatacacttatctctcatgtctttactatttaatcgtccttagaatactttcaagctcttccatactatcagtctgaagtatgatataccctaaacggtctaaagagttttttatttttttttcagaataaggtcttatttcagaccgaaaaacagccgatgaccgggaagagcttagaaaatccacacaacgctgatagttgagcggattaaggaactgtaccgctgagcatttttcatgtttgcgaaggacatcaacgggcaaaccaagagaacagttcaccagatttctcagcatatctatcccggttgacaatggaaccaaatcagaggttatataatctcctccaagccggcaagcaatttctatgatataagcgcccgattcattcagctttatttctgtatgcgagggacaattattaagtccaatcaggcaaagtgcttttgatacggtctccgaaaccagctcccactcctgtttcgttatacgcgccggttcaatgtgcgtatcttcaacaaagaagccttctgcctcaccgatacaaagtttctccgtaatagtgacaacggtagttttattgttttgcgtatatgtttcaacactgaattcacggcctgttataaagccctcgacaatggcctttccggtacgggaataaccgagagcttcggaaaaagcaagtacaagttctttatgatttgtaaccttttttactccgcggcttgcagaggaatctaccggtttgacaatatatggataatcttgcaatgtgcccaagtccgtatctttatcacaaagcatgaaaaatggtacatcaatcccgttggccgcaaacatttccctctgcaagtatttgtttgtacagatttttgcgacctcagtggacatggacggaagccccagctgttccccgacataggaaaccacatttacaggcgcgtcacttgtagtaagtatgccgtcaacagagtgacgtttggcacattccaaaacaccttccttatccatcgtgctgacaagaaccggttccgaggcgtaccccattcccggagtattcgcatccatatctgcgactatggtatgcaatcccatatcgttcgcctttcggatgacaggaacctgcatttcacctgcgcccagtatcaataatcttttattcatataaccgaatttatcacatcacagatctttcttgcctgtgcttcactgaaccagaaatcattaaacaaattgacgatatgcttcacctccacttccgcaacaggagaagaaacacctttgaacatgtatgaaaccgaagggaaattagtcccggcaaacagaccggccttgaatattgcgtcaagaaccttctgccggttctcgatgacaatcatgaacctccagttctggaaatcatctcccatctgaatcgattcaggaagcagattcctgtatatcttgtttattttctctttttccgcaatcacttttgggagctttctttcaatgatgtcaaaatattcctcatcggtcatttgcaaatttgaggcgtccagccaaggatagtcagccggaagcatatatctgacattctccaggagacatttccttatatataccgaatgcttttgttcactaatgctatcatactaataatcaacaacttcgtaccccccctaaaacttgcatagccaccataggaaagttctatgaatttagcatatccggtactgtaaaggcagagatccacattttcaggcaaggaatctaccaattcgggaatgcacaaacaacaatcatcaatgatacaaagattttgatcgagacttttcactgctcggtaaaattctttgttgtcatactttttcccgtaggcatgcacaaatacaagaccggaatattttcccgcctctatagctgtcaaacatttctcggttgacatggcatggctttcatctatgtctataaattcaaaaccgacacctgctttcataaacgacaggggcactacaggacacacatttgccggcaataagaacggtttatcaaaatggttgccagacagataattatacaatatggccgaagctctttgtgaagttacttgcatatcaacagacttttaaacaaattgacaaaccgtttgggaatatccggagtgatggcatgtcttttacgaatggccatcttatccaaattctcagcaacaagagtaaaggcagcggcatcggtataatcacccaccccctgaatcagcccttcacgcaaaaacatataatagtcgtactcctgattatcaacataataccctcctataacaggagttccacaggccaatgcctcattcatcatcgtagaggcaggcaatatggcgacatctacagtactaaacaagtctgcaatggaaccggcagacaaattcttctgataggttactttggggtcatcaaccatattctcggctgcatacgaatcaccgacaattgccgttatcttcttcacattgtctttggctttaattgcatgaatggtctgatacgtcaaattcaagaaatcagaaccaccaaaagccaccaatacatataaacctcctgaataattgttccgtttattctgcagcgcaacattgaagaaaggcctcctcaacaatgaaaattgaagcccaaaggcaaattgagtatatggttcacacgaatagtcatcacgcgtgtaacccaatccctgattgactataagatcagccacatagtgcttgtcgtgcatatcatccacacacaccagacagcaacctttttgcttgatggcacgctggtaatcagtagtaaagaaatagttgtcaagtaccacaatttcgtcaccttgtaaaagggaaaggaactcatcataatgcgattcttcctgtaaggggatgaaaggacataccttctccatctcactcacctgataaggggtaggatggcaagtaaagaaggtacaatcaaaatcgtccttcagcatatcggccaaagccagagtacgaataaagtgaccgtagccgatggcagcacttgcatcggcacggagatagattttctgcattacatcatttatgaagcaactcatacttcatctctgccaatgcccagtcagtctgtgtatcaaggtcctgcacttcaagttcggaaagtaccaacccggctgtattctcaccccaaaaagtccggctctccacaaagggagcagtgcgagagaaatagaactgaccggcatcgtgataaatcggttctaaatcttgggaacgtgcatttttgtattcgggataaaccatactaatttttccatccacgatgtgaaggctgcgctgtataggataggaataagccacacaagtgaaaacggaatctatctccgaattcatttttccgtatgcttcccggagtctttcgggagtgacaaaaggagccgttgagtaaatgcaacaaaccgtttcaaactccctgccttgctctttatacttcctcagtacttcaagaattacatcatcagtaccggcatagtcatttgacatctcggcactccgcataaaaggaactttggcaccatacttacaagctattccggcaatctcctcatcatcggtagaaaccatcacctcctcaaaaagaccgctttgtaaagctgcctctatggaatatgtaatgataggtttacccataaagggcttgatattcttacgcggaatacgtttactgccgccacgtgcaggaatgattgctatatttttcatttcgctacaaattctataaccttttcaatcacatactcctgttcctcgtccgtcagcgtgggatacatcggaagactcagacaatgttcgtaatactcttctactataggtaaatcgcctttcctattgccccactgctgatagtaaggcatcagatgaagcggagcataatgaacctgcgcatagacattgttctcgtgcagataattataaaggcccaagcggtcagctacttgaatgatataaaggtgataagcatgatagacatcggcagcattgaacggagtcttgatgccatctattccggaaaacgcttcattatagcgtctcacgatttcatggcggcgttcaagacctgctttcgcacgctccagctgagaaatacccaaggcagcctgaaaatcagtcagacggtaattataccctaactcctgcatctcataataccagccaccatgatgctcgtgtaataaagcagggtctttcgtaatgccatgcgtacggtaaagacaaagcctgtcatagagctccttgctgttggtggtcaccatgcctccctcacccgtagcgatatgtttcacgggatggaaagagaatacggcacagtcggcaaaacgaccgttaccacaatgttgtttcttgcctttactgtccatgaaatagccgccgggagcatggcaggcatcctcgataatccacaaaccgtactcgtcggcaagctttctgaactcttccagatccaaaggatagcctgcaaaatcaactggaacaatacctttgtaagtaccgcggggagaagctttaagcatggcttcaagtttacggatatccatgaggtaagtatccttgtcaatatcacagaataccacctcgccgccacaatagcggatgcagttggcactggcagcaaaggtcatgggagtgacaatcaccttgtcacccggctttacattcagtgcggtagctgcaagatgaagccctgaagtggcattgttcaccgctacggcatattgtgcacctacatattcggcaaatttcgtttcaaattccctgattttgggaccttgtgtcaggtaatcgcttttcaaggtatcgatgactgcccggatatcctcatctgtgatatgctgacgaccgtatggaataggcttgcttatcatttcacctcgaaattagggtcaacgtatttctttatattctcgcgcatagtctctactgtctcccactccgtattgttgtcactgctgtagtggaaaccgtcgggaacgggtactgcattgtgatgtctgatgaactcttcgcgactgtgcttgaaagatacagaaggaagaatgacataatatctgcccaaatcgattgtatcaagagcatcggttacagtaatcatctcctcgtgcagcttctctcccggacggatgcccacttccacctgcggcagattgggtgcaatggcggtagccacgtcctggatatgataggaaggaatcttaggaataaagatttcaccacccaggtgatgtccgatggcatacatgaccaaagcgacaccggcttccagcgaaatgttgaaacgggtcatgcgcatatcggttatgggaagttccttcgccccgttgtcacgcttgttgataaagaaagggattacggaaccgcgggaacccatcacattgccataacggactacggagaacctgatgttcttggaaccgctgatattgttggcagcagtaaacagcttgtcggaagtgagcttggtggcgccataaagattgatgggggcacatgccttgtcggtagaaagggccaccacatgctgtacaccggtggcaagagcagcctttatcacattctgcgcaccgtgtacattggttttgatgcactcttcgggattgtattcagcggtatccacctgcttgatggcggctgcatggataatcacgtccactccttcgcaagcccgcgtcaggcgttcgaggtcacggacatcaccgataaagaaacgcagttgcggatacttatgaccgggatatttctgtttcagctcaaattgcttcagctcatcgcgggagtaaataatgattttctttacttgcggataatcacggagaatggtttccacaaacttctttccgaaggaacccgttcctccggtaatcaatacggatttattgttaagcattataatgaaaagttttattcatcgatatattcccacggatagggattgtctgtcacattctgaaactcatcaaccgcttcctgctgttcgggagtaagtgataaggaatcccaagaggcgatgatggaacggccctcgtcggccaaagactcgtcgaacacttcaccgtagcaggcggtaagcagacggagcttcagtaaggaagcgggaagggcatcgagcacatcccaacaacagtccagcactttctggacatgccgctgcttttcgccatggtccacaaaagaggcgctgtaacccataagaagggcaagacagacatttgcctgctcttcgatggtagtgccttttacacccgaccggtacaaagccatggtaagacggtagacctcaccgttccgccgtgacaagtcatcgctatagacgggactgccgtccatacccaaatacatcagttcgtgcgcagcacgctgaagagtgattgcttcttcggaaagagacat

SEQ ID NO: 1050 - DNA, 16316 bp, unidentified
  source 1..16316: mol_type = unassigned DNA
aatataataaaaattgttgagcatacggctcattttcttggcaagagaaatattacaatgtgcaaagttatgtaaaatattgaagaaacgatagaaaacaggtgataaaatataaccaaaacattcatacagagtgtatttgcttaacatatattggataaacgccacaatgccacttcgcttttctacttgtttatcaattaattacataaaatatggtcctctaatatttctcttgccaagagaagtagtgacggaagccccggaaatgaggtctgtacactttgtcaaaagtatggaactaacaatggatattatgggaaaagggaacgtaattcattgtaatacatgccaatatgtaggttggcatgaactaggtttatatccacacctataaaatgtttcggaatatgagtacgagtctttttacagcggaggaaaaaaggcaggtccgatggttcgtcatgcgcgcctacaagaatgagaaaatggcagaggacaggctgaaagacaaggaatatggtttggaatattttatcccgaaacattatgccgtaagaacttatcatggagtgaagtcaaaaaagttggtgccggttataccgagtctgcttttcgtccacgccagccattcgcagatcactgaattcaagaaacgatacaatttcttgcaattcgccatgtgggaaaagagcacgggggcggaatatattaccgtaccggatgaccagatggacaacttcatcaagatagcttctcattatgaggaggacactgtttattataggcccgaagagatagacttgaaaagaggaatgcgtgtatgtatccacggtggcaagttcgataatgtgaagggcatgtttgtgcgggtgcagggcaagagaaaccgtagggtggttgtcctattggagggtgtcatggccgtttccgctgaggtgcaccccgatctgattgaagttctttcttaaaaccgctggcttttacgggacttcgcaaaaatcacgataaaaattaattgaaattacaaattagaaataatataaactgtacagatataaatatgaagaatcgatttttgatttatctctttgcgatagtgttgtttacatcctgtcacacttcgaaggagattctttactttcaagacattgctgtgaatcagcctgaagcgattgtgggtgcaagagacatcaccgtgcagcccaaggaccaaatttccatcatggtatccagtaaagacccgcagttggcagcgttgttcaacctgacacgtgtccagtatcgggcaggaactgccgatttacgtagtagcaacaataatggtgaaatatccggttacacgctcgatgacaagggaaacatagactttccggtcattggtacgcttcatattgccggtatgaccaaaagccagattgccgcccttatcaagaaacggctgatggaagaggacttggtgaaagatccggtagtgaccgtagagttcatgaatctctatttctccgtgttaggtgaggtaaaaacccccggcaagtacaacataaccaaagaccagatcactttgcttgaagccatcagcatggcgggcgacttgaccattaccggtaaacgtgatgctatctttgtcatccgcgaggaaaacggtgagcgtgtcacccactgggtagatcttcgtagtaaggacatttttaaatctccggtctactatttgaagcaaaacgatgtgatttatgtgcagcccaataagatgcgtgccggtcagagcaccatcaacgagaataacgtgaagtccgtatcgctatggatcagcgtcgcttcattcctcacttcgttgggtgtgctaatattcaagtaaccttcagaaaaggaatcactttatatttttataatatgacagaaaagaaaacaaccgccagcaagcctgctgacgacttcatacgcatacaagacctgtgggggattttcatgccccggtggcactggtttgccctctccctgttcgtaaccctggcgacagccgccttgtacctgctgggcaccccgaacatttacacccgtaccgctgccattttggtgaaagatgattccaagggaggaacatccaccaatgcggtcagtgaattttctgacttgggtatcttcaagtcgaataccaatatcaacaatgagttgctcaccctgaaatcgcccacgctgatgaccgaggtggtacagcggttgggattaaacgagacctatactgtccgcaaaggactgaaagatgtggaattatacaaaagttcgcctttagcagtcacctatcgccacttggatgaaactcctgtcggttttacaatagatatttcatccaaagaaacgtttgtcatatccgacatggaagtaaacgggaaagcgtttggggaagatttctccggaaagatgggcgattccatccgtactgaaataggcacacttgtcatcaatttcacaaaatattggaacgattcattcgtgggcacttccatacgttatagaaaaggtaatgtgtgtgccgtcaccgattattatacagccgctttgcatgcggaattgggaaacgaggatgccaccattatcaatctgagtatcaacgatgcctccattcagaaggctgaagacattctgaacaccctgattgaaatgtacaacgagaaatggattcaggacaagaaccagatcgccgtcagtacttcgcagttcatcggtgaccgtctgagcgtgatcgaaaacgagctgggcaatgtagatgagaacatcgccggttacaagagtgagcacctgctgccggatgtgcaggcggcatccagcctctacctgtcccagtccgccgagaacaagaaggagttgctggcactcaacagccagctttccaccgcacagtatatccggaaagagttgaacaacaagaaactcagccagctgttacccaccaactccggtatcgctaatgtcaatatcgagagccagatcggtgaatataacacgatcgtgctcgaacgtaaccgcctgatcgccaacagtagcgagaagaaccctctggcaaaagacatggctaactcactgcaaagcatgcagcgtaccatcattcagtcggtggacaacctgattgtttcgctcaatacccaaatacgcaacatccgccaacaggaagccacgaccaccagccaactggcttccaacccgaaccaggcgaaatatctgctttctgtggaacgccagcagaaggtgaaggaggaactgtatctttatctgctccagaaacgtgaggagaacgagctttcacaggctttcaccgcctacaatacacgtgtgattaccgctccgagaggcagcatgcttcccacagccccccgaaagatgaatatccttttggtggcattcgccatcggtctgcttgttccggcggtgattattttcatgaaggaaaacatgaataccaaggtgcgcgggcgaaaggatctggaaaacctaagcattccgttcatcggtgagatcccccaatatctcagtgctaagaagaaattgggattcgataaacacacacagtctgtcatgaaagccatcgtggtgaaggaaggcaaccgtaacattatcaatgaagcgttccgcgtgttacgttccaatattgactttatggcaggcaaggacagcggtcagaacgtgttcatgcttacctcgtttaatcctggcagcggcaagtcgttccttgccatgaacattgccatgagctttgccatcaagaaaaagagaatattggtgatagacggtgacctgcgtcacggctccacctcctcctacgtggattccccgaagactggtttaagtgattatctgggcaaccgtgtcagtgactggaaggagattatcgtgaaggatgaaaaatacgacaacctgcatatcattcctatcggtactgttcccccaaacccgacggaactgttggaggacggcaagctggccactttgatagaggtgcttcgcagcgagtatgactatatctttattgactgtccgcctatcgatatcgtggccgatgcgcagatcatcgagaaactggctgaccgcaccgtctttgtagtccgcagcggtttattggaccgtagcatgctgcccgaactagaaaatatctaccaggagaaacgtttcaagaacctcagcgtgatactgaacggtacagaaagtgccggaggccgctatggctatagatatggctatcgcaacggctactcttcctattatggaaataaaggaaaaatgggggggggtaaatggatggtcatcaagtgattgattttgcatgttatcgttctcgtaagaacttttaattttacactcaactatcatgtggccctttcgtaagacaataaccttcgcccggagcggtatcctgaaaggaatgaccgactgtcacagccatctccttccgggagtggatgacggagtgggaacattggatgaatcactccgaattctagatatgatggaaaagcagggagtcagaaagctgtggctcacgccgcacatcatggaggacatccctaatgaaactgtgaccttgcaggaaaagttccaagaattgaaacggagttataacggcacactggaacttgccttggctgcggaatacatgatggacaatctctttgaggagcggttggaaaaagatgacctgctgcccctagaggaggggaaacgttacctgttggtggaaacctcctatttcaatccaccaatggaactgctctctgtcctgcaacgcatccaaaagaaaggttattacccgttgcttgcacattcggaacggtatgaatatatgcagaagagggattatcaggccttgaaggaagagcatgtctccttccagctcaatttgccctcgttggccggaatgtacggaaaacatgtacaggaaaaggccgaagccctgctgaaagccggaatgtacgaccgtaccggttgtgacatccatgccataggctgttacaagacattggtcgcttcggcagtaaaatcggaagtcattggaaccttacagaaacaaagtgatcaatgattgcaaattttgcattgacgagccttgtaatccgaaaggatgaccgctggaacaggaacgtactgcgcatcttgaaacaaggtgaacaatatcggttcaatggctatggtgatgagtgcaggtcgcttgaaaggaatttctttgctgcgggggtgacaataagtgccattgtcggcaagaatggaagtggcggaagaaattatctggaaacgtaaggcatgggataagagctatatgaagatgatggaaaatcaatacgatgggatgaccataactccttcccttcagaaacgtatcatttttggttttctgaagaatgaaacggacattcatctacgtccgttgactaaattgcaacaagacttgtacaatcaacaggatttggtgtaatctttaatcttagaataaaagacactgatatttttatatccaatgttgttatgcatggtttcactatggctcatgccataacagctatggctttggtccagacagtggtcggatacgaagctgcattaacaacattgacgataatcacgattgttcctctatcaaagattctgttgtccttcgtgtgaggagtggaacttcttcgtcatgccccacaagtatgtcttaggtgaaatagaatagatgcgatcaggaaacctcttgattattagtcaaatgtatagtgctttgtgcttacgataaattataaacaatatacttttatgaatgttcatcttataagggaaaacgaaaatcaaaatgatggttcttatatccacttgtatcggaataaacagatcggtgcatggtgtgcatacggttattccgcatacggtttacgtctttttgataaacaacaaggctacatgaattttcgtagttactcagactgtcttcagatgccgtgtacggttacatccggagaatcccttgtttcattgttgcaaggttctgttgaggtaggttcacaaactgagacctatataaagttaaaaatggcagatacaataaattttaatgcttatcagaagtggttgcataagctgaaaaaggatgacccgaatgatgatgcaataattgtcaccacacatgtcagccaatatgtgccacgggacagtttcattcccgatggaatgtctgcatttgcgcgcaatgtaaagcgtatcggtgattttatcctgtcattggttgcattgatcattttttctccgttattcctgttttgctatattgccattcgcagggaagatggaggaagtgtcattttcaagcaagaacgtatcggcagattcgggcgcccgttctacatatacaaattccgctccatgcgtctggatgccgagaagttcggaccgcagcttagtcataccgggggtgaaaatgattcccgattgactaagaccggtcgtttcatccgggcgcaccatttggatgaattaccccaactctacaatgttctgcgtggcgatatggcattcatcggtccacgtccggagcgtaagttttatatcgaccagatacttgaacacgacaagcgatatacttatctttaccaaatccgtccgggcgtaacatcatatgccacactatataacggctatacggatacgatggagaagatgctccgacgtttggaatatgacctttattatttaggacatcgctcatggtggttcgactttaaaattctgttgaacacattctgttcaattgtactcggaaagaaattttaaaagattaataacttatataacagattgataatgaaagcttgttttatgggcttggggtatatcggattgcccacagccgttatcgccgccaagcacggcattcagattacaggagttgatattaacccccaggtagtggatatgacgaatgcaggacatctgcatatcattgagccgggtatggaggagatgttgcaggaggtggtgaatgccggctcgttgaaagcttccataaagccggaggtgagcgatgcttattttatggtagttcccaccccgttcaaaggaaatcatgaaccggacgttagttatgtggaagccgctacacgtgccgtattgccattattaaaggaaggcgacctttatgtcatcgagtccacttcacccgtaggcaccaccgaagcgatggcccgcctcattttcagtgaacgtcctgaattggaagataggatttatgtggcttattgtcccgaacgtgtattgccgggcaatgtgatttacgaactgatacataacgaccgggtcataggcggtttaaatcctgaatctaccgataaggccattggattttattctcaattcgtgcagggaacacttcatagaaccaactgtcgtactgctgaaatgtgcaaactgacggagaattccagtcgggatgtacaaatagcctttgcgaatgaactttccttgatttgtgacaaggccggtatcaatgtgtgggaacttatcaatcttgccaacaaacatccgcgggttagcatcttgcagcctggttgtggcgtgggaggtcattgtatagctattgacccttattttatcactgctgattttccagcagagagtaaattgattgccgatgcccgtgaaattaacaactacaagagtttttggtgcgcagaaaaagtgaaaaatgccatgctggaatttgaactgaaacatcatcggaaaccttgcgttgccatgatggggttggctttcaaaccgaatatcgacgatttgcgtgagagtcctgcaaaatatattaccacgaaagtgatgcagagttgcaataatgccaatatcctggttgtggaacccaatgtaaaggagcaccatgtgttcaagttaacagattacaaagaagcctacgacaaggcggacatcgtggtattccttacagcacacactccgttcaaagaattagaatggcgagaggataaggtgatattggacttttgtggaatattcaaaaaatagtgaatatatgaatattttagaactgacaggtatgaaatcgactaaatacggcggagtagaatcctacttcgctgaattggtcaagatatgccgtgttgataaatttatttttgtatacgagtcgatgccaatcagtgaaaactatgtaaatgacatcaataagtgggggggtaatactttgtaaacaaagcatttccacatttcaatatttcaaatttgtgataggtgttatcaaacgtgagaaaatagacattgttcattttcattttggaagttatcttattgcaccattcttgcgaattctgtttccccggattcggattatttcaacccgtcatagtgaaatctttgtttccaacaaacttaaaaaattatatctgaagttctgtttttttccttttgaaagattcctttgtgtcagttgtggcgtaaagaaagaaatgattgaaggcgtaggtttttcttcaaagagtgaagtcctatacttgggagtccggaaaaaaaagattgtcaacccaaatctgaaaaaaacattggacataccaaagggggtagtcgtgttgactacaatcggattcaatattcgtatcaagggattcgatatacttgtcagaagtattcagagtctgatggactccaacagacttaaaaacgatataatagtgcttgtcatcggaattagcgaaaattctgaagacagtaatagcttgaggcaattgattgccgaggccggattgaatagaaagattatgtctttgggaatacgaaatgacattaatgatattttgaatatttctgatatttacttgcagccttcccgtacagaaggactttctcttagtattatggaggccctaaactattcgttgcctgttattggtacacgagttgggggcattcctgaaatcgtacatgagggagaaaacggatatctttttgaaaaagagaatattgaagagcttgctgacaggattgagatacttgtcaataatcgtgaagtccgagaaatgatgggtagaaaatcaaaagtaatatccagtcggttcacgcttgcagacggtgtggaaaagttagcttcgatataccatcagaccaattgatttgccgctgacactctattgtcattcaggttgcaattgagattaaaaaatgtaggatagttataaatgcagtcatcaaacaaacgcatagcacgcaacacgttaatgctttatatacggacattcgtaatgatgcccgtatctctatatacttccaggattatattggaagtgttgggagagaacgattttggagtatacaatgttgttggcggctttatcgcacttctgtcttttattaattccgcaatgacaaaggccacccaacgttttctgaacgtggaattgggaaaaggcaatcatgacagagtctcgagggtttattccatgagtcttctgatacattttgcaatagcggtatttatcggcttcgtattggaaacagtggggctctacttctttgaaacaaaattgaatattcctccggaaacacaagatgcagcacggattgtgtaccatatttctgtagtgaccgcttgtcttcattttatcaggattcctgatgagtcgagcattattgcatatgagaggatgtcttttttcgcttatgtcagcatcattgaggtaatggcaaaattgggaacagtatttctccttttctgggctgaagacaatcgtctggtgttgtacgccgttgcccttatgaccgttgggatattgttgaatatcatttatgccatttattgcaagcgtaatttcacgacttgcagattccggttctattttgacagaaagctgctgaaagaaatgcttttcttttcttcatggagccttttcggcggtatagcccatgtcgcatccatacaaggcatatcaatacttttgaatatttttttcacggttgctgtcaatgcggcaatgggggtagcctcgcaagtgttcagtgctgtcaatactttggttacaaactttcagaaagcggtgcagccacagattgtccagtcctatttttcaggggataaatccagatttctggaacttgttttccgctcgtcaaaattgtcgtatttcctgctctttttcgtcgcttatccgttgattttgatttgtcggcctgtcgttgagttatggcttgtctgtgtccctcaatatacagtacagttcattcagctttatctcatcttcctgcttattgatgcattatccggaagtctttgggtgtcatctgaaacaataggcaatatagccaagtatcagtttaccgtttcttcgatgataattatgaatattccgattatatatgtattgttcaagttcggttgcagtcccgtctatgcggtgattgtcagaattgccatcaatttcattactcactgttacagaatattctatctcaaacacaaagtgaatttcccggttaggaggtatgtcgtggaagtgatgtttaggtgtctttgggtgtcggtctgcatcattccggtcccattctttttgcataaatttctaacctcaagctggggtagccatatacttgtcgtattgaccagtcttatcatttccggacttgttatctataaattcgggcttgatgctaaagaaagagggttcgtaatcagtacggtaacaaataaattcatgttcttaaaaaaacaataaaatgtagggaataaaggtggtggcaacagtatacaatacactccgttgcggtttgtatccttttaaacagcagcttgttacggggcttttggaattccttaatttggtcaaattgcaatgtttgttaccggcggttcgtttcatgcgctcgttttttcatatgccgttctttgctgtcaatggagataaggacaactgcatgattacttttctcgataatatcggtttgcagaaacgtactatcagtgaaacagataaagaggaaaaatacaaagaagttctttgggcagattataagtgtgcggatgtatttcttgcagaagaaaggaagaggaacttaaacttttgaaataatggaaagggacattcgtatagacatacttaaaggcatcggcatactccttgtcgtttggggacatgccaccgcaatccttataaaggaaatttgtattttccatatgcctttgtttttctttttggccggtatgttttatcatcccaaacaaggatttattcaatcaagagcaaaacggttgcttattccctttggggaatattctctgatattcgctgtattttattttagcatggggttgcagggaataccgcttgataaactgagcatccatcatatcgccgcatttgatggtccgttgtggttcttggtcgctcttttctatatatgtgtcatgtattattttttggacaaaaccgttaagaaaaaaaacgttattcttatcgtttcttttgtaattgggttggctgtcgcatattccaagatcaatttgccgttttatatcgggcaggggctgttctctttgccattctatgctgttggcaaatggatgaatgacaaagggctgacacaagcagagggggcaattaaaaaagcaaccgttattgctatagccggatatatcatagccatagcattctgccgtttggcacattatcaatttgatatttcgcaactgaaattttccagtttcccgtttatattctatgccggagctttctgcgccatatatcttttgttgaatttcaagcctttcaacaagataacaactccaaacagaatattggcttctttgggagctaattcactcacgataatggctatacacgctccttttctgtggttgttcagggattttatcagaacaaacagtagcttttatgacacaaaactggggggggtaatttcaaacttaatcacttttgttatcttcataacattgagttatttaattgcccttggaatagaacaattaaaaaaactgacagctaaaaatcatggataatccgaaagtatcaatcattgtaccgatttatagagtagaggaatatattgagcggtgcgctgaatcgttgttcgcccaaacgtttgatgacattgaatacatctttgtggatgattgttctccagacaagtcggtggagatcttgcagagaactctggaaaaatatccgcatcgaaagaggctgacacgaattgagaggttgtcgtcgaacagcgggcaggccgctgttcgacgacaagggattcaattggcctctggtgattacacggttcattgcgatagcgatgactggatggatgtgcatgccataaaggaactatatacttttgccctatccggccattacgatatggtcttttatgatttctatcgtagcgatggtgtttctacatatgcttccgccccgcgcaaggtttctaccaataataaagacttcctgatgtcatcattgctttgcgggcggttgatggggagcttgtgtggcgctttgatcaaacgtagtctttacgatgggataacatttccaaggcaaaatatgaacgaggatctggcgacgataatccaattggtttggaatagccggaatgtaggatacttgatgaaaccattttattactatttttttaatcctgcgtcaattacaagttatggcagtgctgagatccagattaataaactcaatcagcgtaaggagaatcttgatctgattttcacctttcttcgctccaaaggtatttatgaaaagtatacagacgagataaatgcgctgaaagttggttcaagaatgtatcttgatagatatatgctgatgccgcgaatccgtcggatttggcacaatacatatccggaaatcaacagtattacagtcattcgtcacagcaggatgcgtactctcagtaaaatcgagtatttcggttctttgcttggtgtatatcccatattcaaatacattaaaaatatatggaaagacttaaggaaatagatattatcaggacgttcgtaatcattctgctcgtgctctatcatgctcttgcgccctattgcggtggttgggatatgccttcctatgcccaacccaatgaaggattttactggggaggaaaactggcatacagtgggatgctggagacttttgtcctgatttccgggtatgtattcgccttttcgctccaaaagaaagtcatttctttccgattattactagccggtaagctgaaacggctgtttgtaccgtgtatgtgttggggcattatcatgacattgatattctttggtccgtcaaaacttcttaatctggaacatttttggaaaattattgggggatacggacatctttggtttcttccgatgctcttttggtgctttttaatggaatatggcatacagcactgtctcaagggacgtaacttgatgttagtactcatgattattgctattctgccttggccgggaattccgttccgttttaatcaatcgctttattatctgctttttttccatcttggtggaattttctttagaaatcgtgagcggctgagaactgtcaattggtcaacaatatgcattttatcggctgtttatatggggttattctttgcggtaacattggttttgggaatggacgggatgcgtccggaactggcatcggacttgaaagtaaaagttttaatcctgtttgtccaccatactcttaaaatggtaagctatggattagtcacaattatctatgtcgctgtatttataaaactggaagacagatgcaatggaaaactatacactgtatgccgaagtatcgcaatgaattcgatgggaatatatgtgatgcaagaaatagttctgagacttatctattatagaatggggggggtatttttgtataccaaagagttaactccgttggtcgccttcgtgggcactttcatcgtctgctatgtatcaagtgtgattatagccggatgcaaatacaccaaatttctgtgttagtatgaatgtgtcctattttatttacctaataaattacaacgatgaaatatcattacgaggcagttccggtactgttcaatatacttctgttttttcttatgctgtatccgtttccgaatgtgtatagatatggctgtgaatttagaaaacgatatacagacatcttggattatgcagtatacggtgtcctgctgatactgttttgcactttcggctatgcggacaacgatttctatcactacgaggggcttttcaaacgtatctgttcaaccggattaaacgtgcatcttgaacccgtttactattggttgatacggaatgtcacttcaaactatctggtatggcggtttatagtgtggagcggaacggtgattttgtcgttatggacaataaaacggctcaaacttgatgtgaggataggattgctgatatttgtgctgttttatatcaacattatttcagtaatgcgcggaaatttgggaattgccatactgttttttggcttttcattcattatcaggccctctcataataagttattgtcattcctattcggttgtttgttgattttctgttcattcttctttcacaaaagtatgttgttttcgattgctgcactttcggtaacacctttttatctgaataggaaaacggtaaaaatcagtcttgtcatattccctttcctgaccgttgtgactactttactgctggattatattattatgaacggactcatcggttttgatatagcagacatgaatatagggagctcgatgacgggatatgcgagcggcacaatgcggcagtcgaatatttttggtaaactgaaccaaatgataacctatatgccggtatacgcatctttggctcttatgactaagaagatagtttttgaagaaattgatgttccacggtatataaaggcattgttcatctattggtatgcaataacttatattgccagtctgtttttcttccaagaaacttcggtatggctctttatacgtttcataatgatgagctattttcctctttgtattgttgtgggttattattattctaatttcaagatgacacgcgagaaaagaatcttgatgcttttggcaatccttcctatctgttataaacttttctatgccttctataagaggttggtatgggaagggtacgtctttttctgacatgtttcgttagtttacacgtattaggatcacaataaaaaaattaaaaaacaatctgaatgaaaatcttagaaataattcctcaacttagcagtggcggcggagagcggtttgtggttgacttgtgcaatgagctgtcgaaagaacatgatgtgacattgatggttttgcactcacttgacaaggtggatttctatttgaaagaggtatcgaataatgtaagggtggtatcgatgaacaaacggatgggacttgacatcggtttgttatttagagtatatagatatatccgtagagaaaagcctgatgtggtgcacacgcatttgcgtgctattatgtatattgctttcgcaatcatgcgaaagaatggcgttatgtactgtcatacagtacattccgctgctgataaagaagccggaggctcctttatcagcagcggaatgcggaagttctgttttcatcgtgggtggattacacccatcaccatttccgccgaatcactacatagcttccgaaaatattatggaatggatgctcctatgattttcaatgggcgcaatgtggatgctggtatgcttgtttcagacgaggtcaaggaacaatttaaacagtatagacatacaaataagacgcgagtactgataagtctcgcacgtatcgaccctgtgaaacgacaaactctcttggcacgtgtggtaatgcggttaaaacgggaaggatacgacctcactgtattgtttatcggaggtgaacgtgatgcacagatgaccgcggaattgcgttcgtacaacgatgaagcaatacaattacttggagaactgcacaatccgcttgaatatcttaaaatgggagatgcttatgcactttgttcctcgtatgaggggatgcctatttcgttgatagaggctattggtgttggctgtataccggtatgcacacctgtgggcggtatagtagatgtggtacacaacggtgaaaacggttttctgagtgacggtatcggtgaagaatcttattacaaaacggtaaagagatttctatccctcaccgatgtacagcttaaagacatgaagcaaaaagctcttgccacttatggtccattcagtatgtacgaatgtgct

SEQ ID NO: 1051 - DNA, 28375 bp, unidentified
  source 1..28375: mol_type = unassigned DNA
gtaaattcgctgaaagtgtcatccaagaaatcctctattttgtcgaggtctgttttattttccgttcttgcgtggaaaatgttggttgcataatttgccataaatactaagttttaagtttgttactttccctcctgtagcatttcacttactttcggacttgattgaaattatgtcgcttcaacaggtggcatggctatgtatgcagggtttcactacaaaatactacctctgcgaagcggagcgtggagattttatagtgaaccttcaggttacaaccttgcatacaataaagacatggcaaatacctttgcgacacaattcccatcaggcagaccgaaagttgatatgcgagcatgtgggagtttactcggtacggatgtgtgtaaaaggtgtctatgaagtaaagagtatcgcagcgaaaagagaaaagaggcaagagcttatcttctcttttggctgtatgggtagaatgggaaaatcacaaaagtaacatgaaaatccagtttggtttagtttgttagccttatatatgctaaactaaattaaactaaatataggcaggcatttttggctgcctgtacaaaaaagattatctttgctacaagcaatacaacttcaagagataataatttgtattctctttatgagctgcaaataatttgttagttaaagttaggagcaaattcttcgaatgatgagagcagataaaattgctcggaatgcactctgaaagcaaacaaacgaaaagaaagaaacagagtgcaaatagaaaaacgagaaatcactttaattcctgtttttgttccttgtttgtttctctattaaaatcattcactttataacatattgattataaaatatttaagtgtgtatttttaaaagagttaagaatattaccaaatatacaaaattctttcacaattttctgatttattgttagatttctcaaaatttttcctttccacttttattctcacatattctcgcacatatcgacccttacattcaccccgaaaagtccgaatgaattataaaaacttccgtttggattatcggaatataaattttatctttcaaactctaaaaccgaaccgacatggaaacaaacaattcccgggttatgctttggagcgctgcgctgatcgcggcagggctcgtattgctgggctggacgctccgcagcggcatcgtacacttcaaggacagcgaacgcgtggttaccgtcaaggggctctccgaacaggaggtgaaggccgaccgggtgatctggccgctgatgtacaagcaggtgggcgacgacctgacggtgctgtacaacaacatcgaaaagacgaacggcacgatcatcgccttcctccgcagcaacggcgtggatgaaaaggagatcaccatcgccccgtcgcaactgatcgatatggccgccgaactgtacaacccaaatgcgccgcgctaccgatacagcgttacgaccgtactgacggtcgtaaccgacaaggtggacctggtgcgctcgctgatgcagcggcagggagacctgctcaagcagggcgtagcggtcaccggaggcgactaccagtaccggacgcagttcctttacacgggactcaacacgatcaagcccggcatgatcgaggaggcgacagcaaacgcacgcacggcagccgagaaattcgcccacgattcgaaaagcaaactcggcaaaatccgctcggctacccagggacagttctcgatcgaagaccgcgatgaaaataccccttatattaaatcggtccgcgtagtcacgaccgtagagtattacctgaaggattaaccttcaacgccacaacacaccggcctgccctacccaccgtgccggaacaggttctgcggaggaaattcctcggcagaacctgtcactaacccaaaacttaccgttctatgaaaagcttgaccgccgtatccgcagtactgccgttgcttttattggcttcgggttgcagcaaagaccgcaacgagcctcggggcaacggcacgctgaacatccgcctggagatggacgaccggatcgacctggtcgcgacacaggcctgcaacaccaaagcggctcccgacctgggcgcctttacgctcgaagtcacgcaggatgaaaccgtagtacacaagattccgaccctcggcgccaacacatcgccgagcctgacgctcgaagcgggagactataccgtcagcgcctattcgcagccgttcgccgcaccggctttcgacacgccggtctacggcgcgtcccaactgctgacgatcatggccggggcgacgaaggacgtcgcactggagtgtacgcaaaccaatgccggtgtgaaaatcaactattcggacgatttcaaggcgcagcacaccacttactccacccgcattgcgcacagtaccggcacgctcgatttttcgggcagcgacaccggccgtaccggatacttccccaccgggtacgtggatttgatcgtcaccgccgacggcaaggagtatacgcaggcgatccaactgaaagcccgcaggctttacaccatcacggtcaaggatgccaacgtgcctgtcacttcgggccatgcgaacatctcgatcagcgtctccaccgacgtgaccaacgagaatgtcgagatcaccttccccgcaaacggaggaaacaccggcggtgacggcggctcccggcaaacgatctacggggaaaatgtcggaagtacggacgtcaccagccccgcgttggtgttaagtttcaagggttggcagaaccaaaccggatcgggcatctcctattcgggaagcggccggatcgacagccagtccgcgctccaatcggcctcctattccggcgcgtccggaggaaactacctctccctctcggccaacaacaagttcaacatctccggcctcagcaccacgggatacagttcccccgtctttacgttcggccttgcctgtgcgaccgcagggttcgaccccgcccaactggaagtctacgtcaacagcgccgatgcggccgacgacggccccgcactcagctacacctacgaatccaatggggaatggatgctgtgcacggtcagcacgggcatcccctccggcgacaacctccgcatccggatcgtctcccaggcctccttccgactcgacgacttcaaactcaccggtgaaaaatagcggagagtggttttagtctgctggagagcttttgttcttttcttaaataggattctgtgattgatgaagtttttggtatagcgcggaacttgtcaaacacgggttcatccggaaccgactgaccgatcggttttcgacgacgggagggtgccaaactacacgcaatcgggatgcgcctgcaagcaggcgcatcccgattgcgttggcagaggcagagttcccttaacccgctctcccggcaaggttcaatggttcggtagttacgctcaactctttgccgtctatatttttataggtaacggtgaatctgtgcgtgccgggtaccgccggacgaaatatcggttgaatccggaaatcgaatgcaaccaatgtcggtttttcccggttgaactccgtaattgacttttcaaaatagcctgcagaccatttgttttccttttgttgtgctgttagagtaaaccggtaagaattggccaaaatatcatcgacacagaggtaaaaaacattgcataaatcgttcagcgggattccggccggatgggccgcgtcataatcattgtccgaaacgatattcaaactttcggtctgcacatacataacagggatattcaaataataggcaccattaaaatcggtatctttgaactgcgccgccaatacctcgaattgtgcctcgtcgaccaaatctttcgtaaagcaatcctccgtgttttcataagggcggatctgaagcgaaacgacattatacgtttccgtcggaacggaggtctccaacgatccgctaacgatcgcacagatgcttacaggattttggtacttagtgatgaaatttttggaggtgggtaatggagtcgggtcatcattgcaactgtataatccaccgcacagtaagcccagatacatgaacagtcgtagtttcatagtcgtctaatttaaatattaggtcttatgttctttataatttcaagtttgaaccggtaataataataattgctcggctttgcgcagtttggatctaattcgaccgggaactcggtattgaacacccccacgtaatagtaaccgttaccggttcctccccatccgtaattgcaatgcaaccaacgggtctcttgctctttgcgttcccccgccggttcctgacggatcaaattgtagttttcatcatagaaattgttgtaaacgccccatacccggtaaacatccttgtatccgtcgatcacccaatcatgaccatgagagtaaccgatccaattttcggttgcataaccacccacatatattgcccgtttataatacaattccattctaaccctgtcggcattaaaactgtaaataccgtcagtcaaatagttaaatcggttcttaaaggctttgtccgctttactcgtcgaagaagaactactggaacaaccgtaagacatatctactgccgatcctatttccgctaccaaggcggcaatggcccgccggtcgtacgaatcggcaggaaaccatgatccatacagataactgcgccagttgtcccaataacaggtataccaaccgtttgacacttggaaggaagtcggatagctatttgctgccataatgttcaacatggctatcgccacacaaccggcaacaggttttccgttactggtattattgcatgtaaacatatcaggccaattgatgccttcattaaaaggttcggtttgattccaccgtaccggaacgaacggcccgacctgtgtatactcccgcctcaaaagaatctccgattgcgccgggtatttgtcttccatgctcatggaatcccaacccggatcatgcgcaagctgcgcggcggcgtatcccggtatcatctccataaacatccgcacgccggggttgtccatcgtatcggtgatattaccctgatcggagtaggccagaatcgtctccatcagggtgtcggcggcaagaatcgcgaaacctccgtcgtcggcgtaattgaccacgtaaatatttttagtgacttctgcgtcgtctgtttctcccgatttagtggcggaggaacgaagtatatcgttcaacggaaagaggtcggccacggatttcgtatatccggagcgcgtcagcgcaccctctccgaaacactccggcaattcggcggccaactgttgaatagagtccagcgtcagaaaacgcgacttagcctgcccgaccgctatggcggcgtccgggcgctgcggaaggttttctttcgcacagccgaataacacagccatgcaagtaagaaataacagttgttttttcatcatcaggctttgttaatttgttaagttgggttcttcgtaagccaatattaggtaaatatatacaaatacaattgttattgataagaaacacacaaattaagttcaattaaatatttttaataatttactgacagtaagtttattgaataaaatattccgtttggtcgcgcattaatgtcatatcgcaatctgtgcgctccgttcagtcggatatcacaggttctccaagttatccccctcagcggcacttttcggaatttcacttctggcagatgcggtctgttttcatctgtccgagagagtccccgcagcaaaataaaaagtggagattcggcttcagcgacttcgccccgaaaattttcacagaaagaataccggaagtactccagcccgaacaaagaaccgctccctgcacaaaagaagcggggctgtcgttgcaaacgacagccccgccctactatgaagcttttactatgatgaattacaatttcggaccggcagcgaccagtttcttgccagcctcgttgccggtgaatttggcgaaattcttgatgaagcgttcagccaggtctttggctttcacatcccaatcggcagcgttcgcataagtatcgcgcggatcgaggatcttcggatctacgcccggcagagcggtcggaaccttgaagtcgaaataaggcatcgttttggtcggagccttgtcgatcgaaccgtcgaggatcgcgtcgatgattccgcgggtatccttgatcgagatacgcttgccggtaccgttccaaccggtgttcaccaggtaagcggtagcgcccgatttcttcatcttcttcaccagctcttcgccgtacttggtcggatgcagcgacaggaaggctgcgccgaagcaggccgagaaggtcggggtcggttcggtgataccgcgctcggtaccggccagtttggcggtgaaaccggagaggaagtagtactgagtctgctcgggagtcaggatcgacaccgggggcagtacgccgaatgcgtcggccgacaggaagatcaccttctcggcgggacctgccttcgaaaccggtttcacaatgttggtgatgtgatagatcgggtacgagacgcgggtattttcagttaccgacttgtcggcgaaatcgaccgaaccgtcctcgcgaacagttacgttctccagcagtgcatcgcgtttgattgcgttccagatatcgggttcgctctccttgtcgaggttgatcactttggcgtagcagccgccttcgaaattgaaaacgccttcgtcgtcccagccgtgctcatcgtcgccgatcagcaggcgcttcgggtcggtcgacagggtcgtcttgccggtgcccgacagtccgaaaaatacggcggtgttcttaccctgtttgtcggtgttggccgagcagtgcatcgaagccatccccttcagcggcaggaggtagttcatgtacgagaacatacccttcttcatttcgcctccataccaggtattgaggataatctgcatcttttcggtcaggttgaacacgaccgcggtctccgaattcaggcccagttccttgtagttctccaccttcgctttcgatgcgttcagcactacgaaatcgggttccccgtagtttttcagctcttcggcggtcggacggatgaacatgttggtcacgaaatgagcctgccaagccacttccataatgaagcggattttcagacgcgagttctcattagctccgcaaaaggtatccacgacgaacaggcgcttgttcgacagttccttgtcggccagctccttgagcgccttccagctcttctcgctgatgggcttgttgtcgttcttgtactcgtccgaagtccaccagatcgtatctttggtggtatcgtccagcacgaagaatttatctttgggcgaacggccggtataaacgccggtcatcacgttcacggcgcccatgtcggtaacggtgcccttctcgaaaccttccaggcccggtttggtctcttccttgaacagctcgtcgtaagagggattgtgtacgatctcggtcacacccgtgatgccgtacttgctcaaatcaattgccatagttttttattttttagttaatacatccttctgaaggcggctcttccggtatcggacagcggctccgtcgccgaggtcccgcgctccgggggcttttcccgccgggaagactcctccgcaccggccgggcggttttccgccgcgcagggcggctgcaaacgcctttgaaaccgggacaaagatagtaactttttagattgttacaaaaataacagtgttaaaatattaaaatttcttaaaattacagctaatcagcagtttgatctaacaatcagattgttataaaacaaacgaatacttgcccgtgtgataaaaatcagcgtagcgaccgttttacgaaccgttgcagcaacggcgctacagccaccgcgaccagcgctccggagctgttggccacgaaatcccagaaatccttggagcgatagcccagtgcaccctgcacgagttcgaccgcacccgaacagaggatcaccgccgcgaccgcagtccagcggcgccagccgcggggttcgaaaagtagcagcacgagcagcgtttccccgaaatagaagccgaaatgcaccactttatcgaaatagggaatcatcgccagccacccggccgggggcaggtcgtcgcccggcgcgagcgaaccgtagagcactcccgccgtccagaggaccagcagcagggttaagacgaatttatagcgtggcttatgcataattaactatctttgaagctcggcagaggagccattccgggctgcggctttgagccagattccaggccgaacctgccgccggtgggaaaccgccccaaccggagaccggcaggcggacaacccgtaaccgcatcccgcacatgcgaaaccggatcctgcgcacggatactgccccgcaaaagtaggttttttcctgcaaaagcgatgcctcggattgcgacgaccgcaggaaaggcccgcgaaaaacaaacgggtacctggcccggcaccccggcccggcaacggtgaaaaggccgttgcagttgcgataaagacagcgaccggcaccgaaaatccattccgaaaaacatggcaggcgtctacatccatatccctttttgcaaaagtcgctgccattactgcgactttttctccggcacatcgctcgagcgccgcagggaacttctcgcggcgctgcacgccgaactggaactaagggcaggtacagcggggccgttcccggccggagaacccctgtgcccggcgaatccccgaacagccccgaccacgacctcccgaacggaccaggccccggtttcccaaaccactccggcaaaaggtccgggcgtcataaccctctccgccgcaaaccggatcgagacgctctacttcggcggcggcacgccgagcctgctcacgccgcatgaattgggggactttatccggcaggtgcgggaacagtggcccgatgcgccactggaagaggtgaccgtcgaggcgaaccccgacgacctctccctatcctacctcgcagccctgcgccgcgaaggggccaaccgcctcagcataggcatccagtcgttcctcgaccgcgacctgcagtggatgcaccgccgccacgacgcccgcacggcggtcgaagcggtgaaggccgcacgccgggccgggttcggcaacctgagcatcgacctgatttacggagtgccgcaaatgacgcgcgaagagtggcgctacaacctcgaacaggccctcgaattgcagccggaacacatttcggcctatcacctcaccatcgaaccgcaaaccccgttcggacgacaggcgcgccggggcacgctccgcgaagccgatccggagacgagccgcgcccagttcgcattgctgcgcgagatgctctgcggggcgggttacgaacattacgaagtttcgaacttcgcgctgccggaacgccgcgcccggcacaacagccactattgggacggcaccccgtacctcggcatcggcccgtcggcgcactccttcgacggggagcgccgccaatggaacgtcgccaacctgagccgctacctcgaacttctgccgcagggcgcgcagtgcgaaaccgaagcgctgacgcccgacatgcaatacaacgaatacgtgatgacccggctgcgcacggccgacgggctgcgcaccggcgacctggccgtccggttcggggcacgcaaattgcagtatttcctgcggcaggcgcaaaaattcaccgccgcaggaacgctgcaggtcgaatccggacgctactatatccctcccgcacattggtttatttcggacagcgtcatttctgatctttttctcgcttaaggggtgcgccaaaccgcaaaaaacgtatatttgtaaggaacggcgacaagccccgccaaccggaacgggaggatttccagtcccggagtaaccggcaacacgtccaacaatgaacaaccgaaaccaacaagcgatatcaaaaatatgtcaaacacgcacgaattccatttggctcccgactacctgttcgaggtaagctgggaggtctgcaacaaggtgggaggcatccacaccgtgatcgccacgaaggcgctgaccgtcgaagagaaactgggcgaccactatatcctgatcggtcccgacatccaccgcgaggagggcaacctcgaattcgaggaggatccctcgctgctggccgactggcgcgaaacgctgtacagcagcggcgtgcgcgtccgtatcggacactggaaaatcgaagggcgcccggtagcggtactggtggacttcaccgaatatttctcacacaaggacgaagtgctcaaacggctgtgggaaagctaccgcgtggattcgctcagcggccagtgggattacatcgagccggtactgttcgggttcgcggccgcgaaagtgatcgaaagctacgtgcagaacttctgctcgccaaccgacaagatcgcagctcacttccacgaatggatgacctcgagcggcggcctctacctgatgaagcacgacccgaacatcgccaccgtcttcacgacgcacgcgacggtgatgggccgctcgatcgccggcaacggcatgccgctgtacggcgacctgaccaaactcaatgccgacgagctggcgcgcaaattcggcgtcgtggccaaacactcgctcgaaaagaccgcggcggaacagtacgactgcttcacgacggtgagcgacctgaccgcgcgcgaatgcaaatacctgctccacaaagacgtcgatctggtcacgcccaacggtttcgaagacgacttcgtctgggccgacgacgttttgaaacaaaaacgcaaggccgcccgcgagcagatgatcgccgtggcggaaatctgcctcggcatccactacgacaccgatccgctgatcgtcggcaccagcggccgctacgaattcaagaataagggactcgacgtcttcgtcgattcgctgatccagctggccgacggccccgccgcggcgctcaagcgtccggtgctggcttacatcaccgtgccggccggcaacgtcggtccgcgcaaggacctccaggcacgcctcaaggatccgaacgcgcagatggatccgtcggtgatacgcaacatcacgcactacctgtcggcccccgagtgggatcccatcatcggcaagatcaaaaacacgaagctgatggatcccaccagcccggtgcaggtgatgttcgtcccttcgtacctcaacggcgtggacgggatcttcgacaaggactactacgaactgctctgcggcatggacgtcaccgtattcccttcctactacgaaccgtggggctacacccccctcgaaagcgtcgcgttcagcgtaccgacgatcaccacctcgctggcgggattcggcctctgggtggccgagcactgcaaggaacacaaaggcgtcgaggtgatagaccgcaacgacgccaacgactcggaggtagtcaccgaaatcgcctcatcgatcgagaagttctgcaacatgagcgcaaaagagtacgcctcgtaccaggaatcggcgctcaaaacctccgaaatcgcgctctgggagaacctgtacgcctattacgcgcacgcctacgacgtcgcgctcgccaggatgaccgagcgcagttccggattcaaatacgagggcggaggcgaccagaacgaacagatcaacttcgtccgccagcaactcgtcagcaaccgcccgacctggactcggctgatggtcgaacggacgctgcccaaacggctgcacccgctcgaagagctgtcgaaaaacctctggtggtcgtggaactccgaggcctacgaagtgtgggagtacatcaattacgacctgtgggtagcctgcgaaaagaacccgatcgacttcctcgacaagctgcactattcgcgcctgctggagctcgagaaagacgaggttttcctctcgaagatggacgccacctacgagaagttcaaaacctacatggcccagaaaaaagatgcgaaagggccgaagatcggctatttcagcatggaatacggcatccacagctcgctgaaaatctattccggcggcctcggcatcctcgcgggcgactacctcaaggaggccagcgacaaaaacgtaccgatgatcgccgtggggctgctttaccggtacggctacttcacgcagcgcctctcggccgcaggcgaccaggaggcgggctatgagccgcagaacttcgcgaaactaccgatctcgcccgtccgcgaccagcacggcaactggctttcggtccagctcggcctgccgggccgtatcgtcaccgggcgcatctggcgctgcgacgtgggacgcaccgagctctacctgctcgacaccgaccacgacctgaaccgcgaagaggaccgctcgatcacctaccacctctacggaggggactgggaaaaccgcctcaaacaggagatgctgctcggcatcggcggcatccggctgatgcacgcgatcggcgcgcaccagaacgtctaccattgcaacgagggccatgcagcctttatcggcatcgaacgcatccacgacctgatcgagaaacgcaagctttcgttcagcgaagcgctcgaagtggtgcgctcctcggcgctcttcacgacgcacacgcccgtcccggccgggcacgacgcattccccgaatcgatgatccgccagtacatgggccactaccccgaccggctcggcatcacctgggagcagttcatcaacctgggcaagacgaatccgaacgatccgaacgaaaagttctcgatgagcttcctggcctgcaacctctcgcaggaggtcaacggcgtgagctggctgcacggcgaagtgagcaaggacatcctcggcggcatgtggcccggatatttcaaggacgagctgcacatcggctacgtgaccaacggcgtgcacttcttcacctggtgcgcggccaacctgcaacggctttacgccaaatatttcccggaagggttctccctgccggactactcgatcccggcttggcagaaggtgcatgaaattccggacagcgaactgtgggccgaacgcctcgtactgaaaaacaagctgatcgcacacgtcaagaaacgcgtgagcgacccggcccatttccgtttcgactcccccgtgcaactgatccgcatccacgagtcgctcaagcccgacgtgctgaccatcggcttcgcccgccgcttcgcgacctacaagcgggcacacctgctcttcacgaacctcgaccgcctcgacgcgatcgtcaacaacccggagcgccccgtgcagttcctcttcgccggtaaggcgcacccgaacgacaaaccgggacaggacctgatcaaacgcatcgtcgaagtggcggccatgccgcgtttcgcgggcaaggtgatcttcctgcagaattacgacatggagctcgcacgccgcatggtgcagggcgtcgacatctggctcaacacccccacgcgcccgctcgaagcttcgggaaccagcggcgagaaggccgtgatgaacggcacgatgcacttcagcgtgctcgacggctggtgggtcgaaggctaccacgagggcggcggctggaagctgccaatggagcgcacgttcgaagaccagaacttccagaacgaactggacgccgaactgatctacacgaccatcgaaaacgatatcgtaccgaaatattacaaccgcggcacggacaacgttccgcacgagtgggtcgaggcgatcaaggtctgcctcgccgatatcgcgccgaacttcaccacgaaccgcatgctcaccgactaccaggaacgtttctacggcaaactttacgaacgcaacacgcacatgcgtgccgacgacttccgcatggcgcgcgaaatcgcggcctggaaacgcaaggtgagcaacgcgtgggacaaggtgcgcatcgtcagcgcacagcgcatcgacatgggcaaagaggcgatcctcatcgggcactcctacaacgtcgaggtggtggtcgacatcgacgggctgaaagcggacgacatcggcgtggaaatgatcatggccgaccagatcgacgacggcaacaacgtcaaggtggtcgccaagcgcgaactgaagctcgaacgtcaggagggctcgctggccttctaccgcatcgcttcgacgcccgacacgaccgggtcgttcgacatcgcgatccgggtcttcccgaagaacgcgaaactaccgcaccgcatggacttcgcgctggtgaaatgggcataaccctccgggcgcgcgtccaaaacggccccgaacgcccctgaaggcaaacgggagccaaacgacgcacacaaaccggcggaatgccgagattagaaagaggcatacgccaaaaacactaccggataagcagatcgcttcccatgtaattaaaagcgacctcatccgtatgaaccgtggaagcccgggatcttcagtggcccgggcttccgttttgcacaaacagcagcaacgcccgtcccggcgcccgcatgctgcctttcgttatgcaggttcacatacgccggttccacgtaatgccggcaccgcgcaccgcgcgatacccgccccgtactatcattccggaaggcatccgccccacaagaagacatatcgactaaaaaacaaccggtattgcggacgagcgcggcgtcagagacgagctctggccgtccgttgcagaagataagcgtccgcaaggagcctgtctaacgaagcgtgtccgagcgaaagaagttgcgccgaccagcgaaccgaatgccgtagccgacaaaccggtttctcagcaagcgatccacggcaccgggacacaaataaggcacgcaaacaacaggacattaccgctccgaaccgccccacgaacatgttccacaggtatttacaggtcagtttcattccgctgttaccatatcgctatattttgccggaaacggttccttttttaattatttttttatatatttacaagtaaagaaaaacaaacccgtatgagcgttttacattttgacaaaaacgaactgggcaacctcgaatactcgctgcggcgcgaaatgctgagcaccaaccgcgccggggggtacatgagcaccacgatggtatgctgcaacacgcgcaagtaccatggactggtagtctgcccgcgcaacgacgaggaggaggaaaattacgtgctcgtttcgtcggtcgacgaaacgatcgtccagcacgaccagagcttcaacctcgcgattcaccgtttcccgggcgtttatgagccgcgcggtcacaaatacatcatcgacttcgactacacgccgacccccacgatcacctaccgcgtaggcggcgtcacgctgaaaaaggagctgctttggatccacagccgaacgcaactgctgatccgttacacgctgctcgaggcgcgctcggaaacccggctccggctcaggccgttcctcgcattccgttgcagccatacgctcacccacgcgaacatggcggccgacacgcacagttaccccgtcccggggggcgtgcgcaaccgcctctacgaaggctttccgtggctctacctgcagaccggcacggcttccgagttcgtcgccgcacccgactggttctataacttcgaatacgccgaggaggcgcgccgcggctaccccgcgcacgaagacctgctgacgaccggatatttcgagatgaatatcgccaaaggccaaagcgttatcttttcctgctctaccgaagaggccgacccggcaaatttcgacacggtttttgcagaagaattatcgcggcggtcgaacaagatcgacttcctctcctgcctgcgccattcggcgcgtcagttcatcgtccggcacggaaaccgcaccgaactggtggccggctacccgtggttcggacgctggggacgcgacacgttcatcgcgctgccgggcgtaacgctcacgcagggaggccttgaatcctgccgcaaggtgatcgacacgatggtgcgcgagatgcacgacgggctattcccgaacatgggcagcgcctacaattcggtcgatgctccgctctggttcttctggacgctgcaggcgctcgaaaaacacgtcggcgccgacgagatatggaaaagttacggccatgcgatgaaggatgtactcgcggctttccgccgcggcatcggcgaccacatccgcgtacacgacaacatgctgatctgggcgtcgaacccgcacctggcgatgacctggatggacgcggtggtggacggcaaacccgtgacggggcgcgacggttaccaggtcgaaatcaacgcgctgtggtacaacgccatctgctacacgctggagctggcgcgcgaacaccgcgacaacgccttcgtccacgaatggaaggaggctcccgaccggatcagggagacgttcaacgaactgttctggtatccgcaggaggagtatctcgccgactatgtggacgagcgcgggcagaacaccttcatccgcccgaaccagatcatcgcctgctcgcttccttacggcatgctgagcgacgaccggaaactgagcgtaatctcggtcgtgcggcgccacctgctgacccccaaggggctcaggacgctctcgccgcgcaacccgctctacgaaggacggtgcgaaggcgaccagcccacccgcgaccgggcttaccaccagggaaccgtgtggccgtggctgctcgaacactacgtgaaggcttgcttcgacatcaaggggaaagagttctgcaacgaggcggtcgagatcgtcaagaacttcgaagaggacatcagcgacaacggactggcgtcgatctcggagatttacgacggcgatccgccttacaacgcacgcggcaccatctcgcaggcatggagcgtcggggcgatcctgcgcatcaacgagatgatcgaggagtacggcggctgcaaaagcagctattgggacaacctgtaaccccggccggaagtaaacgaagcccgatcgcctgttttgctccgccagacagaccgaacggcaaacgcagccgctaaagcaataattaacagaacagtaatcacgataaaaacgaaacagatgagagtactgatgttcggatgggaatttcccccgcatatcgccggaggactgggcaccgcctgctacggcatgacgcgcggactggcccagcacggcgtaaaggtgatcttcgtgatgccgaaagcatacggcgacgaagaccagcagttcgtgcgcgtggtcaacgcttccgacgtggaaacgctctacggcgacccgaagcagaaagacatctgggaaaagatgaccttcatccacatcaactcgaacatggtgccctatatctcgccggaagagttcgccgactactccgagcaggtacgcaacggaggtaccgttcccgtggggggcgacctgtggaaggagcgttacagcttctccggcacctacgggacgaacctgatggaggagatcgcacgctacgcgatggtggcggcccaactggccaaagacctcgccggacaattcgacgtcatccatgcgcacgactggctcacttactatgccggcatcgcggccaagcgcgtttcgggcaaaccgctggtggtgcacatgcacgcgacggagttcgaccgcagcggcgagaatgtcaaccagcaggtctacaacatcgagcgcgcaggcatggcggccgccgaccgcgtgatcgcggtgagcaacctcacgcgcaacatcgtgatcaacaagtacggcatcgccccggaccgggtggtggccgtgcacaacgcggtacgtttcgcctcgcaggaactcgaagccgaagagcggggcgtggacgacaagatcgtgaccttcctcggacggatcacctaccagaaggggcccgactacttcgtcgaagccgccgccaaagtgctcaaacggctcaagaacgtccgcttcgtgatggccggcagcggcgacatgctcaaccacgtcatccgccgcgtggcgaaactcggcatcgccgaccgcttccacttcaccggattcctcaaaggagacgaggtgcagcggatgttcgcgctgagcgacgtatacgtgatgccttcggtttcggaacccttcggcatctcgccgctcgaggcgatgaagtcgaacgtcccggtgatcatctccaagcagtcgggcgtcgccgaagtgctcgactatgcgatcaaagtggactactgggacgtcgatgcgctggccgatgcgatctacggactggtcaaatatcccgcgctggccgagatgtcgtcgaaaaagggacggcacgaggcgacgaacctgcgttgggaagacgccgccaccgagattatcaacgtgtacgaatcggtactctgagccccggcgccgcttcggacattttaaccgcaggggaaagcgaccggcccggacaaaacgcgccggctttcccgaaactcccggccgtcagaagtacaggccgccgaacatacagaatgaacaggcgcggaccacaccggcccggcgctacgatacgaaatcaaaaacacgacgcatatgaagaccgtctgcttctatttccaggtccaccaaccgctgcggctgaagaagtaccgcttcttcaacatgggcaaggaccacaactacctggacgacctgaccaaccggacgatcctgcagaaggtagcccacaaatgctacctgccgatgaacgcgctgctgctcgagcagatcaagacgcacaagggcaaattccgcgtcagtttctcgatgtcgggactcgccatcgagcagttccgcatctatgcccctgaagtcctcgacagtttccgtgcgctggccaagacgggctgcgtcgagttcctcggcgaaacctacgcgcattcgctcgcttcgctgatcaaccgtgacgagttcgccgagcaggttcagatgcactccgacgcgatcatgcaggagttcggcacgcggccgcgcacgttccgcaacacggaactgatctactcggacacgatcggcgaaatggtcgccgagatggggttcagttcgatgctcaccgaaggcgccaagcacatcctcggttggaaaagccccaacttcatctatgccaacgcgctgaaccagaaactcaggctgctgctgcgcaacttcaagctcagcgacgacatcgcgttccgattctcgaacaggagctggaacgaatggccgctgaccgtcgaaaaatacgtcggttggctcaccgacccggatatgggcggcgacacggtcaacctgttcatggactacgaaaccttcggcgaacaccagtgggccgaatcgggtattttcgaattcatgaagtacctgcccggcgcggtgatcgccgacggcaggctcaagttcgccacgccggccgaagtgaccgaggcacaccagcctgtcgcgatcctgcattcgccctacccgatttcgtgggccgacgaggaacgcgacgtcaccgcatggctcggcaacgaactgcagaacgaggctttctcgaaactgtacgcgctgtacgacaagatacacgaactgaacagccccgacctgaactacgtctggcgcttcatgcagagctccgatcacttctactacatggcgaccaaatggttctcggacggcgacgtgcacagctacttcaacccgtacggctcgccctacgaggcgttcgtcaactacatgaacgtgctgagcgacttcgagattcagatcgagcggaggctggaagcctaccgcaacgcacaaagcgttccggcctgatctccgcgcatcatccggctgccgcccgatgcgcattttaccgaaaggggatccgggataacgtggctttcgaaaaacgaaactccgggacacactcccgcaaacaggtttattccggtctccggccatccgtcggagaccctgttttgaacgggttgttttaagcggcccctgcggcaacgaccctgtcaaggaggatgcccgtccacggcgcccccctatgacaaacggcaaacggcgaacgacgatcgtcccccgtacccggagaccgtacgatccgccgctcccggccggtggatgcgaaccaatcccctgaggccgcatacaccgtttgcatgcgccggttaagccccggcccgcgtacaccaagccgcgctccggctcatccgggcggttaatcaacgccggtggccgcgcatcagccaacgcataccgatccacccccggttgaccggatggctccaccgcaaggaaaagcagcgcgggatgccgattgttgaaaaattgttgtatttttgacccgtagaacccaaatatccgaaatgaaaaaactgctgttactgtcggcaacggccctggtggccttctcctgcggacaaaagaacaaagcccatatctcgggaaccttctccggaatcagcaaagacacgatctacctggagatgctcacgaccaaaggacgtaccgtcgtcgattcgaccgttaccaaccagcaggggaactaccgcttcacggtgagcacccccgtggcagcccccactttctacaacatcgtctacaagcagagcagcatcccggtgatcgtctccccgggcgaaaaggtgaaggtcaattcgctgtgcgacctcggccgcaactacaccgtcgagggctccgatgactcgaaactgctcaaggaattcaatacgatgtattccaatggcgtccgctcgctcgactcgctggcaaacctctattcggaaacgcgccccacgcccgacaacgacgcgcggcgcacggcactgttgcgcgaatacacgcagcgctatgtaaaaatcaaacgcgaacacatcgcctttatcgtcaaaaacgcgtcgtccatggccgccgtttatgcgctctaccagcgcctgcccaacgacgaagcgctcttcaatgcgaacgacgaccgcgtctactaccggatggtagccgactctctcgcggacaaatacccggcctcaccgcatgtaatcgcactgctacgggacgtcaagacgcaggacgatgccgcagcgctcgcacaacaggttagccgtcaacaggccgaaacggcagggctgaaccatcccgaaatcacgctgcaggatatgttcggcaaggaccataagctctccgaattgaaaaacaaggcgatcctgctcaccttctggtcggtaacggacccgaaaggaccggccatgaacaacgagatgaaagagctctacaaagagttttccggtaagggtttcgacatctaccaggtgtcgctcgacagcgacaaggcctcgtggatattggccgtacaggcccagaaactgccgtggacgaacgtgatcgaccccaacggcttcacgggccttcccgccatgagctacaacgtcgccgccacaccggtcaacttcctgatcgaccgccggggcaacatcacgggccgcaacctgcagggcgccgcattgcgcacccgcgtagccgaactgacgcgctaatatgtactatttcgcctcggacatccacctgggcctgcaaataggctccgatccggagaaccgggagcggttgttggtacaatggctcgacgaggtatcgaaagatgccgacgcgatcttcctggtcggcgacattttcgatttctggtacgaataccgctacgtggtacccaaaggtttcacgcggctgctgggcaagctctcggaactgaccgaccgcggaattcccgtacactttttcggcggcaaccacgacatctggacctaccggtacctgcacgacgaatgcggcgtcacactgtaccacagcccgtacaccgaattcgaactggacggccggaaagtgattgtcggccacggcgatatgctgggcccgcgtccggcggggcaacgaatactctccgccattttccgcagcaggctgctgcaatggctcttctcaatgctgcatccctactgggccatgatgctcggcaagggatggagccgttcgaaccgcacttcacggccggtcgcgcacattttccgcggcgaagaggaaccgatcatcgggtttgcgcacgaataccaacggacgcacccgtcggccccggccgacctgttcatttgcggccacacccactgcgccgaagtgtatccgctgccagaaggcggcgcagtagctttcctcggcgaatggatcgacaatcccctgtacggcgtgctgggccccggcggatttgaactgaaaggctatccggacagagccgtaatcgggaagtccggcaccacaaggcaataacaccctgcggccacggcggcgctcccggaccggaatccacgaaacaggcgccgaaaacccgacggtgccgtgccagcgtacaacggactgccccggcatccgcaaaacttcaaacgatatatgcaagcttacctcgacctgctccgtcacatccagacccacggcacccccaaaggcgaccgcaccggaaccggaacgaccagtacgttcggttaccagatgcgcttcgacctgagcgaagggtttccgctgctcacgacaaaaaaactgcacctgcgctcgattattcacgaactgttgtggttcctgaagggcgacacgaacatccgatacctgcacgataacaaagtgaccatctgggacgaatgggccgatgcgaacggcgatctgggccacgtctacgggtaccagtggcgcagctggcccgcgccggacggacgccacatcgaccagatcgcacaagtggtcgagtcgatccgtacgaatcccgactcgcgccggcacatcgtcagcgcatggaacgtggccgagatcgaccaaatggcgctgccgccctgccacgccctgttccagttctacgtggccggcggcaagctctcgtgccagctgtaccagcgcagtgccgacgttttcctcggcgtgccgttcaacatcgcctcgtacgccctgctgacgatgatgatggcacaggtcacgggacttatgccgggggatttcgtgcatacgctcggcgacgcgcacatctacctcaaccaccgtgaacaggtcgcggagcagttgacacgcacgccccggccgctgcccgtgatgaagctgaatccggacatcgaatcgattttcgacttccgctacgaagatttctcgctcgaaggctacgatccctatccggcgatcaaagccccgattgcagtataaccagcgccccacggcactccgggcgcaggctgcccggacgccccggaagagccggcaaccttaccggaccatacgatacaaacaaacagacaaaatgctttcgattatcgtcgccatcgcccgcaacgggatcatcgggtcgggcaacagcctgatctggcacatcagcgaagacctgcgccgcttcaaggcgatcacttcgggccatccggtggtgatgggccgtaaaacgttcgagtcgatcggccgggcgctgccggggcgcacgaacgtcgttatcacgcggcaaagcggtttcctggccgaaggatgcacggtcgtccactcgctcgaagaagctctcgcactgtttccggagagcgaagaggtcttcgttatcggcggcggcgagatctatgcgcaggcattgccgcgcgcccaacgcttctacctgaccgaagtggacgcggattacgaaggcgatacccgtttccccgactgggaccggtcgcaatggctcctcacggagcaggaacaccatccgcacggcgagaagtttccatccccttttacgttcctgacctacgaacggaagcctgcccggtaatccggacgtctatcctctctcccctacggcgacagcccgccccgggttccatacgaccgaaaaattctccgcaaccgggttccgggcaagcggttttccgaaatcttccccgtccatcaatgcgcttcgagccagttgcggcccacaccgcactcggcgaccagctttactttcaactcggcggctccctccatgcagcggataacgatttcacgcacctgttcctgctcgctgagcaggacatcgagcaccaattcgtcatgcacctgcaggataatcttcgattgcagccctttgcggcgcagctcgccgtgcacggcaatcatcgccagcttcatgatatcggccgcgccgccctggatcggagcattgatcgcattgcgctccgaaaggccgcgcaccaccgcattgcccgaacggatatcgggcagcatccgcttgcgcccgaaaagcgtctcgacgtacccgttttcgcgcgcctggtcgatcacacgctccatgtactgccggatatcggggtacgactggaaatacccgtcgatgatctccttggcttccgtacgaggaatgttcaaccgttgggccagtccgaacgccgaaatgccgtagatgattccgaaattggccgttttggcccggcgccgctgttcgcgcgtcacatcctctttggccgcatggaacagcagggccgccgtcgcggtatggatatcctcgccgtgcccgaacgcttcgatcatcgcccggtcgccgctcaggtgcgccatcagccgcagttcgacctgcgaatagtcggctgacagcagcacgcggtcgtccgacgacgggatgaacgccttgcggatttcgcgcccgcggtcgtcgcggatcggaatattttgcaggttcggattcgtcgaactgagccgtccggtagccgttaccgcctggttgaacgaggtatggatccgccccgtcagcggattgaccagctgcggcagcgcatcgacataggtcgaaagcagcttgcgcaacccgcgatattccaggatcatcccgatcaccggatggcggtcggaaagcatctgcaggtactcctcgtcggtacggtactgtttggttttggtcattttcggtttcgggtcgatcttcatgcggccgaaaagcgcctcgcccagctgtttggccgaattgacgttcagcgacggatcgcccgtcgtttcacggatacgctcctcgagggccgccagctccccggtcagctcctgcccgaaggaggccagcgcagcagtgtcgatcttcacgccggtcatttcgatgtcggcgagcaccggaatcagcggttcctcgatcttcgcatagagttcggtcagtcccgcctgcatcagcagcggccacagcacacggtaaagccgcagcgtcacgtcggcatcctcggcggcataggcggccaccgtcgccaccggcaccatatccatcgttttctgcttggcccccttaccgatcagcgcctcgatcggcacaggatcgtacccgaggaacgtgcgggagagatggtccatgccgtgccgcgactcggggtcgagcaggtaatggatgatcatcgtatcgtagagccggccccacacctcgatgccggcactgcgcagcaccatcaggtcgaatttgatgttctggccgattttcgcgatcttctcgtcggcaaagaccggacgcaatgccgcgaccacacggtccgtgttctccctgttgcacgggatataccatgcctcgtgcggttcgatcgcgaccgaaattccgaccaggcggtctccgaacacgtcgaatccggtcgtctcggtgtcgaagcagaacgcttcgcaggcggccagccgggccgcgagcgcctccagttcggcaggttcggtcacggtatggtaagtatgcggcaccgtgtcgatcgtctggtactgctgcccgaaaaggccgcctgcggacgttacccggtctcccgccgcgcccgcattcgcagtatcccgattggggtcatgctgcaccattccgccaaccccggaaacctctcccggtcccgcaaacaggtctcgctgtcccgccggggagttccccgcgtaaggctccgaaacgctatcggaaggtgtcaaatcacctgccccgggaaacgcggccccggcatccggaacctgcccgaacgcatcgaacagcgaaccctgcgatgcatcctgcacggcatttcccgacgcccggctgcctgcaacgcccgctctccggccatccgaagctcccggcatttcggttgtcccggccccaccggcaattccgcctgtatccgtaatgcccgaagcgtgtgcgcccacctgacccgcacttccccgtccggcaccggatgcggtgccggcaacgcccgccgccgtaacgaacggattgccctgcaattcattgaggaacgaacggaaccccagctcccggtagacatcggccagcatctcgagatcggggttcaccatcgtaagtcccgccggatcgaactcgaccggcacattcagctcgatggtcgccagccgtttggccaacagtatctgttcgcgcagcgcctcgatgttctcgcgctgctttcctttgagcttatcggtattttcgagcaggttctccacggtaccgaactcgcacaccagtttgatcgcactcttctcgccgatgcccggcacacccggaatattatccgacgcatcgccccacagcgcgaggatgtcgatcacccggcacgggtcgtcgataccgtaatgctcgcggatctgttcgcagccaatgacctcgattccgtctcctcccttgcgctgcttataaatgcgcacggtcggacggatcagctgcccgtaatccttatcaggcgtcaccatgtaaacttcatacccggccccggcagccttcatcgacagcgtgccgatcacatcgtcggcctcgtagccgggaacctcgatcaccggaatacgcatcgcctcgagcacccgcttgatgtagggcaccgccgcaatgatgtcctccggagtagcctcccggttcgccttgtactggggataaatttcatggcggaaattaccgcccttggggtcgaacgcgacgcccaacaggcgcggctcctcgcggcggatcagatcccgcaggaatttgacgaacccgaaaatcgccgaagtattcaacccttcggaattgcgcatcgggcggccgataaaagcataataagcgcggaaaatcagcgcgtaggcatcgatcaggaacaatctctccatcagcagttcggtattggctttgaacggagtggcgcgatgcggaccgatgtcggcccgtggcgatccggcaccgggcgactgccggtccgactccagcgggcagccgggcaccgcccggcacaaaccgcagtgcgccacaccgggacatgcgttctccgtttgtttcaacaaaatcccgtgcacacacggggctattccctcaagtctgtcgcaaccggcatttccgacgtaccggttacccgatttcaatcccgtacacggcaagcaaccccgcaaggttgtaaggggaaaacttcgcccgccgcaacatattgcggcccggatcgatcgcgaactccgtcgccgtgcggaaatcggctctttcgagccggcaacggtcgaattcggttgcagacagtttgcatccgtcgaacgaagcaccggtcaggtcgctctccgcgaacaggcatcccgtcagttcgcaatcgtcgaaacgggttccgggcattttcagttcgtagaacgagctgttatcgagccgcgagcggacaaacgataccccgaagcccgccttcacgcactgtccgaaatcgagccccgaaagcaggcagccgtcgaaaacggctttgcgcaggtgtaccgcactgagtccgggtaccaccatgcggcattcgcggaacaggcactccgaaaagaaggcgtgcgacaggtcggcatatgaaaaatcgcacccggtaaaagtacagtgctcgaactcggcttgcacgaaatcccgtaccgcgccgtcgaggcgcgtaaaggtccggtcggcatagagcccgccccggacgacatcggcggcctccggccgctgcggttgctgcgccgccggtgctcccgtaccgctgtccgtgcttttacccctgcccatacctttgcctgtgtccggtttatcctgtatcgtctcctcgcttagccccgctctccgttcccgcctgcaccgcgggacgtatcaggatcaaaggttatccgaggcataccactcagcgaacgaggtggccgtctcgtgcagtttcacgctgaacaactccacgcccgcaggcagttcggccgcgatcgcacgggcgaaatcctccaccatattctcgcaggtgggttggtacggagtaacgatgatcttcgtgtaagtaccgcgcatcgcttccagcgccgcatggttctcaggcgtttcgcgcagtacgagcgcatggtcgtaacgctcgacgatcaaccggccaacgatgtgtttcaggtcaccgaaatccatcaccatgccgtatttcggactttgcggatccctcaccggcacaccgcgtaccgtaacgaacaggcggtacgaatggccgtgtatttc

SEQ ID NO: 1052 - DNA, 25879 bp, unidentified
  source 1..25879: mol_type = unassigned DNA
tgacctacgccgccctgagcggctttggcgagaccatcaagaccgagggcaaccagaacaatgaactgggcatgccccgcaccctgatgcggctggaaagcagcaccgagtacgcggtcatcgagatgggcatgagtcacgccggcgagatcgaccgtctggcgcgggcagcacggccggatgtgggcatcatcacctgcatcggcgtgtctcacatcggcaatctgggcagtcaggagaacatctgcaaggcaaagctggagatctgcaacggtctgccggagggtgcgccgctggtgctgaactacgacgaccccttcctgcgcaaggcggtgctccccgcccatgtgcgcccggtgtggttcagcctgagcgatgaaaacgcagacgtctgcgccctgtccatccggcaggagactgacggcatgagttttgtgctggaagatcaggagcacggcacctttgtggtgaacatccccgccatgggacgccataatgtggcaaacgctctggctgcctactgcgccgccacccgtctggggtgtgacgccaagagggtcatccgggggctttccaactttgagcagaccggccgccgccagaaggtagtggacagcgagggcgtgaccgtcatcgaggactgctacaacgcaaacccggacagcatgaaggctgcgctggcgatgtttaaagatttcccctgcaagcgccgctttgccctgctgggtgatatgctggagctgggcgagctgagccgcgaagcacacgaggagctgggacgtcttgccgccgagagcgggctgtattgcctgatcacctacggcgagcaggccaagcgcaccgctgtggtggctgcggccaagggggtagagaccctgcacgcggacagctaccgcgaggctgccgatgccctgctgagccgggtgcagcccggcgatgccgttctggtaaaggccagccacggcatggcactggaaaaagtgctggatatcttctacgaagagcataaagaagcagaagtataactatttggcgaaatggagtgtctgagttatggagcgtttcgccttggcagcggcggtggtgctgggctttgcccttacggcagccctgtgcagcctgtttgtgccgctgcggcgggtgctggaacgccgcgaacaaaaccagcagccggcacagtctgagcagccccggcctgcacccctgcgcgccccgctgtggggtgggctgtgtgcggcggcgggcacggtggctgcggtgggcgtgggctggcttgccgcctgcgtaggccagccggagctgctgggcagcgagggccggctgatgacacggctgctcacggcgctggccggaagccttgcctttggggcagtgggtcttgcagaggatcttgcccggatgcgcagcccggcggcgctggggctgcggcgggacgtgcggcttttgctggaagcactggccgcggcattcgttcttttgctgctgcaggcagcgggctgtctgccccgggggctgggcgtgcctggggcggggtatgtgctgctgggcagcgccgtgccctttttgtgggcggtgctcatggtggcgctggctgagtgtgcccgcatcgccgagcgggacgaaggcacggtgtgcggcgcggcctttgtggccatgctggcgctgatgatggcagaggccggcttgggcgtgcccgggctggcggtgctgcccgccgcgcttgccggggcactggtggcactgctgctgtgggcgttccccccggcaaggctgggggtgggctgctgcggcagcctgctggcggcgggtgccatcggctgcatcccgctcagtctggatatgaccagcctgaccgtgccgctggcgctgcccttctgggcggcaggcggtctttgggcagcgcagctgctgggtgcaaaacgcaccggcaagcccttgcgctgctgggtaaaaaagcataaaatgagcccggagacggtgttcctgtgcagctttgcgctgagcgctgtcggctatggactggcgctggcgctgctgcgctggtgctgaccgggcacagagagggaagggagcgcagatggcgactaaccgcaaaaaacacagagcgccggtgccggtgttccagcgagacccgggcccgtggtcccggctgctgatcgactggctggccacgctggctgttattatgatctttgggctggtgatgctgttcagcgccagctacaccaccggttacctgcgcatgggcgacagcttccactacatcaagcagcaggcgctgtgcatgatactggggctgggctgtatgttcctgataagctatgtggatcaccgttttctgcgcaagatggtggtgccggggtacttcatcgtgctggccatgctggccgtcaccctgaccatggcacccctgaacggctgccgccgctggatccgctttgcaggccttacgctgcaatcctcggaggtggcaaagtttgagatgatcctgttcagttcccatcttgcagccaaggcaccgcaggtggagcggctggacccggagcgccgcatcctgcttaccccccgggagtggctgcgggtgcgggtatggaagcagctggtggtgccggtgctgccccttataccggtggtcattctgctggcgatggagccgcacatgtccggcatcgtgctgacggtggcggtggtgggcaccatcctgctgctgtccggcagcggcggtgtgctgacatgggcgggtgccatcacggcgggcaccctgctggagaccctgctctcccatgtggactctatcccatacctgcaaaagcgtctggacggctggacgcaggatctgagccagatgaccgaccagaccgtgcagagcctttatgctatcggctccggtggactgaaggggctggggctgggcaacagcgtggaaaagcagctctggctgccggaaagcaccaacgacttcattttcagcgtggtgtgcgaggaactgggcttcattggcgcagtgctcatcatcgtgctgttcgtgctgtttatcgtgcaggggctgctcatcgcctataaggcggagaacctgtactgcaccatggtgggcatcggcatcatggcgcagatcgcgtggcaggtgttctgcaatatcgccgtggtcaccaacaccctgcccaacaccggcatcagcctgcccttcttctcctccggcggcacaagcctgattttgctgctggcagagatgggcgtaatggtgaacataggccgcaacggcgagcgggtggcgcagcagcgggagcagatgcgtgcccagcgggaagccgcccgcgccgagcgggaagcagagcttgcccgcaagaccattgacttggcttctgcccgcgcagcccgcacagaacagtaaaaccgcaagcccgcccggccgcaggccgggcgtttataaggaggaatcaccatgcgtgttctcatcgcagccggcggcactgccggacatatcaaccccgcattggccattgccggtgctctgaaaaaagccgaccctaccgccgagatccactttgcaggccgtaaggagggcatggagtaccgtctggtcacacaggcgggctaccccttccaccacatcgagatcaccggcttccagcgcaagctcagtctgcacaacatcaagcgcaatatcattaccctgtggaatctggccctctccggtcccaaggccaaggccatgatgaaggaagtaaagccggatctcgtcatcggctgcggcggttatgtgtccggcccggtggtgcgctgcgccgccaaaatgggcattcacaccgccctgcatgagcagaacgctttccccggtgtgaccaacaagctgctggccccggatgtggatatcgtgtttgccgccgtgcccgctgccgtggaaaagctgggcgcaccggacaagacccttgtggtgggcaaccccgtgcggccggaagtgtttgcgcaggcagcgaaccgcgaagccatccgcgcacagctgggtgcgggcgaccgcaccgtcatcctgtccttcggcggcagcctgggtgcacgccgggtgaacgaggtggtggcagacctgtgcgcctgggagcagcatgagcacaagccggtgctgcatctgcacgccaccggtcagtacggggtgcagctgtttgagcagctgcaaaagcagaaggattttgcccccggcgacagccttgtggtaaaggaatacatcaacaatatgccggaactgctggcagcggcagacctcgtcatcagccgcgccggtgcgctgacgctggccgaactggaggctgtgggacgcgccgctgtgctgatccccagccccaacgtggcggagaaccatcagtactacaacgccatggaactgcagaaggccggggcggctgtggtgattgaagaaaaagacctgaccggtgaaaagctggtgcagactgtttctgccatgctggcacagcccggcaagctggccgaaatgggcaaaaacgcccgcagcctgtctgtggacgacagtctggaccgcatcactgcggcgctgctcaagctggtaaagaccccgtgatgcagacgtggaataaacaggaaagaaggtgcaaatgatgcagcagaaccgtgaccgcaacggcagaccccggaacaccagaccctatgatctgaaccgggatgtggcgcgcacctctgcgccttcgcaggatcatacgccccggagcaccggcagcagccgctacggctacaacggcgagccgctcagccgcccgccctcccgcagcgccaacggcagtgtgcgctcctcccgggcagataacagcatccagttccccacccagacccaatcccagccccgccgcccggcgcaggggcaggggagcaataccacccagtaccccgccggtaaccgcccggcgggcagcagacccaaaaacgcgaagtccggcggcaaacagcgccgcccggcaaacaatgcccgcagcgggcagagcagccggaaaaaccagaattaccagaatgcaaaccggcagcacccggcgggcaacgatcagcgcctgcgcccggcgcaaagcgccccgcagcaaagccctgcccggcgggaaatgcgcaaaaagcgcaaggtgacccgcgccacattgcggcgccgccggatactgcgccgcctgaccgcctttgccatgctgctgtgcgtcattggcgcaggcatctacctgaccatgaccatgctgttccgtatcaactccattcaggtacagaccccggacggcaagcaggtgaccgagatcgctggctactccgcagacagcattttgcagcggatgggcgtgcagctggaagagaatatcttcagctttgaacccggcgaaaaggccgcggtgctggagcagaacttcccgctgctgggctccatcaaggtaatccgggactaccccaacaccgtggtggtacaggtgaccgaggctgtgcccgcctacgcggtgcaaaacggcaataaatggcttgtgatctcggacaaatggaagatcctgtccgaggaaagcacccagcccgaggggctttgcaccctgtacggcggcaagctgcaggacaccaccccgggacagggcttctggttcgtggacgatgcggacgcggcaagcgcctccggctcggaaaccgccgaaagtgaaagcacggggagcacagagaacgaccgtatggaagcgctgcgcaccttagtgggcaagttgggagaatacgacctgtcgcaggatgtgacacggctggaagtggcagacaccgagcagctcgcatttttgtatcaggatcgcatcagcgtactgctgggcacgctgaacgatctggattataagctggaccgtgcccgctatgtgctgaccaacgccgacggcaagggctgcggccccaccgacaccgggcggctggacttcagccataccagcgccagcagcacccgcaagatctattttgcacagggcgagcccaccctgccctccggctatgtggtgccgcccaaggctgaggaacccgccccggcagaggacaccgccgacagcaccgacagtgcagaaagcacggatactgccgacaccaccgaaccggcggctgaaacggacaccgagcagctgcccctgacccaccctgaccgcatgacggccaacgaagaagaaaaccccatgtaaagaagctctttggaggagactgtatgaagctggaacaactgatggaaggcgtgccctttacccttgtgcagggcagtctggatactgagattgcggatatcatctacgacagccgcaaggctgccccggggcttttgttcgtgtgcatcgtgggcacccagcgggacagccacgcgtttgccgctgactgcgccgccaagggggtcagcgcgctggtcatccagcacgatatcgacctttctaccctgcccggggtgaccgtggtcaaggtggagagcagccgctatgccatggcgctgatgagcgccaacctcttcggcaaccctgcccggcagatgaccatgatcggcgtcaccggcaccaagggcaagaccactaccacccacatgatcaaaagcgtgctggaggccgcaggccgtaaggtgggcatgatcggcaccaacggcatctactatatgggacgccacaaggacaccgccaacaccaccccggaaagctacgagctgcaaaagaccttccgggagtttctggatgccggctgcgataccgcgctgatggaggtatccagtcagggcctgatgatggaccgcgtggcgggcgtgcactacgatgtgggcgtgttcaccaacctttcgccggatcacatcggccccggcgagcacaagacctttgaggagtaccgcagctggaagggacagctgttcaagcgctgcgatgtgggcgtggtgaacattgacgacgagaacaccgccgccctgctggaaggccatacctgcaagctggtcacctatggccgcgatgaaaaggccgactaccgcgagaccggctacgagctgctgcgcacccacgattttctgggcgttgccttccacgttaccggcaaggacgagatggacgtcaaggtgaatatgcccggcgagttcagcgtgtacaacgcgctggcagcgctggccgtgggcaaggtgctgggtctgccggatgccgccatccacgatggtctgggcaagtgcgtggtgaagggccgtgtggagctggtgcccatcagcaaaaagttcaccatcctgctggactacgcccacaacgaggtatccaccgagagcctgcttaccaccctgcgcgcctacaagccccaccgtctggtggtggtgtttggctgcggcggcaaccgctccaagctgcgccgctacggcatgggcgagatctgcgccaagatggcggatttctccatcctcaccgaggacaacaaccgctttgaaaaggtagaggatatcatcgcggatatccgcgagggcatgaacaagggcaacccggacgcaaagttcgtggagatccccgaccgtctggacgcgctgcactacgcagtggatcacgcacaggagggcgatctgatcgccgtcatcggcaaggggcacgagacctaccgcgaccgcgagggcgtcaagacccccttccttgagcgggaactgctggaagagtacgcacagcagatcgggctggaataagaaaataatattattattgcgggaaaggccgctgcacaaagtactgtgcagcggcctttttgcgtctgtgggagcccctatataaagaggaagcaaactgtgtcgaaaatgtaaaagataaaaatttttaactaaaaccattgacttatccaacggtttgattataatggtcgtgttcgatacctcataaattttaggtaaataattaaaaacaaacagtgaacataaaggagaatactaccatgactttcgaggaaatgaagaagatcgttgtcgataccctgagctgcgatgaggacaaggtgaccatggaggccagcctgaccgaggatctggaggccgacagcctggacgctgtggagctgaacatggcactggaagaggcctgcggcgtgtccatccccgatgaggagctggcaaacctcaagaccgtgggcgatatcttcaactacatcaatgcccatgtctgaggctgaccgaggcgaaacgagatgaacagtatcaaagacctgctgccgggcagcatgcgggagcgcaccttccagctgaaggcccggcgggatgcgggtgccgtgtggaacgacccgcagttcgtggaatgcaaaaagtgcggacgccgcgccacccgccagatctggaacaaggcgcagtacgtctgccccaactgcggggtgcacctgcccatcggcgggtactaccgcctgagcctcatccttgataagggcagcttccgggaactggacgccgaccttgcaccgcaggatgtgctgcagtttcccggctacccggaaaagctggaagcacagaccggcaagaccggcctgaaggaggctgtcatcaccgccacggggcgcatcgagggcactccggttgtggcagcagtgctggacagccggttctttatgggcagcatgagcaccaccgtgggcgaaaagatcacccgcgccgtggagcacgccaccgcaaagcacctgccgctgatcatcttttcggccagcggcggcgcccggatgcaggagggcattttcagcctgatgcagatggcaaagacctctgccgccatcgagcggttctccgcccggggcgggctgtacatcagcgtgctgacccaccccaccaccggcggcgtgactgccagctttgccagccttggcgacattatgctggcagagcccggggcgctgatcggctttgcgggcccccgggtcattgaacagaccatcggcgaaaagctgcccgcaggcttccagcgcagcgagttccagtacgagcatggctttgtggacaaggtagtgccccgtaccgaaatgcgcgaaacactggcgcagctgctgcggctgcacgcctgaggagggagcgccttatgatcaaggacatcttacaacagctcgcaccgctggatgaaaagatcgccgctttgcgcggcgacccggcggacgagaacatgaccgatatcaccaaccacgctgccgagctggcagagctttccgcacaggaggacgctttgctgtccggctgcggggcgttgaccgcagaggacagagtttttctggcacgccacccggagcgcccccacatcgacgagatcgtggatgcactgttcaccgacttctttgagcagtgcggcgaccgccagtgcaaggaagacgccgccattctgggcggtgtggcgctgttccatggccagccggtcacggtcatcggccaccgcaagggcagcacgctggaggaaaatctgcgctgcaacttcggtatgcccgggccggagggctaccgcaaggccctgcgcctgatgaagcaggccgaaaaatttgaccgtcccatcatcaccttcatcgacaccccgggcgcataccccggcaaggacgccgaggagcgcggacagggcgaggccattgcccgcaacctgatggagatgagcggcctgaccgtgccggtgatcgcagtggtcaccggcgagggctcttccggcggcgcactggcgctgggtgtggcaaaccgcatcctcatgctggaaaacgccgtctactcggtgctcagccccgagggctttgccagcatcctgtggaaggattcctcccgcagcggcgaagcctgcgagatcatgaagctgaccgcacaggatctgtacaaggacggcatcgtggaggagatcatcccggagccggtgggcggcgcacagcgcgcccacggggtactgttcggcaatctggacgaggcactgcagcgtcagctgcgcagccttgcccgcatgaacggccgtcagctggccgagcagcgctaccagaaattccgtcagatcggagaaatgaggaaagcatgaagggtttgcgtctgatcgccaccggcggggctttgcccggccgcacggtcaccaacgaagagctgagccgcaccgtggataccagcgacgagtggatcaccacccgcaccggcatccgcacccggcactactgcaccgagggcgaaaacgccgctacactggccattgctgccgcaaagcaggcgctgcagcgcagcggccttgccccggcagacattgcctgctgcgtctgtgccaccctttccgcaccggacgccaccccaagcgtggcctgtcaggtgcaggcggcgctggcactgccggaaaaccgccctgcactggacgtgaacgccgcctgttccggctttttgtacggcacggcggtggcgcgcggcctgctggctacgctgggcgggcagtacgcgctggtcatcggtacagaggcgctctcccgcctgatggaccccgccgaccgctccacctgtgtgctgttcggcgatggtgccggtgcggcagtgtttgaactgaccgacacctccgcgccctttgccatcacgctgggtgcccggggcgatgccgccatccatgccggcggccccagccgcgcaggctcggcacccatcagcatggacggcagggcagtgttccgctttgcggtggatgccctgcccaaatgcctgcacaccgtgctggacgagaccggccttacgctggacaatctggactgggtggtctgccatcaggccaacagccgcatcatcgaccactgcgtcaaggcgctgcacgccgacggtgcaaagttctacaaaaacatggaccgccacggcaacaccagtgctgccagcatcccggtggcgctgaacgagctggctgaaagcggccagctgcaccccggacagacccttgcctgcatcggcttcggcggcggcctgacatggggcggcatgatcgtggaatataaaggataaagaccatgaaacttttaaacgagatcctggggacgaaataccccatcattcagggcggcatggccaacattgccaccggcgagttcgccgccgcctgctccaacgccggtgcactgggcatcatcggtgcgggcggcatgaatgccgataccctgcgccagaacatccgccgctgccgggagctgaccgacaagccctttggtgtaaacatcatgctcatgcacccgcaggcagatgagtttgcccagatcgtggtggaggaaaaagtcgccgtggtcaccaccggcgcaggcaacccgggaaaatacgtttccatgtggaaagctgccggtatcaaggtgattccggtggtggctgctgccgtgctggcacggcatttggagccgctgggcattgacgccgtcattgccgagggcaccgagagcggcggccatgtgggcgagatgaccaccatggcactggtgccgcaggtggtggacgcggtcagcgtgccggtcatcgccgcaggcggcattgccgatggccgtcagctggcggctgcgctggcgctgggcgcctgcggggtgcaggtgggcacctgcctgctggcaagcgaggagtgccccattcaccccaactacaaggccgcgctgctcaaagccggggacagtgacaccatcgtcaccggacgcaccgtgggtgcaccggtgcgtgtgctgaaaaaccgcatgagccgggagtatgtccgtcaggaaaaggcgggcgccgataagatggagctggaaaaatacacgctgggcagcctgcgccgtgccgtctttgagggcgacacggtaagcggcagcctgatggccggtcaggtagccggaatgctgcacgaggtgcgccccgtggccgacatccttgccgacctgtggcagggcgggaggcagcgcatcgccgcgctgaacaccgaatgctgacccttggcggcaagcccctgcaagtacccattttgcagggcggcatgggcgtaggcgtctcgctgggcgggctggccggtgcggtagcagcctgcggcggcatggggtgcatctccaccgccgatgcaggctaccgcgagccggattttgcccgtgacccggcggcagcaaaccaccgcgccctgaccgcagagatccaaaaggccaaggccatagctggaggcatgggtctggtagccatcaatgcgatggtagccacccgggactatgtcgaggctatccgcaccgccgtggcggcgggggtggatgccgtggtctccggtgcgggtctgccgctggagctgccgggcatcgtgggcacaaaagaagtagccattgcacccatcgtgtccagcgcccgggcggcaaagctcatcctgcgccgctgggcaaagggctttgaccgcaccgccgattttgtggtcatcgagggctgcaaggcgggcgggcatctcggctttgccgaggaggacctgctggccgaccgctgccagaccttggacgagattctgcccggggtgctggccgaggtaaaaccctacgaggagcaatacggccacgccatcccggtattcgtggcgggcggcgtgtacaccggtgccgacatggcacattttacaaagcttggcgctgcgggcgtgcagcttgccacccgctttatccccacctacgagtgcgacgcctcccagacctacaaggacgtgctgctggcggcaaagccggaggatgtgcgcatcatccacagcccggtgggaatgcccggtcgtgcgctgaacaccccgctggtgcaggcgctggccgagggcaagcgcttcccgcccaagcactgcgcccggtgcctcaagacctgcgaccccgccgccgtgccctactgcatcacccacgccctcatcgaggcggtgaagggcaacgtggaggaaggactcttcttctgcggcgaaaacgtgggtcggcttgaccggatgcgcaccgtgcgcgagctgatggacgaacttgtgaccgaatggaggcagaacttatgaagcttgccgtactttacgccggtcagggtgcgcagcaccccggcatgggcaaggaattttacgaagcatctcccgccttccgggcggcctttgacagcgcagcgctggattttgatctgcaccgcgtctgctttgaggacccggacggcgttttgaatcagaccgaatacacccagccctgcatggtggcctttgcctgcggcgtgaccgccgtgctggccgaaaagggcgtaaaacccgcctatctggcggggctttcgctgggcgaatactccgcgctgcaggcagccggggtgttcaccgcaaagcaggccatcgagttgaccgccttccggggcaaggccatggccgaggctgcaaagggccttgcctgcggcatgaccgccgtgctgggattggacagagaaaaactgtctgcctgctgcgagcaggctgctgcggcgggctgtgtgcagatctgcaactacaactgcccggggcagctggtcatcggcggcgaaaaagccgctgtggagcaggctgccgcgctggcaaaggaagccggtgcccgccgctgcatcccgctgaaggtcagcggccccttccacacaaagctgatggctcccgcaggggatgcgctggcacagcgctttgcgggcgaaaacttcggcaccatggagacgccggtgctgttcaactgtctggggcatgaaaaggccgagaccgacagcatcccgcagctgctggtaaagcaggtgcagagcagcgtctacatggaagataccctgcgccgcttgggtgaactgggcgtggaccacattctggaagtcggccccggcagcgccctgagcggttttgtgaaaaagaccctgcccggggtggtctgcaccgcagtggagaccccggaacagctggatgcggtgctgaccgcatggaaggaagcagaatgagcgaagaaaagctgacccgcgccgccattgttaccggcggcagccggggcattggccgcgcagtgtgcgtggcactggcaaagcagggctgcaacgtggtggtgaactactgccacggcgcagagcctgcggagcagacggcagcgctctgccgcgccgagggcgtgcaggcggtgaccgtgcaggcggatgtatccaccgccgagggctgcaaggcgctgttcgatgccgctgccgaggcctttggccgggtggatgtgctggtgaacaacgcgggcatcacccgggacaacctgattttgcgcctgaccgagcaggattttgacgcggtgctggacaccaacctgaaaagcgcctttctctgctgcaaggaggccgcccgccgcatggtgcgccagcgctatggccgcatcgtgaacctttccagcgtggtggcgctgcggggcaacgccgggcagaccaactacgccgccagcaaggcggggctcatcggtctgaccaagagccttgcccgggaactggccgcgcggaacgtgaccgtgaacgcggtagcgccgggctttatcgacaccgacatgactgccgtgctgccggaggcggtgcgcaccggcatgacgcagggcatccccgcaggccgcgcaggccagccggaggatgtggcacaggcagtggcgttttttgccgcagaacaaagcagctatctcaccgggcaggtgctctgtgtggacggcggcatggcaatgtaaaggagaacccttatggaaaaacgcagagttgtgatcaccggccttggcacggtgaacccgctgggcaacaatgtggccgacagctgggcagcagcccgtgccggtaaatgcggcatcggccccatcacccagttcgacaccaccgacttcaagtgcaagctggctggtgaggtaaaggattttgaccccgagagcgtggtggacaaaaaggaagtccgcaaaatggcacgcttcaccctgctggcactgggcgctgccaccgaagccattgcagacagcggccttgataccgaggccgagggcaaggacatcggcgtcatcctgtccagcggcatcggcggtctgcccacgatcgaggagcagcacgcccgcggcgaggaaaagggtatggagaaggtaagtccctactttgtgcccatggccattgccaacatggcagcggcgcaggtggccatccgcttcggtctgaagggcatgtgcacctgcccggtcacggcctgcgccggcggcaccaacgccgtaggcgacgccttccaccgcatccgggacggctacgagccggtgatggtctgcggcggcgcggaaagctgcatcagccccttgggcatcggcggctttaccagcatgaaggcactttctaccgccaccgacccggacgctgccagcctgccctttgacgcccgccgcggcggctttgtcatgggtgagggcagcggtgtgctggtgctggaagaactggagcacgcaagagcacgcggcgcacacatctatgccgaggtggtgggctacggtgccaactgcgatgcctatcactttaccgctccggctcccggcggcgcaggtgccatcgactgcatgaagctgaccttggtggatgccgacatcgcaccggagcaggtggatcacatcaacgcccacggcaccggcacccacatgaacgatgcctgcgagactgccgccatccacgccgtgttcggcgcacacgccaaggagatgaccgtggtcagcaccaagagcatgaccggccatctgctgggcggcgcgggcggcatcgaggccgtgtttaccgcgctggcactgcgggaccagttcgccccgcccaccatccactacgcccagcccgacccggagtgcgatctggactatgtgcccaacaccgggcggcagcaggagatgcagtacgcgctgagcaacagcttgggctttggcggccacaacgcctgcatcgccctgcgcagatgggagggctgacccatggcagagccccgtaccgtgcgtgaaaacgccaacactctgaacagcgtgcagatcgcggagatcctgccccaccgctacccctttgccctcgtggaccgtgttctggactacgagccggggcagtgggccatcggccgcaagtgcgtcacccgcaacgaggaattcttcaacggccacttcccggcgcagccggtcatgcccggcgtgctgctgctggaagcactggcacagaccggcgctgtggcggcgctgagcctgccggaaaacaagggcaagcttgcgctgttcggcggtatcaagagtgcccgcttccgcaaacaggtcacccccggggacatgctcaccctccactgcgagctggtgcagcagcacggcgctgtgggcgtaggcaaggcctcggcatgggtggacggcaagtgcgccgtcaccgcagagctgacctttgtgctgaccgacgcagcagaataaaatgaatgcaaaaagagataggcgatccctttcgggaaagcctatctctttttttgtgtctgttccggtcggtttactctgcggcagctgtcccggcgtctgccgcagcagcgggggcagactctgccgtggcggtttctgttggggcggtcgctgcctgttccttttccatccactcccgcacacggtcggggcggttggtgatgtaggcatcggcgctggtgcgcagcaggctgcggacggaatcttccgtgtccaccgtccacaaagacaccttgatgcccatctcgtgcagtttgtcaatgaaactggcgtttttgtaggcggtgtggtactcacagctgacccactccggcacaaagtccagactgcggatatagccgggcagatcccgctgcgccatcaggtttttgtagatctcgttcaggctttcgccgggaaagtttgcccgcagcatacttaccttatcggtcatccagcgggtcatccagctacagttttcctcgtcggctgcgctctccggcagggcagcgtccatggcatccatgtcctccatgccgttggtcagtcccagatccttccagatgatgggcggcggcagcagcatgctttccagctcgccgtataccagtgcacccacccgcagttcgggcatcagctgctttgcctgccgcagcagcgcgtggttgaaggaaacaaggatcacctgttctaccatctcggtctgctgcagcacttccagcacccggggcacaaagtccgggtcgttgtccatggtagatttcagctccagatgcacggtgcattccggcatctgcttgcacagctccatggcttcctgtaaggtagcaatcttttcgtcctgatagatggcatccttccagctgccaaaatccagctctttcagatcgcccatggtcatatcgtagatcttgccggaaatatccgtgtgcagatcgatcatatagtcgtggtggatcacaagcccggcgtcaatggtctgctgtacgtccatctctacgccgtccgcgccaatctccatggcttttttaaaggctgtcagggtgttttccggtgcaagataggaagcaccgcggtgtgcaatgatttgtggtgtcataaattttctccgttatcggttcgtcctcacacgtttacgccccggcgctgccataccgcaaacagtgccggggcgcttgctcaggtcaggtcctcgccgtctgaagcgatgacctttttataccagtaaaaactgtccttccggctgcgggcaagggtgccgttgccgtcgttgtccttgtccacatagataaagccgtaccgctttttcatctcgccggtggaggcgctcacaaggtcgatgggcccccatgtggtgtagcccatcaggggcagaccgtcctcgttgatggccttttccatctcttcgatgtgcgcccgcaggtagtcgatgcggtagctgtcgtggatggagccgtccggctctacggtatccaccgcacccagaccgttctccacgatgaacatgggcttttcgtaccggtcgtagatggtgttcagggtcacccgcagacccaccgggtcgatggcccagccccactcgctgactttcaggtaggggttcttcaccgatgcagacacggcgttgccttccgcattctctgccgccatcagctccttatccaccgtgatgcagcggctggaatagtagctgaaggacacaaaatccaccgtgccctcccgcagcgtgcggtcatcctccggctgggtgcacagctgcaccccggcgcgctccatccgctttttggcccacacggggtaagcgccgcgcacctgtacatcggtaaagaagtagttgtcccggtcggcctcctgcgccgcccgcacatcctccggggcgcaggtgcgggggtagaactgccctgccgccagcatacagcccaccatggcgtccggcattttttcgtgcgccagctttaccgcctttgcgctggccaccagctcgtgatgggcagcctgatacttgacctgctccacattttcgccgggatggaacaccagccctgcgccggtaaaggacaggtgcagcagcatgttgatttcattaaaggtgagccagtacttcaccttgcctttgaagcggtcgaacagcacctcgcagtagtggacgtaggcgtccaccatgcggcggtctttccagccgccgtattttttgatgagggcaatgggagtgtcaaagtggcagatggtgaccagcggctcgatgccgtacttatggcactcgtcaaaaatgctgtcgtagaaagccagtcctgcctcgttgggctgagcgtcatcgccgttgggcaggatgcgggtccatgcaatggacagccggaagcacttgaagcccatctctgcaaacagggcgatatcctctttataatggtgatacaggtcaatggcctcgtggctggggtagaaatgtgcgtcatcgcaatccagcatttccatatagcccgttgccaccgggaaacggtccgggccgaagggggtcacatccaccgtagccagacccttgccgtctgcctgccatgcaccctcgcactggttggcggcggtagcgccgccccacaaaaagcccttgggaaatttgcccatactctttacctccttgtttacttttgcgcccctgcggagcgcagatatacgcatactactatgataccgcaaccggcggcgcttgtccatgactgcattttgcaaaggtgcgtgcatttggggataaagtacgacttttatcgtcaaaacgctgaaatttcctgctgttttttgcgcacttttcacgataaaaacacaaaacttgcccgtttttcttttattctgttccttttaaaccgcgcggcagtatggtagaataatagagtaagaactgcgctgcgctgctgcgctgctgagaacatggaaaaatggagtgtttgattatgactgagttcaaacccatcaaagaaggcaaagtccgcgagatctacgacaatggcgacagcctgatcatggttgccaccgaccgcatttctgcgtttgacgtcatcctgaaaaacaaggtcaccaaaaagggcaccgtgctcacccagatgagcaagttctggttcgattacacccgcgatctgctgcccaaccacatgttgagcgtggatgtgcaggatatgccggagttcttccgccagccccagttcaccggcaacagcatgatgtgccgcaagctgaccatgctgcccatcgagtgcatcgtgcgcggctacattaccggcagcggctgggcaagctaccagaagaccggcaaggtgtgcggcatccagctgcccgagggcctgcaggagtccgataagctgcccgagcccatctacaccccctccaccaaggcagagatcggcgaccacgacgagaacatctcctacgagcagagcatcgacgtgctggagaagaagttccccggccacggtctggagtacgccaccaagctgcgggactacaccattgccctgtacaagaagtgcgccgagtatgcactgtcccgcggcatcatcattgccgataccaagttcgagtttggtctggacgaggacggcaacgtggtgctgggtgacgagatgctgaccccggactcctcccgcttctggccgctggagggctacgagccgggtcacagccagccctccttcgacaagcagttcgtccgcgactggctgaaggccaaccccgacagcaactacgacctgccgcaggatgtcattgacaagaccattgccaagtatctggaggcctatgagctgctgaccggcaaaaagctgtaagcgtatcccgtatccataaaaaccaaggctgctgcggaaaattttccgcagcggccttttttgcgccccgccccttgacattgagtggggatgtgagtaatatatgtatcgtatcaaacagtttcacatcgaacaacttgaatagaggaaaccattatgtgtacacagcaccctattgaagagccctgcaagctggacccgccgtgggaagggccgcaggtcatccccgcccagctgcaccgggtggataacctgatcttccgcaggctgaaccagttttcccgcgccaacggggtagagcagaccacccccatgcacgggtggatcatcgagtatctctaccgccaccgggacgagccggtgttccagcgggacatcgagcgggaattttccatcacccgctccacggtgacgaacattttgcagctgatggagcgcaagggctacatccagcggctgagcgtaccgcaggatgcccggctcaagcagctggttttgaccgaggagggcatccaacggcacgaaaagaccctgctgtccttccaccagaccgacgactatgtggccggactgctgaccgaggaggagaacgcagaactgctgcggctgctgaacaagctgcgggaagcactgaaataacgatcttttccgtcaaagcgccgaaaaaggacttgttaaattagcaattatgaacatttttcgaaagctattgacatttaaattgttttgtataaaattgttttgtaccaaacaaataaaattaacaggagggaactcagatgatcaaaaagcttgtgtcgcatctgggcgagtataaagccgcctcgatcaagacaccgctctttgctgcgctggaagccattatggatgtgctgctgcccaccatcatggcctttatcatcgaccagggcattgaaaagggcgatatgaacgccatcatccgctacggactgcttacctttctggtggcagccattgcgctggtgctgggcgtgctggcgggcaagtacgccgccgaggcatccaccggctttgccggaaatctgcgcgatgccatgtatgaaaacatccagcattactctttttccaacatcgacaaattctctacggcaggtcttgttacccgcatgaccaccgacgtgaccaacgtgcagaacgccttccagatgatcctgcgcatgtgcgtgcgcgccccggtgcatctggtgtttgcaatgttcatggctgtggtcatcggcggcccgctgtcgctggtgttcgtggtggcagtggcctttctggtggcggtgctggctgccatcatgatccctaccttccgcatctttgaccgggtattcaagaactacgataacctcaacgcctcggtgcaggagaatgtctctgccatccgcgtggtcaagagcttcgtgcgcgagggcttcgagaacgaaaaatatactgctgcctgcgagagcctgtacaagcagttcgtcaacgcggaaagccgcctgagcttcaataaccccgccatgctggtggcggtgtacggctgcaacatcgcgctgagctggttcggcgcaaaatatgtgctgcacggtgccattaccaccggccagttgaacgccctgttcggctatatcatgaacatccttatggcactgatgatgctgagcacggcctttgtcatgatcgctatgtccgccgcttctgccaagcgtatcgtggaggtgctggacgagcacaccgacctgcccccggcaaagcagccggtgcagcaggtggcagacggcagcatccagttcgaccacgttaccttcaagtataagcacggcagcggtcagccggtgctgaacgatatcagctttaccatccaacccggcgagacgctgggcatcatcggcggcaccggcagtgcaaagtccagtctggtgcagctgatcccccgcctgtacgatgccgagagcggcaccgtgcgggtaggcggcgtggatgtgcgggattataaccttgatgttctgcgccgcgaggtctccatggtgctgcagaagaatgtgctgttcagcggtactattctggagaacctccgctggggcgatgccaacgccaccgaggaagagtgcatccgcatggcaaaactggcctgcgcggatgagttcatccagcgcttcccggataagtacaatacatggatcgagcagggcggctccaacgtgtccggcggccagaagcagcgcctgaccatcgcccgcgccctgctgcgcaagcccaaggtgctgattttggacgactccaccagcgccgtggataccgcgaccgatgccaagatccgcaaggccttccgggaggagatccccggcacgaccaagatcatcattgcacagcgcatttcctcggtgcaggatgcagaccgcattctggtgctggagaacggccagatcaacggtctgggcacccacgcagagctgctggcgaccaatgccatctatcaggaggtctacaacagccagacgcagggcggcggcgattttgacaagcagggaggtgcgcagtaatggcagtaaaagaagtacatggccccggcccgcggggcgcacgggggccgcgccccaaggtggaaaacccgggcaagctgctgaagcgcattatggatgaggtgttccgcaactatctgccccactgcatccttgtgcttgtctgcatcgtggtcagcgcgctggccaatgtgcaggccagcctgttcttgcagaccttgatggacgattacatcgtgcccatgacccgccagcagaaccccagctttgcaccgctggccggtgcattggtacggatgtgctgcatctaccttgtgggcattctggccgcatgggccaacgcccgcatcatggtcaacgtaacgcagggcacgctgcgcaatctgcgcaccaagctgttcacccacatggaaagcctgcccatccggtattttgatacccatcctcacggcgatatcatgtccgtgtacaccaacgatgtggataccctgcgccagatgctcagccagagcatcccgcaactggtatccagcgtcatcaccatcgtatccgtgttcttcagtatgtgcatgctcagctggcagctgaccatcgttaccatgctcatggtggcgctgatgctgttctgctccaagcagatcgcaaaaagctcctccaagtacttcatccagcagcagcgggatctgggcaaggtgaacggctacatcgaggagatgatggaaggccagaaggcggtcaaggtgttcacccacgagcagcagacccttgccggcttccgtgcgctgaacgaccagctgaaggaaagcgccaagcaggccaacgccttctccaacattatgatgccggtcaacgcccagctgggcaacatcagctacgccatctgcgcgctgactggtgcagccatggccgttggcggcgttggcagcatgacccttggcaccgtggtggccttcctcagcctgaacaagggcttcaatatgcccatcagtcaggtgtccatgcaggccaacagcgtcatcatggcactggccggtgccgagcgcatcttcaagatgatggacgagcccagcgagaccgacgagggctatgtgacgctggtaaacgccaagtacgaccgcaacgaccagctggtggaaactgccgagcgcaccggtctgtgggcgtggaagcacccccaccacgacggcactaccacctaccacaagctggcgggcgacatcacctttacggacgtggactttggctatgtgccggaaaagacggtgctgcatgacatcaacctgtacggccgtccggggcagaagatcgcctttgtcggctccaccggtgcaggcaagactaccattaccaacctgatcaaccgcttctacgatattcaggatggcaagatccgctatgacggcatcaacatccataagatcaaaaaagctgacctgcgccgctcgctgggcatcgtgctgcaggacacccatctgtttaccggcacggtgatggagaacatccgctacggccggctggaggccaccgatgaagagtgcatcgccgccgcccgtctggccaacgcagatggctttatcaagcgcctgccggagggctacaataccatgctgaccggcgatggcgccaacctctcgcagggacagcgccagctgcttgccattgcccgcgcagccgtggcagatcccccggtgctgattctggacgaggcgacctcctccattgatacccgcaccgaggcactggtgcagcgcggcatggacggcctgatgtacggccgcaccagctttgtcatcgcccaccgcctgtccaccgtccgcaatgcagactgcatcgtggtgctggaacagggccgcatcatcgagcgcggcagccacgacgagctgatcgccaaaaagggcaagtattaccagctttataccggtaatctggccgagaactaaacaatttcccaccttctcacaaagccgccgcacagccatgccgccgtgcggcggctcttttttactcccatgaagaagcaattctggaaaatccgcagattttccagaattgcaaatataaaaataattttccgctgaagatggccaaagcacacgcggcggccattcaaaatcgtccgctccacggtatacaaatgccccgggctgtgctagaatggagcaaacgagaaaaaggctggtgagtgtatgcaccctctgacggaatatccccgcccggctatgcgccgggacagctacgagaacctgaacggcctgtggcagtacgccatcactgcctcggcgcagcgcccggcgggctgggatggcgagatcttagtgccctacgcgccggagtgccgcgcctccggggtggggcgcacattacagcccgggcagtggctgcactaccaccgatattttgcgccgcccgccgggatgggcggacgggtgctgctgcatttcggcgcagtggactacgcctgcgccgtgcaggtaaacggccatctggtgggcggccaccggggcggctactggccctttacgctggatatcactgcgcagctcaacggcaccggccgcaacagcctgtgggtggcggtgcaggaccccaccggccacggtacacaggcgcggggtaagcagactttgcagcccggcgggatgttctacccggcgcagagcggcatctggcagacggtctggctggagcgcgtgccggaaaattacatccagtctctcaccgttacgccggactatgatgcccgcaccgtgaccgtaaaagcccatacctctgcacccggcggcgcggcgaacctgtgggctgtagtgcgcgccgggggcgtgaccattgccgaggactggggcagcgatgaggccggccaggacggtgaggtgacgctgcatattgcggacgagtatttcttcccgtggagcccggacacgccctttttgtacgacctgaccgtgggcaccacgcagggagaggaagagcagttcgacaccgtgcacagctactttgccctgcgcaagtggagctgcgcaccggacgcacggggcgtgctgcgcttctgcctgaacgacaagcccatcctgctcaacggcctgctggatcagggctactggccggagggactgtacaccccgccttcggatgcggcggtggagcgggagctgagcgaggtaaaggcgctgggttacaatcttc

SEQ ID NO: 1053 - DNA, 11376 bp, unidentified
  source 1..11376: mol_type = unassigned DNA
atgtcttttttcaatatcgttgcggctaccaatgaagatactgttgttgctacctatgaaccctccaaggtgcgctctgacagctaccagagcgaggcggaacttgaaaaagagtttatccggctgttgtgcgagcagggctatacctatctgccgctgcataccgaggatgaactgattgctaacctccgcagccaactggaagagctgaaccactaccagttttccgatacggagtggcagcagtttttcagtgatgtaattgccaaccccaacgagcatattcccgaaaagacccggaagattcaggaaaacaatgtgcaggtgctgcaccgggatgatggcagttccaaaaatatcacgctgatcgacaagaagaacatccacaacaaccgcctgcaggtcatcaaccagtatgaggtaaaacaagcagacggcgcgcggcatgataaccgctacgatgttacgattctggtcaacggctttccactggttcatgtggaactgaagcggcgcggggtggccatccgggaggcatttaaccaaatcaaccgctaccagcgggattcgttctgggcgggctgcggcttgtatgagtatgtgcagatttttgtgatctccaacggcacaaataccaagtactactccaacagcacccgctacaatgccatcaaggacgccaaacacggcaagacgaaaaaggaaaagaccagcaatagctttgaatttacctcctactgggctgatgcgaacaaccgcgtgctgacggatctgatcgactttacccggacattctttgcaaagcacacgattctgagcgtgctgacccggtattgcatcttcacctcagaaaagatgctgatggtgatgcgcccatatcagatcactgcaaccgagaggatattgaaccgcatcgagatcgccaacaactacaaaaagtatggcactatcgagggcggtggctacatctggcacaccacaggctccggaaagacgctgacctccttcaaaacggcacggctggcatcgcagctgccctacatcgacaaggtgttgtttgtggtagaccgcaaggacttggactaccagaccatgaaggaatatgaccgcttcgagaagggcgcggcaaactccaacaccagcaccacgattctgaaacgccagttggaaaacccggaagcacatatcatcattaccaccatccagaagctggcgaccttcatcaagaagaatccggggcatgaagtctaccagaagcacgttgtgattatctttgacgagtgccaccgcagccagttcggtgatatgcacaaggccattgttcacaatttcaaaaagtaccacctgttcggctttactggaacgccgatttttgcagtcaacgcaggaagctccactgatccacgctatttcaccacggcgcagacgttcggcgaccaactgcacacctacaccatcgtggatgccatcaacgacaagaatgtgctgccgttccgggtggactacatcaagacgatggacacagagccagacatggacgataaacaggtttgggatatcgaccgggaaaaggcgttcatggcacccaagcgtatttctctggtgacaaagtacatcctcgaccacttcgaccagaaaacctatcggggagacaaatcgtatgagtttaatctgctgacgaatgtggcagaggtggcctctgcccagcgtggtgcggtggaggaaatcaagcaaaaacagcgcgtcagcggttttaattcgattttctgcgtggcttctgtgccgatggcaaagctgtattatcaggagttcaaaaagcagatggcagcagacccgaccaagcggctgcgcattgccaccatttacagctatggagccaatgaagcggaaacggatggcattctggacgaggaaaacccggaagatacctccaaccttgaccaaagcagccgggattttctggacgcagccattcaggattacaacgagatgttccatacgaactactccaccgatggcgaacggttccagaattactacaaagatgtatcgctccgcatgaagaacaaggaacttgacctgctgatcgtcgtcaatatgtttctgacgggcttcgatgccaccacgctgaacaccctttgggtggacaaaaacctgaagatgcacggtctgattcaggcgttcagccggacaaaccgtatcctgaacagcatcaagacctttggcaatatcgtctgcttccgcaacctgcaaaagagagtggatgcggcaatttcgctgttcggagataaaaatgcgggcggcatcgttctgctgcgcaaatatgcggactactaccacggttatatggacgagcagggaaaataccatcagggctatacggacatgatcgatgacctgacgcagaagttcccgttgacagagccgcagatcatcggagagcagaaccagaaagactttatcgtactgtttggcgcactgctgcggatgcggaacttgctgtcttcctttgacgatttcaagggcaacgaactgatctctgaacgggatttacaggactatttgggccgctatcaggatttgcgggatgaatggcgtaacaagaagcacgatgaaaccaaagaggatatcacggatgatgtggtgttcgaggtggagctgattcggcaggtcgaaattaacattgactacatcctgatgctggtcaaaaagtaccatgacacccattgcgatgacaaagaggtgctcatcacgattcgcaaggcgattgacgccagcccggaactgcgcagcaaaaagcaactgattgaaacctttattgcaggggtcaacgatgtggatgacgtgatggcagagtggaacagctatgtgtccgaacagcgagagaaagagcttgtccaaatcattcaggaggaaaagctgaaagagccggagacccgcaagtatctggccaatgcgttccgtgatggcgagatcaaaactgtgggcactgacattgataagctgatgcctcctgtttcccgctttggcggcggtggccgtgcgcagaagaagcaaggcgtgatcgataagctgaagagcttctttgataagttctttgggattggcggaagttcgatgacagcgggagataacaaataatgtctaatgtcgagtgttcgtgagcggaaaaactaactttttactctttagttaggaagaatattaccctgaaattaaaacaaagttgcttgtggagggatgtctatgaaattgttcacaagtaaaatgctcgaacgattgatgagcgaacaaaagaaaaagtcggaaggactgctgccagaaattatcaagcggttgatccgaagcagttgcccggattattcgtatcttcgcgcgccagaggaagatgatatttgggcaccgggatatgatggaatcatggataacggaacaaaaacgccttatgtggcacagggaactagcgtgtgggaatttggaaccaatgcggattccttggaaaaaatcaacagcgattatggaaaacgcacaacccgtccgcttggagtgaaaaaatcagatactactttctatctcgtagtgcctaaaatatgggcttacaatatatcacttacagagtgggaggcggaacacagagatgaatggaaagcagtctatgtatatgacgcatctgttttgtgcgattggcttaactcggaaccggcggtttgtgcatggctaatacaaaactatctggaaaatgaagcgatggaaatagattctgttgcgcatgcatgggagcagtttgtacaaaggacaaatcctccgcttaatcaggcaatgttccaaatcggtagggaagagcagctggaagcttttcgcaaaaaggtgaatgaaaagatatgccgtgtggcggcagaatcccgaatcgaagcatatggattctgcttggctgcgctgatgcaagattcggcattggccgaacaggtgactgttgtttgcagcgaaacgacgtatcataatttggacagcttatgcgaaaacgcatatttcctgttgaggtttccgtataacgggcgggtatcaggacgtaaccaaactattctctgcgagggaaagggtgctgcaaaaaagaatgtaattcgattgcttccgcaatggaaaacgcagtatcttcaggcgttgcaggagatgggcatcgatagcgcaaatgctgatgaactttatagttatacacacggaaatcttccagcactcatccgaaaaattccgggaaatgaagccgatttacagccggaatggatgagtgcggcagatattgatttgttgcaaccgcttgtacttctgcgacactacaatattttagacgagaaagagaaacagctggttgcacgattggctgaaacaccatatcctgtagtggaacgaaaatatgaggaactattgcggatagatgacagcccaatcaaaaaagttggagcgtggtatcaaatcgtcaatgatgaagaagcgtggctggcattgaacatagacatagaaagtgccatggggcaacggatgcaccaggaaatctgtgcggcactctcctgcacagatgcagcacaaaatcatagaaggtatggcattcttcaacggttgcttaaaaattacatttgttttgcggagactgggtcagatcaaaatatgattgatgctcaggtgagggaagtcctttccttttttcataaagataattgtaaagagtgcatcataaaggaacttcgaatccttgctgaagcagctccggaagctgtgcttgaatttttaaagaaagaagaacagctggggggacaaaatgaaatcctctggacgctagatactttaatagaacgagagaatacatgtctttcagcttgccaaatactgtatcggctagcattgcaaggagaacagaatgataaagaggcaaaacagcatctgttagatgcactttgcctatggagttctcatacggcgctgactcttgaagagaaaaaggttctgacgattcagataattcagcaaaatccagatttcggagtgaaattcggcattgaactgctccgtaaaacctcactgattcgaggacatcgccgaggaaagaaggaacgacccgctcaattaatcctagaacaagaattgtttgaagcttacgatgaaatcacacgagttgtttatcgtacagcactacagaagaaatggcttgggcaaatagaaaacctgttgaaagagtatcgtcggctgggacaggatgttctactggagatggcagagcagtttgatgcaacacaattctcatcaacagcattacaaccaatgcaatattggttaagaactgaactttgtggtagtaaagaatatggttggacagattggatagaagttctgaaaacatggatacgctgcacggaatccagtgatcctgtgggaaaatttggatggatatttctggaatggaactgcctgcctatggaagagcttttagacaatcaagaagaaaagagctggacgaaggaggaagaggaaagagaacgcattcgagcggagaaatttgcagcactgaaaatagaatttgggatggacgcagtgtggcggctgctggaaacaatgagggaccagcacgcatggggcgtatttcttgctaaaaacactacatgtgaagaattttcggatgtagctgaagcaattcgaaaacaagaaaaacaacaattgttggctggctttttcgatcaggggaattttcaagaagcatcttctgtctttgaaaaaatgtcagaaaatgaaaaacttcggctgttgtctacgttgcggcgtgaagaaattgacccatggctgacaacgcgggagagagaacagacgtattgggcgaatcaggacatgaggtggtcctacaacgaacggagatacaagaagctattgcagtaccatccgggagggctcttactttacctgtatggcaatagtggacaggttgagcacttgtttgatctattcaggaaagtatttgaggcaattgctgaacagggagtcaatgcggaggaaaggggatacctttctggtattgtccgcagagtggacgagcaatattatactgatgaatgggctaagtgttgtctgctactctataaaaaggagttgctgcagaaacctcctctgtgtttgcagcggctcttctttaggcatccggataagatgaaaatgtttttggaagagaatccttcaagatcgtttgatgtagaaaacgactattatctgcccgaggaggcgtatcaggacaagcgtgcatttgactgctgggctgaatgtttgtatgaggagtttccagagattttaggctatattatgggaaaaagctgtaatggaaaagacggtgcttttccgcatgaatttatccgagagtttctggaaaaacaacagaatgagaaattgacgaaagcggtattctatggaaagtttaattcccgtggtgcacggattgtacaggatggccgaaccctttatgaacaagcaaaatgttaccgagcgcaggcgcgggaactgagattgaagtttccacagagtgcaaagattctcctgcagctagctaaatggatggaatcagaagctcagcatgatcagctagaagcagagattgtaccttaaggaaataataagaatctccctgctgaaaagcagttgcatcttaaacgtgaatacgttataatactcacagagatcccgctggttgtgtgatactatcctgatactaaaaaatcagcaagccatatctagcacagcaatctcatgaaaaagtgaacattcaagaatagcgttactaagcaaatttgtttagtaagaatccaaacttaccgagctcgagtaatcccttatagcaccaacaccccagaaggtccttcaaaaacgaaaccttccggggtgtttttatcttccagcacgatcaaacaagccgtaacattcaaagtggttcctatatcagcgcaaactctaagcattttgaccgtagcattttacacaaaaaaagcccgaaaccccttccttctccgcccacaggggagtataatagaatctgttgtttgcaaaataggaaaggggaagtatcaactatggaatcgaagcagaggcttttggagccgcagctcgtccaaacaggaagggcagatcagttcagccgcaaggtgttctgtgacggaatgcgggacggtgtgcccattgcactgggctattttgcggtatcgttttcgttgggcatcgcggcgcgcaaggcgggttttacgccgtttcaggggtttcttgtcagcctgctgaacaatgcctccgcaggagaatatgccgcatttgcgttgatcatggcaaacgccacctattttgaggtggcggtcattactttaatcgccaatgcgcggtatctgctgatgagctgtgcactggcacagcgctttgctccggaaacgcccttctggcatcggctgctcatcggctatgatgtcacggacgaactgttcggcattactatcgcccgcccgggcaacctgaacccgtactatacctatggcgctatcctgctggcagcgccggcttgggcttgtggtacggcgctgggcattatagcgggcaacctgctgccgctgcgggtagtcagcgccctgagcgtggcactttacggaatgtttctggccatcatcatcccgccggcccgcaaggatcggatcgttgcggtgctggtcgtcatcagctttgcgctgagttttctgtgcagctatctgccgggcatctcggcactctccgaaggcacccgcaccatccttttgacagtggcgatctccggtgcagcagcggtgctgttcccggtcaggcaggaggaaaacgaagatgacgcataacaattatatctatattgcggtcatggcgctggtgtcctatgccatccgcatcctgccgctgacgctgatccgcaaaccgatcaaaaaccgcttcatccagtcgtttttgtactatgtgccctatgtaacgctggctgtgatgacctttccggccatcattcaggcaacgcagagcccggcagcaggtgctgttgcactggtagtcggcattgctgccgcatggtttggcgcaagcctgtttcaggtggctgcaggctgctgtgccgtggtgttcgtgctggaattttttatctgatgccttattgcgggagaacaaaatgaagaagatccttgtaaccggtgcaggcggctttgtaggttcccgcgtgatgcagcaatgggcggggcattacgaactgtgcacctttcctaaaggctttctggcaacagcaggggaggacgccgtgcggcaggctgttttgcagcagcgcccggatgtcattctgcacactgcagccatttcggataccggctactgcgccggccacccggagcaggcttaccgcgccaatgtggaactgtcggtctggcttgcccgggcggcagctgagatcggcgcaaagctggtggctttcagctcggatcaggtctatgccggtgtggagcagtccggcccgctgccggaaacaattccgttaaagcctgccaatgtgtacgggcagggcaagctggaaatggagcagcgggtgcaggcactctgcccgggtgccgtattgctgcgcgccacatggatgtacgacctgccgggctaccggctgcccatccggggcaacctgccgctgaaccttctgcgtgcggcgcagcggggagaatctgtccgcttttctgtctgggacttccggggcatcacctatgtccggcaggcggtagcactgctggaagctgccctgaccctgcccggcggggtctataactttggcagtgaaaacgctgaaaacatggtactgaccgcccggcagtttgctgagacactggggatcacggtcgatattcaggaagctgactgggcacggaatcttgcgatggattgcagcaagctgcgggcgcagggcatcgtatttgacaccacacaggcagggctgacgcgctgtttgcgggattatggactgctctgactgcagaaacaaaaatttttccgtatcgcacaaaaaacagagaaaagcacgaaaaaagcaggggattctgtatgatgccaggcgaatcaggctggacaaatcatgcggaagccctgcttttttgcttgtctgccgaagaaaagttcgcttaaaggatgcagcatttttcatataaaaagtcatacttattttacatcttatctgcattttgctataatattttcgcttttttgcaaagcatccgaaccgcataaacctttaaaaccttgaggagagtggaatttttgaaggaagtcaagcttgaagaagcggcttatcagtttgaagccaaaatgtccctgcggcaggccatcccgctgggcttgcagcatgtctgcgccatgttcgtgggcaacctgaccccgctgctgatcattaccagcgcctgcggcattgcaggcggcgagtttgcagacctgcaggtcaccctgctgcagagcgccatgttcgtggcaggcatcgttacgctggtgcagttgttcaccatcggacccgtgggcggcgcagtgcctatcatcatgggtaccagttccggctttatcggcgtgttcaacagcgttgtgggcacgatgggcggcggtgtgctggcctatggcgcgatcatgggcgcatccatcatcggcggtatttttgaaagcgtgctgggcttcttcctgaagccgctgcgcaggttcttcccgccggtggtcaccggcacggtggtgctttccatcggtctttcgctgatctcggtgggcatcaactccttcggcggcggcaacaaggccaaggacttcggctctgtggagaacctgcttctggcactgttcgtgctggtggtcatcctgttcttcaaacactggaccaccggcttccttagctcctctgccatcctcatcggcattctggccggttatgtggttgctttcattatgggtctggtgctgcccaccaccggcgtgactgctgatggtgtagagttcaccaaggcatgggtgctcaactggaacaaggtggcacaggcctcctggttcgcagtacccaagctgatgccggtcaaggtggtattcgatgcccgtgcgatcctgccggtgctgatcatgttcatcgttaccgcagtggagactgtgggcgatatctccggcgtgatggagggcggcatgaaccgtgagccctccgataaggagctgtccggcggcgtcatctgcgatggcctcggctctacctttgccgcactgttcggcgtgctgcccaatacctccttcagccagaacgtgggtctggtggccatgaccaaggtggttaaccgtatggcactggcctccggtgctgtgttcctgatcctctgcggcctgattcccaagctgggcgcgctgatttccatcatgccgcaggccgttctgggcggtgctgccgttatgatgttctcttccatcgtggtcagcggcatccagctgatcaccaaggaaaagatgactccgcgccacctgaccatcgtgtctgtggcactgggcgtgggctatggcatgggtgccaacagcggcattctggcacaggctccgcaggccctccagctgatctgcggcgagtccggcattgttccggccgcctttgtggcaattctgctgaatgtgctgctgcccaagaacgatatggcagaataaattttaacttttttgccgggcaagggcttccagctgatgcaacacctccggggtgtctgcgtccagcagctctgcgctgtccgcaatgcagaccgtgcgcacctgcgcaggatactttttaagcagcacgttgccgcctttattttccggtagggcgagcagttccggaaagaaactgcttccaaacagaacgggacttccaacaagaggcgccgggtcgttttcggccacggcacccagacggaagatctcccgttctgtttctttttgccattctgccggggagggctgctcacggcagaaaagagcggtcatagcttctaccgtctcccggcgcagcaggggctgatccccgggcagaaacatacagccgctaagctccggcagctgctccagcagcgctgaaagccccagccaaacggtatcgttgcggccaggcaggctgtgcagcaacaccgggacgccatgcgccctgcacaacgcctgcacctcttccgagcgggtcaccacgatacgggcggagataccgggtgtagcggtagcggcaaaggcccggcagagcatgggctgcccgcaaaaatctgccagcagcttgtttgcaccaaaccggcggctcagcccggaagccatgatcacacagccgaccgtaagcgacttcttcat

SEQ ID NO: 1054 - DNA, 7900 bp, unidentified
  source 1..7900: mol_type = unassigned DNA
tcacgcccgggcggtcacgtatttggcaatcttgcgggctgctgtggcctgggagatgcccagctcccgggccacggccactgtggtgccgcaccgctggtaggaatcccggatgatttgggcctcgtaggcgtccatccgctccgctagcgtgccgccgggaagcagctccgcaggggccgacgcgtcggcggtgtactccagcggcagggcaggaatgtccagaatggggtcctgggcagtgattaccagcctctccatcaggttctccagctggcgcacgttgccgggccaatcgtactgctccagaaaagccagaaagcgggggctgcaggtgagggacttgttgtactccccgcagaagcgggccaggaactggtgggccatggggacgatgtcctccttccgctgccgcaggggggggatgtggatgcggatgacgttcagccggtagaagagatcggaccggaacagaccgcgctgcaccgcctcctccagattgcggttggtggcaacgatcagccggaagtccagctcgatcttctgggtgccggagaggcgctcaatggtcttctcctgaatcagctgcaggagcttggactggatatgggcgggcagctcgccgatctcatccaggaacagcgtgccgtggttggccagctcgatcttgccgatcttgccggaggaggaggccccggtgaaggcgcccttctcatagccgaacagctctgactcaatgagattttcatggagcaccgcgcagtttacctcgataaagggcccgtttgcacggttgctcatcttgtgaatggccttggcgatggcgcttttacccacgccggtctctccggtgatgagaatgttggcccgggtgttggcagtgttctgcatcagcgtccacagccgctgcatgggggcgcttttgaacagcagattggtggaggtggcccgggtccgcagctcggcaatctcctgggagtagtgctgcagggagtcctgcatccggcggtagttccgttggatggagttgatctgctccatggacacggtgttgaagcagacggcgtatttcagctccccgttggcgtcaaacaggggaatgcccacggtcatcacgtttttgtgggtgtggttgatggtctgtgtggcgctgatcttcttccgccgccggatgacctccgccgtaatgcagggggtgaaggtgccgtccgcctccagatcaaaggcggacttgccaacgatggagtcatgggcaaaaccgaagtttttctcataggtctcgctgacccgcagaatgatgccgttgccgtccgagaccatcatgtcgtccgccaggaccaagttgttttccgggctgaggatctccagaagtccctccagattgatcccctcgtcgtggaaagcagaaaaagacggaatcgccataggcgcagacctcctgtgccggactgaatgccggttgctctattcaaaaatgagtatagcatattcaaaaatgaataggaagaggcgggaaatatttttggctcgtgaaatttcacgaaaattcgacagacagactgctgtatttcacaaacaaactgcggaaaatgctggaagacactgacaaatttgttattcaaaaatgaataatcccgcatggaaacggctgacggcaccgggaaaagcaagcgatttaccacttggattttagcaacctacacaaaaaaacgaaccgaaaatgagagaattacacctggaaaaatggcatgatttttgctataactaaattgttggatgattactctccaacagtttgctgagcaaaatatgattaaggaggacattccaatatgtatcagaccattcgctatgaaaagaacggcaatatcgggatcgccaccatcaaccgccccgaggcgctgaatgcgctgaactccaccgtgatctctgagctggaacagctcatcagcgaggtggagaaggatgccgagctgggcgccttcatcatcaccggcgagggccgctccttcgtggccggcgccgacatcggcgagcagagcaccatggacgtggccgccggccgcaagtggggccagcggggcagcgccctgttccgccggatcgagaagctggagatccccaccatcgccgcagtgaacggcttcgctctgggcggcggctgtgagctggccatgtcctgcgacatcattctggccgccggccccaacgctgagggcaagggcggcgccaagttcggccagcccgaggtgggcctgggcatcacccccggcttctccggcacccagcgtctgccccgccgtgtgggcgtggccaaggccaaggagttgatcttctccggcaagcagatcggtgctgaggaggccaagcgcatcggcctggtgaatgaggtctatgccgccgaggagctgctgaacaaggctgtggagatggccaagtccttcaccgccaacgcccccatcgctgtgaagtattccaaggcctgcatcgaccgcgggatgcagatggacatcgacaacggcatcgccctggagaacgagctgttcgccatgtgctttgccaccgaggaccagaaggagggcatgggcgccttcctggagaagcgcaaggagaagcacttccagaacaagtgagcgcagaccggcaagaggccgtccatttcattacatataaagagggaagtcaggcatgaaaaaagttcgcgtgcttaccgccgaggaggcggcgctgctggtgaacgacggcgataccatcgccaccggcggctttgtcagctgcgcctgccctgaggcgctgtccaaggcattggagaagcggttcctggagacgggccatcccagagatctgacgctgttcttcgcggcaggccagggccaccgggacggcaccggcggcgaccactacggccacgagggcatggtcaagcgggtcatcggcggccactgggaccgggcccccaagctgggcgatctggccctgagcaacaagatcgaggcgtataacctgccccagggcgtcatctcccacatgtaccgggacatcgcggcccacaacatcggcaccatcacccacgtgggcctgtacacctttgccgacccccgcaacggcggcggcaaactcaacgatgtcaccaaggaggacctggtgaaggtcgtcgagatcgagggccaggagcggttgctctacaaggcgttccccatcaatgtggtgttcctgcgtgccagctatgccgacgagtacggcaactgcaccgttcaccgggagatcggccccatcgacgtcaccgccatggctcaggcctgcaagaactccggcggccgggtcatcgtccaggtggaaaaaatcgtccaaggcggcagcctggatccgaaactggtggcaattcccggtatctatgtggattctattgtggtaggatccattgaggataacgagcagtgcctgggaatgccctatgacggcagcctgaccggcgagttccgcattcccgtggacgccatcccacccatcccgctggacgccaagaagatcatcgcccgccgggccgccatggagctgccccaggatgccattgtgaacctgggcaccggcgcgccggaaaaaattgccaacgtggcggcggaggagggcatctccgacaagatgaccctgaccgtggaggccggctccatcgccggcgtgcccatgggcggcacccagttcggcgccgcagccaactccatggccatcatcccccacaacgtccagtttgacttctaccagggcggcggcctggatgtggccttcctgggcctggcggagacggcacccaacggcgacctgaacgtgtccaagttcggcacccgtctggctggcgccggcggcttcatcgacattacgcagaatgccaagaaggtggtctattgcggcaccttcaccgccaagggcctgaagactgcctgcgaggacggcaagctggtgatcgtccaggagggcgccaagaagaagttcgtcaaccaggtggagcacatcaccttctccggcaagtatgccgtgcaggtgaagcagcctgttctgtacatcaccgagcgggctgtgttcgagctgcggcccgagggcgtgactctgatcgagatcgcgccgggcatcgacctccagacccaggtgctggatcagatggagttcatgccgaagatcgctgaggacctgaagcttatggacgagcgcatcttcaaagatgagctgatgggactggcggaggcctgagaatttccaccgtcgcagcaatgcgatttccagccctgaccgggccgcaaatcgcgccgctgcctcgaaaccggcgaagcgccgccagcggcggatcaagcgagccgggttccccctctccctcacacggcgagggagccgcgcccagtggcgcgggccatggagttccgggcaggcgaagctcacctggaacacattgaaatgtaaaagacccccatttttttgaggaggaaaaaaagaaatggcattgatgaccgcacaggagtatgtagagagcctgcgcaaactgaatacccgggtgtatatgttcggggagaagattgagaactgggtggaccaccccatgatccgcccgtccatcaactgcgtggccatgacctacgctctggcccaggacccccagtatgccgacctgatgacggtgaagtccagcctgacaggccacaccatcaaccgcttcacccacctgcaccagtccacggaggacctcatcaacaaggtgaagatgcagcgcctgctgggccagaagaccgcttcctgcttccagcggtgtgtgggtatggatgcgttcaacgccgtgttctccaccacctatgagatcgacgagaagtacggcacccgctatcacgaaaacttcaagaagttcctgaccttcgtccaggacaacgacctgacggtggacggcgccatgaccgaccccaagggcgaccggtccaaggcccccagccagcaggcggacccggacatgtacgtgcatgtggtggagcgccgcgctgacggcatcgtggtctgcggcgccaagtgccaccagaccggctccatcaacagccactggcacatcttcatgcccaccatctccatgggcgaggcggacaaggactgggcggtgagcttcgcctgcccgacagacgccgagggcatgtacatgatctacggccgtcagagctgcgatacccggaagctggaggaggacgcgtccatcgacgtgggcaacgcgaagttcggcggccaggaggccctggtggtgctggaccacgtgttcatccccaacgagtacatcttcctcaacggcgagtatgagttcgccggcatgatggtggagcggttcgcgggctaccaccggcagagctacggcggctgcaaggtgggcgtgggcgacacgctgatcggtgctgcggcgctggcagcggagtacaacggcgtggagaaggccagcgcggtgaaggacaagctgatcgagatgatccacctgaacgagacgctgtactgctgcggcatcgcatgctcctctcagggcttccggacgaaggcgggcaactatcagatcgacctgctgctggccaacgtgtgcaagcagaatgtgactcggttcccctatgagatcgtccgcctggcggaggacatcgcgggcggcctggtggtgacgatgccgtcccagaaggacttccactccgacacggtggtgggccggaacggcgagaccatcggggagatctgcaacaagttcttcgccacccgggagggtgtgagcacagaggaccgtcagcggatcctgcggttcatcgagaacctgtgcctgggcgcggccgccgttggctaccggacagagtccatgcacggcgcgggctctccccaggcccagcgcatcatgatcgcccgccagggcaacctccaggccaagaagcagatggccaaggagatcgccggcattcagaactaaggccccacccttgcggcattgcgatccccggcccctgacgggccgccgagtgcgccgctgcctcgaaaccggctcgcttgctctgccgctggcagcgcatcgccggtttcccccctcacgttcgcacagcgaacatgtcgatccggcgggcagaggtgttttgcccgaagtgaattcgtgcaaaacagaatttcataagcaaacctgccggaatatttcatacatcgttgcgttttccaaatttgaatataaggagaagacatcatggatttcaatctcagccgtgagcaccagctggtccggaagatgatggcggaattcaccgagaatgaagtgaagcccatcgctgccgagaccgacaagaccagccagtatccccgggagaacatcgagaagctgttcaacctgggcgtgatgggcatgtgcgtccccaaggagtatggcggcgctggcgctgaccccctggccagtgccatctgcatcgaggagctgtccaagcagtgcgcctccaccggcgacatcgtggccacccacaacggcctgtgctgcgatcccatcatcacccacggcaccgaggcccagaaggccaagtacctgcccatgctgaccaagggccacaaggtcggcgccttctgcctgaccgaatccgacgccggttccgacgccgccaagggccagaccgaggccaagctggacggcgaccactatgtcctcaacggctccaagatcttcatcaccaacggctacgtggccgacgtgttcgtggtcttcgccatgaccgacaagtccaagggcacccgcggcatctccgccttcatcgtggagagcagcttccccggcttctccgtgggcaagcacgaggagaagatgggcctgcacggctcccccaccgccgagatcgtgttcaccgactgcatcgttcccaaggagaacctgctgggccaggagggcaagggcttcaagatcgccatgcagaccctggacggcggccgcatcggcatcgcggcccaggctctgggcattgccgagggcgccatggaagaggccatggcctacaccaagggccgtgtccagttcggcaagcccatcagcaagttccagaacacccagttcaccttcgccgacatggcgatgcgctccgaggcgggccgcctgctgacctatcaggccgccgtgctgaagggcgagggcaagcgcttcaccaaggaggcggccatggccaagctgttctgctctgagcacgccatgctgaccaccaccaaggcgctgcagatgttcggcggctacggctacaccaaggactatcccctggagcgcatgatgcgcgacgccaagatcaccgagatctatgagggcaccagcgaaatccagcgtgtggtcatctccggcaatatcggcctgtaagaggaggaagaacgaattatgaagatcattgtttgcgtcaagcaggtccccgatacctccggcaaggtggcggtgaacccggatggcaccctgaaccgtgcctccatgcagaccatcaccaaccccgatgacatgaacgccgtggaggctgccctgaagctgaaggacgccaccggctgcaaggtcgtggtcgtcaccatgggtccgcccccggcagccggcatgctgcgggagctgatggccatgggcgctgacgagggtgtcctggtatccgcccgcgagttcggcggctccgatacatacgccacctcccagatcctggccgccgccatctccaccatcggtgtggaggaggacgacatcgtcatgtgcggccggcaggccatcgacggcgacaccgcccaggtgggcccccagatcgctgagaagctgcacctgccccaggtgacctacgccgccgacatcaccaaggacggcaacaccatcaccgtcaagcggatgctggaggacggctacatgaccatcaaggtc

SEQ ID NO: 1055 - DNA, 5442 bp, unidentified
  source 1..5442: mol_type = unassigned DNA
tcatttcaaaacaaccgtaaagcagctgccgctgccggggcggctgtccacagtgacagcgccgccgtgcagggcggctattttttgtgccatggcaaggcccaagccgttgccctgcgtccggtggctggtgtccccctgatagaactgctcaaagatatggcggcaggtttcggcgtccataccgcagccctggtcagtgacagccacaaccgggctgccctgctcgctgtgcagtgttacgcttatgattccgctcttcgggctgaacttggcggcgttgtccagcagattcagccagatctcctttaccagcgtctcgctgccgtggtaggtgcagggggccagctcggcctcaaactgcagcggcttatcgcgccacttttgccgggtcacaaggatgcactggcgcagctgctcatccagcgaaaagtctgtgcagtcggtcagaatggtctgtgcctcgatacgattcaatagcagcacactgccggaaagctgcgccagccgcctgctctcatcgcggatgatttgcagatactcgcgctgctcctccggggtgacatcctcgtccagcagcaggtcggcaaagccgctgatgctgacgatgggcgtcttgaactcatgggaaaagttattcacaaaatccttgcgcagcagctccgtgccggaaagctcctccgccgctttgttgaaggctgctttaaactcccggatctcggtaggctcatacccgtgggcagcaggctgcagacgcacggtgaagtcccctgccgccagccggttcatcgcctgtatgatgtttttgataggctttattaatacaaggcgaatcgcaaccacaaggctgacggccatcaaaatacaactggcatacaaaataaccagcgcaccgccgatgctgacgctgccgtcttggataaaaaagccgtggtcagcctccaatacaaccagcaccgtgacagcggtcagattcagtgtaacaatgaaaaagaggttcagcaccagcagcatcgtcaaatttacggtgcgtatgcagtcgcgcagcttgtttacaaattgcgccatattacaccttctttatagcacggtagccaatgccgcgaatggtctgtatctcaaactccggccaatcgtaaaagcgggtgcgcagccgattgatatgaacatttaccgttttgtcgtcactttcgctgtccatgccccagatctcatccagcagctccagccgggtaaaggtcctttccggataagccagcagcttgtataggaggttgaactccttgggcggcagcacctgtgcatcgtggccgcgccgcacggtatgggtgtcgtagtccatctcgacatcccctatcgtgattttgtgttcatccacgatgcgggcgcggcgcagaagcgccttgatgcgcagcacaagctcctgccggtccggcggttttgtcatataatcatcagtgccaacgataaaacccatgtgcttgtcctgcggcatatccttggccgtcagcattaaaataggcagcatgctgccgctttcccggatggtcctggtcagggtaaagccatccatccggggcatcatcacatcgcagagcagcagatctatatggttgtggtcgagcatttccagtgcctgcacaccgtcggcagcaatcagcggctcatagcccgctcgctttacgatggcgcaaagcagacgcgccgtgctggggtcatcctcggcaatcaaaatacgaaacatccgtgtatcctccttagttctattatagtacagcgcaaagataaacgaaagataaacattcccgtttaccaaaggtttattttggcggtgtatccttaggagcatcgaaacaaaaaacaccctacgggaaaacggaggatacagctatgaaaaccatctatcttgtcaccggtgctgccggatttatgggcactaatgtctgcgcacagcttttggagcgcggtgatgctgtgcgtgcttttgtgctgaagggcgaccccgctgtaaaattcatgccgaaggccgtcgaaatttttgagggtgacctctgcagtgccgaggactgcgagaaattctttgccgtggagccgggcgtccagactgtctgcatccactgcgcgagcatggtgacgatcaacccgaattacagtgaaaaactcatcgccgtcaatgtgggcggcaccgaaaatatgctgaatgccgccaaaaatcacccggagtgcaaaaagttcgtctatgtttccagcaccggcgccatccccgagctgcctaagggcgagagcatccatgaggtatacagctttgttccctacgatgatgatcgcgtggtcggctggtacagccgcagcaaggcaatggcgacccagaaggtgctggacgccgccgctgacgggctgaatgcctgcgtggtgcatcccagcggtattcttggccccaacgaccccgccatcgggcagacgacccgcacgctgatccagattttgaacggtgagatgcccatcggtatgcagggctcgttcaatcttgtcgatgtgcgcgacctggccgccggtacgattgccgccgctgaccgcgggcgcaagggcgagtgctacatcctttccaatgacgaggtttcgctgaaggaactctgcgaaatgctgaaggcagaaaccggctgccgcggctgcctgttttacatgccgctttcttttgcgcattttgccgccaagcagatggaggcccgcgccgccaagaccggtaagcctgctgtactgactgagtttgccgtttacaatctggagcgcaacaaccattttgactgctccaaggcaaaaaatgagcttggctttgccccgcgtccctacaaagaaacactgcatgatttggcggtttggctcaagcaggagggaaaaatcgcatgaagaaggtttgtgttatcacaggcggcggcagcggcatggggcttgccacggcgaagctcgtctgtgaagaaggatattacacgattttggtggggcgcacggcgtccaagctggaaaaggcagtcaacgatctgcgcagtgcaggcggcgaggccgaggcgttcagctgtgatgtttccgaccgtgaaagctgttttgcgctggccaaatacgccgccgaatgcggcgaagtaaaagcggtattgcacatcgcgggcctcagccctcacatgggcgatgttgaaaagattttgcgcggcaatgcgctgggcacggtgaatatcaacgatgccttttatgaggtcatggcaccgggcggctgtgtgatcgacacctccagcatgagcgcctaccttgccccgcagtttatcatgcccaagggtgcgtacaagctggcgcgcaccgaccgtgaaaaattcatcaaaaagctggtggcgcgggcaggcatcgcccctaaggacgctcgcccgggtctggcctacgccatcagcaagcattttgtaatttggtttgctaagaccgatgccgcacgctttggcgagaaaaatgtgcgttgcctgagtgtgacacccggcaactttgacacgccgatgggcgcactggaaagcaggcaggcggatgtattcaaaaaatactctgctctcaagcgcaacggaaagccggaagaaatcgccgctttgtttgcgcttcttctggatgagcggctgggcttcctgaccggagcagacattcttatggacggcggcgttgtggcaagcggcgccagcggattgagcaaataaaaagggcagcaaagtaaaccccgattttagcttttggggtctgctttgctgccttttgaattttgtgctttcgcttggctgtactttagtgcagctcgctttcgcagcggtccagcacggcggcgataacctgatccatgtcgtaatacttatactcacccaggcgtccgccgaagatgaccttcgactcggcgtcggccagcttcttgtactcggcatacagtgcgccgtttttagcatcgttgacggggtaatacggctcgtcaccgggcttccactcggaggaatactcacggctgatgatcgttttgggcaggtcgttgccgttctcgtccttgccgaactcgaaccatttgtgctcgatgatgcgggtccacggcgtctcgcggtccgtatagttgacggcggcgttgccctggaagctgggcttgtcgagcagctcgttctcaaaccggacggagcggtactccaacgtgccgagtttgtagtcaaaataagcgtcaatcgggccggtgtagacgattttgtcagccagtgcgtccagcgcgaccttgttttcgaggtaatcggtgttcagccgcacctcgatgccgtccagaagattggcgatcaccttggtgtagccgccgatgggaatgccctgatacagcgcgttgaaatagttgttgtcaaaggtcagccgcacaggcaggcgcttgatgataaatgccggcaggtccttgcaatcgcggccccactgcttttcggtgtagcccttgatgagcttttcataaatgtcgcggcccacaagggagatggcctgttcctcaaggttctgcggctcgtgggtgatctcacggcgctgctcctcaattttggcggctgcctcctccggtgtgacgacgccccacattttattaaaggtatacatgttgaagggcagcgaatacagctcacccttatagttggcaacgggagagtttgtaaagcggttgaactcggcaaaccgggtgatatagttccagacctttttgttgttggtgtggaagatgtgcgcaccatacttatggacgttgataccctcgatgttctcggtataaatgttgcccgcaatgttggtgcgcttatccacgaccagcacggatttgccgtggaccttggcctcatgggcgaagatggcaccgtacagaccggagccgactaccagataatcatatttcatataacaggtgttcctctctttaaaagtcaaagggatattgtgcggtaatggcatggagagccttactccactgtcaaaaagcggaagaaaggcgtttcagtctctgccgaatagatctcttgtgtagaccttgtcctgcacatcgttgaggcaggcatcgtagcggttggccagaatggcctgactctgccgcttgaatttgtccagatcgttgaccactgccgaaccgaagaaggtcttgccgtcctccagcgtaggctcatagatgatgacctgtgcgcccttggccttgatgcgcttcatgacaccctgaatcgagctttggcggaagttgtcgctgttgctcttcattgtcaggcggtagacgccgatcgtgacgggcctttcgcggctttcgtcaaactcattttcctgatcgtagccgtagtacccggccagcttcagcacgcggtcagcgatgaagtccttgcgggtgcggttggactccacaatggcctcgatgagattttccgg

SEQ ID NO: 1056 - DNA, 17812 bp, unidentified
  source 1..17812: mol_type = unassigned DNA
ttgactaagaatgcattggatatgattgatgagaaaatagtagagctgctgcaggaaaatgcacgtatagcgataaaggagatagcggcacaggtgtttttgtcatcaccggctgtaacagccagaatagagagattggagagcaagggaatcataaagggctatcatgccactgttgattcggttaatctgggctataagataaaggcttttgtcaatctggacctggagcctgtacaaaaggaagagttttatccgtttattgagagtgtggagaatgtcatagagtgcaattgtgtgacaggagagtattctatgctcatagaggtggagtttttgaatacggaggagcttgatgactttatcaacactctgcagaaattcggcaagacaagtacacagatagttttttccactcctgttgagcacagaggcctgcctgtacattcaggttttgatgcataagatgatatgagagtcaaaagatattttgcatgattgaatgaagtgtgctaaaatagtttgcaaaaatactgactgttaaacatgattttggatgctttgaatagtcagatatattgattacggcaggaggataatatgagtaagaaattaggcttcataggttgtggaaacatgggaaaggcaatgatacacggagtgcttgcatcaggcaaggcacaggcaagcgatattcttgcatctgcaaagaccgaaagctccagagaaaagaatgctgcagagcttggaatcaggctgacagcggacaataagagcgtagcagagtttgcagatattctgtttttagcggtaaagccacagtactatgaggaggttatagcagagataaaggacactgttagtgacgatgaaatcattgtttcgattgcaccgggcaagtcactttcgtggtttgacgagatgtttggaaagagcttaaaggttatacgtaccatgccaaacacacctgccatggttggtgagggcatgatgggagtctgtgcaaatgaaagagtatcgcaggaggagcttgatacagtgcttgatttgtgctcgggcttttcaaaggctgagatgatagacgagaagctcatggatgttgtgacagctgtcagcggaagctcaccggcatatgtgtttatgtttatcgaggccatggcagatgcggctgtagcaggcggcatgccaaggagccaggcatatacatttgcagcccaggcagtgcttggaagcgcaaaaatggttctcgagacaggaaagcatccgggcgagctcaaggatatggtgtgctcacctgccggaaccactatccaggctgtgcgtgtgcttgaggaaaagggcatgagaagcagtgtttttgaagctatgatgaaatgccttgatatctcccgcaaaatgtagtagaattattgcattgagttaaaggagaaaagcaatgagtcaggcaaaggttgataaatataagaatgaaaaggcaaatcgtaaaaagacaaatgccagaaataaagtaaagcgtgttatagcacgaattgttgcagctgcggctgtagtcgcattggtaggctggggcggttactccggatatcagtactatgagaagagtcgtccggtgaactgctattacgcggatatcagtgctgtcagcgattatctacagggattgtctgcagacagtgagcagtagattatatttttgatacataacatatattttacgatttatatgattaagttaaaatgcctcgcaggttactgcgaggtattttcagtttttgaagaatccccgggctctttttgggattcagatacagtctttgcattttcttcggtatttgaggtgtcagatttttttgctttggagagtgtgttatcaattgcgttgagcagcactttggaggtgtactgacttgtgtttgcgtaggaaatattatcggtggattgattttgcacaatctgcgatacgagctcgttcatcgcaggctcaacaagcggatacatggtttccaccgaatcagtcatgttttcaaggcttatggagttaatattattgctgtccaccgccacagacacatcgatagccgccccacccagcgctacagatgtgttgtacacacccggtgtatacatgccggtttcttccaccttgggctttggttcatcacctgaaaaataatatgtagcagcgaaaattatcagaagaagcagtatgccaaggagcactccggtcagaatgacatgcttcatttttacaacaacgatttttgtttttgcactcatatgcgcctcctgtggttgttttatatataatatgtgtggggatgcaaaagtatgacagatattcctgtctataacgaaaaagagatatccatcaaggatatctctttatgttataagagcgatagactggcgcaagacgtccgggggacgtctgttctgcgccgaccgtttcacggcttccggggggatcctgaaatccttatgcaaatgtataagctatactaggtacataatcaatgatgcatccgttgataaaaaccaacacaatttaggagaaattaaaggttgagaactaaaacaactatcactttccaggaattgatatgcaggatgccttagagtgtttaaacaaacgcaaattttcttaaccaaataagtggttaattaaccaaaccgtgccaaggctagacaaagaaaaaaccttgtaaacactgggtttacaaggctttccgtaaagagcgatagacggggctcgaacccgcggtctcgaccttggcaaggtcgcgcgttaccaactacgccactatcgcatttattaagttgtgtgctctcttgtgtcgagcacgtgttatataatacacgatagaggagcatctgtcaaccacttttttagatttttttgtaactattcaaagccaaatgttttagtctttatttacatttgtgtgtctaatgtataaacagtataattatacatttcacgaattgcgtatgcaattagaaaatcaagtagtccaaattccataaaatgaaattttagggcaaattacagacattagcttggctgtagtatttttaaacaacatgtgttagactactgttatataaatcggaatatagtgagggactataaataccattacttcataacggggaggtgagattttatgtattatagtaatcctcagaggtacaaaaatggagatagataattggcagactatgatgctaatttttgaggtggtgtgtagaattttcaaaaaacaaggaggaaaatatggaacggtttattcggaaattatttggtttaacctttagtgcattattggcaggtgtgcttttagtaggttgtatttcgaaggatttaggagatgaaaaatctatgaacataaagatagatgggatagaacagattacagtatcaactcaaactaccggacagaaacaagatgttataatagaaaaagaaaaatatgaggatttgataagtaaacttaattcgtattcgttaaaagaaataacagatgaaaaatataaaggatggcagtatttgattaaaatagaaaaaaaggggggagaaattactctaatatgttttatggataataaagtcaaagtgaatgacatcgtttatgaagttagagattacaatattgatgacttttcatatctgtttgagtgaattttgaaacgaacgtaaaagtgatgaatcaaaataaaaagcccatgagaatttttctcataggctgaacaaagataatgataaatgattttttacgaaaaaagcggctatctcaaaggatagccgcttcaactgtagacagaagtatttctataacttaatttttcaaaaacagaaaccttaaaaaaagcagtattattaaaatgatagaaacatatttttctgttttactgactgtttgcataggaaagtatttctctctacagaaagagtaaatcatgctacaagcaagtgaaatagaaaaaaatattttaaaattcatagtatctatgtgctcaggacaaaacatcataatagcccaaagaatcacgagccaaagaactattatatagtggaaaattttttgaatcttattattatccatatcaatcactcctttctttaaaagtgaaatagacagatgtcttacttgtttcaataaccaaaggaattacttctttcttaaataggtttacattagttttgtgtcaacaggcaaaaactatgactataaaagtcaccaataagtaatattaagtcattaaaatgataacacaaatcctttctctaagtcaaatattcagaagtataatcgcttcacagcatccatcgcaagcatcgagcgctcacattcttccgccgagagtgtaatctgccagcaaagcggactatctatcatatgctttgccgcatagcttagaccataattcccttcacctgattaggtgtcatgttctgcgcttcttctattataaggttatctgaaaaaatttaaaaaaatttcaaaataactgttgacagatgctcctctatcgtgtattatataacacgtgctcgacacaagagagcacacaacttaataaatgcgatagtggcgtagttggtaacgcgcgaccttgccaaggtcgagaccgcgggttcgagccccgtctatcgctcttataacataaagagatatccttaatggatatctctttttcgttataggagtgaagcggagccgctcgctcgtggctttcgccacttgctttggagtgtttacaagtgataaactttctcattaagtccgggagggcgcatggtatggggatttgagggcatggattagcgctgactgcgtgagattaggcttgaataacagtatttccgggaaatataatgtttcttgtaagtaaactttaactagaatttttgtaaatatacaggaggaaaacattatgtcatttaattggaaagcttcaggtttattcgcagcaggtgttgcttttggtacagcaggtatcaagattttatcaagcaaggatgctaagcgtgcttatacacagtgtacagcagctgcgcttcgtgctaaggattgtgtaatgaagactgttaatactgttcaggagaatgcagaggatattcttgctgaggctaagagtatcaacgaggagcgtgaggctaaggcagaggctgctaaagttgccgatgcagctgaggatgtctgcgagtgtgctgaggctgatgagcaggaagcagagcaggctgaggttacagcagagactgctgaggcatagaagataagaggcggtcatatgaaatttacgattaagcatgagtcaagaggccgtatgcgtgttcatatggagcagtaccgcatgacatatgagcaggcagacactctgctttatgtgattcacaatcacaggaatgttacctttgtaaaggtttatgacaggactgctgatgctgtgattgagtatgtaggagacagagagcagattatagagctgctacgccactttcattatgagagcgccaatgtgccacagactgttatcaagacatcaggaagagagcttaataattcatatcaggaaaagcttatcggaagtgttgtctggcattacagtaaaaagctcctgctgcctttgccaatcaggatagcgcttactattggacaatctgtaaagtatattggaattgggcttaagtgtctgctgcagagaaaaattgaggtgccggtgcttgatgcgactgccatcacggtttctcttattactaaggatttttctaccgcaagctctattatgtttctgcttggaataggtgagctcttggaggaatggacgcacaagaagtctgttgatgatttagccagaagcatgtcacttaatgtgagcaaggtatggctcaagacacctgagaatcaggagatactcgttgagtcttcaaagattgaaaagggcgacaaggttgttgtccacatgggaaatgtcataccgttcgacggagaggtcttagatggcgatgcgatggtcaatcaggcttccctgacaggtgagtcggttccggttcaaagaactgtcggcaatactgtgtttgcaggcactgttgtcgaggagggcgagattactatcagggtcaaggaggttgaaggaaacaaccgttttgaccagattgttactatgatagaggagtccgaaaagcttaaatctgagctggagggaaaggctgagcactatgctgacaagcttgtgccgtggacgcttggagctacagggcttacatatcttctgacaagaaatgtgacaaaggctatgtcaattctcatggtggatttctgctgtgcactcaagcttgctatgccaatctcagtgctttctgctatcagagaggcaagcctttataatgtaacagtaaagggaggaaagttccttgaggctgttgcggaggctgataccatcgtctttgacaagacaggtacactcacaaaggcacatccgactgtggttgatgtggtgaacttcaatgatgagtattcatctgatgacatgcttcgtgtagcagcctgtctggaggagcatttccctcattccatggcaaaggcagtggtagacgctgcttctaagaaggggctttcccacgaggaaatgcatacaaaggttgagtatattgtggctcatggaattgcaacctcaatcaatggcaagcgtactgtcatcggaagctatcatttcgtctttgaggatgaaaaatgtgttgttcctgcaggaaaggagtcactgtttgagttgcttccgctgtattattctcacctgtatctggctattgagggtaagctttcggcagttatctgtattgaggatcctctgcgtgatgaggcagcggcggttgttacttcattaaagaaggcgggcatatcaaaggttgtcatgatgacaggcgacagtgagcgtacagcttctgtcattgcgaaaaaagtaggtgtagatgaatactacgccgaggttttacctgaggacaaggctgcctttgtggagaaagaaaaggctaagggcagaaaggtcattatgattggtgacggcataaatgattcaccggctctttcagcggcaaatgtcggtattgcaatcagtgacggtgctgaaattgcacgcgagattgccgatattacggtgggctctgacgatctctaccagattgtaactcttaaatatataagtaatgctcttatgaaacgtataaagagcaactatcgaaagattgttggttttaactcagggctcattgctcttggtgtggcaggtgtgcttccgccgactacgacagcacttttgcacaatggatcgacaattcttatcagtgtgaacagtatgaagaatctgcttgagtagattttggatgtagtacggggcgctgccagcggcagcgccctttacattgtggtggaaataatgtaggaattgtgataaactaactgataagtagtgcagattatttttatatgaggttagattattgaaggttgaagaggttataagcagggttgcagacagtatggacgcaaaatttgagagacgttttaaatctttttgtaattcactagatgcgttagctgaggccaggcagagagaccttaccgattcgtttgttttgagtgggacaggtgctaaatttagcattacttttgatttatcgtggaaggtaatgaaagatattctggtacaatattattcgataaccgggtttgttacaagttcaccgcgagaggtgttacgtgaatccttcaaggcaaagctgatttctgatgatgcgtggatggatatgcttaaggtcagaaatgaacttgcacatgactatgattgtgaggttgtaaggacacattgtaatacaattgttgaaaaatatattgatttgttttatgattttaagaatacgatagatgaattattgaaggttggataaatttttacgtagatatatctaatgcacaaaattaacacaatatagtaataaaacatagaattaaagatagcgatgacaaatatagaagttgaaataaacgataattatatatgtgtatatgagaggcttaatgacaattgcattaggcttcttcatatgtatgggaaaaatccggtgtgtgtggtgccggatatgcttgacggcatgagagtgacggagcttgcggagtattgcttttctttcaagagcatgcctgaaaaattgaaaacagagcttgggattgatgatattctgcgtcctgatatgacggagctgtgtgatgattatatcgagagggtcatattgccggacggaatgcaaaaaattggcaggctgtgcttttataattgttcaaggctgtctgtgcttgagctgccattcgacatatgtgatgtggatggtgacgctttcatgaactgcacaaaactttatatgcttgtgatgagaggctcaccgaaggataagtcgtgtcttaagcagattctttcacagataagcactcttgtgagggttagatgggctgacagcgatggaaatgcgattgcgcaggcatgttttttcgagtacgaccagacatatgatgagattggtcctgctcatatttttaaactgaacatgaacggagaaggttttcgcgccagacaggcttttatggaccgcgtgtttgtgtggaagcagtatgatgaaatattttcagaggcgattgcgcaggagagtgaggatgaccttttagatatggctttttacaggcttatttatgcgtatgagctttcaaaagaagctaggcagcagtttttggagtatattgtcaatcataaaaaaaggctgtctgagcttatcataagaaaaagggattcgggtttgctgcagagttttctggagcttaaagacggtgaggagaattttatcgcagatgtcctggctgttactgatatgcttgcacttgcagcacaggatgaatggagtgagggcagtgtgattttgcatagatttaagaaggaaaatctgtcggtatccaggaagaggcggtttgaattttaaatttaagtgtaaatgcaaaggttatgttattactaaaaaatatttgacttttttcaaaaataaaaatataatagcctatgaacgagtagcagactagcgtaaatccagtttagctgctcgtttttttgtgcacctgctgtcgcacatcattaaaatatatagtgcattataaagtgtgtagcttatcagcgtaagtccagcttatgagataagagcgcactttttttatgcagaaaaggaggaataagttaagatggcagaaagtaacaagatgaaggacatgccggtaaataagctcatggtacagatgggaataccgatgattttatctatggcattgcaggcagtttacaatattgtagatagcgcctttgtgggaaatatgaggtcaggaagtgaggctgcacttaatgcgctgacactggtatttccggttcagatgcttatggtagcagttggaattggaacaggagtgggaaccaatgcacttcttgcaagaacacttggtcagggaaatagtaaaaaagctgcaaaggttgcaggaaacagtttatttcttggtgcaataatttatatagtatgcctgttgtttggaatttttggagttaaagcttatatttcatcacagaccgttgatcctcaggttatttcaatgggaacaaattacttgagaatatgctgtgtgatttcatttggaattattttcttttcactatttgaaaagctgctgcaggcaaccggacgttctctttattctacaattggtcaggtagttggagcagtggtaaatattattcttgatcctattatgatttatggtattggaccggttccggaaatgggagttaagggcgccgcatatgcaactgttatcggtcaggttgtgtctgcaatactgctgtttgtgtttcatatgaagctgaacagggaatttgagcatgatacaaagtatatgaagcctgatggaggaataatcaaggaaatttatgcaattggacttccggctattattgcacaggctctgatgtcaattatggtttatgtgatgaatcttattttgaaatttagtccttcggcgcagactgcatatggtttgttttataaggtgcagcagtttgtattgttccttgcattcggactaagggatgcaattacaccaattatagctttttcatatggaatgcacagcaaaaagagaattaaggatggcatcaggtatggattgctttatacgattgtgcttatggtcatgggagtagcgattacagaaattttcccgggagaatttgctgctttgttcaatgcaggagcatcaagagaatattttatcggggcaatgagaattgtttccatcagctttatttttgccggaataaatgtggcatatcagggtatttaccaggcgcttgatggtggtatggaatcgcttgtgatttcactgctcagacagcttataattatattacctttggcaggcatcttctcattttttgtaagaggcggacatattggagtttcgctgatctggtgggcatttccaatcacggaggtgactgcttgtattgtaggatatttatttttaaagagaatcaataaaaataaagtggaaagcttaaattaaggaggcataagccatgacaaaaagaatcattacgataagcagagagtttggaagtggcggacgttttatcggagaagaagtcgcaaagaaacttggaattaaatattatgacaaggaaataattggacagattgcaaaagagtcaggactggcaccggagtatattaaggaaaatgctgagctgtccccaaagaaagggatttttgcatatgcatttaccggtcgtgatattacaggaaaatcagtagaagatatggtatatgaggcacagagaaaagtgattttggatttggcagaaaaagagccatgtgtgattattggaagaaatgctgattatattttgaaagacagggatgatgtattgaatgtgtacatccatggggatatgccggaaaaaatacagcgtatctgtaagctgcataatacttcagaagctgatgcagtaaaaatgataaatgacatagataaaaggcgtatgacaaattataatttttacacagatcagaaatggggaaaagctgctaattatacgttgtgcctgaacagctcacagctcgggtatgataaatgtgagagtataattattgaatgtgtatagtgtaataaaatacactgtttaagatattgtttgtgcattacattttattgagaaaataaggttactatagtataataaactctgaaaatattgcagcagaataataggggttgtgaagtatatgggaaaggaggccgcttcatgaaaaaacatatccagacagattcagagtggcaggaggaaatgtcacagaaaataatagatgaaatacagtgcgagttgtatctcgacatgccttttatgaagctggcgctctcggctctttccacaaaggtgaacgagcagctttactccatggcaactgacggcacatatatttattacaatcccatcaggctgattgatatatttaagaaaaatggcatgtatctgaaccgggcttatctgcacagtgtactgcactgtctgttttttcacctgtggactaaaggtgagagggatgaattactgtggaatacagcatgtgatataatggttgagtacacgattgatacaatggaaaagaaaagcacaaagcgtatcctaagttatataagaaaaaccacgtatgagaggcttaaaaaagagcatatcgtgattgctcccggagccttgtacgcgtggctatacaagcagtatgcagaaataaaggctgaagaaatcactgatatagatgatattgcaaacacaaaggataaaaatgagcttgcacttctggcacgggaattttacacagatgaccacgctttgtggccggaggagaaaaacgacaatgctatgccactaagctcatccgaggcccaaaagcagtggcagaaaatatccagacagacacgcatggagaaaagccattcaaaggacagcaaatccgagggcgagcaggtaatgatgagggaactgtccgcgaaaagaagcagacgaagctacaaggagtttctgcgcaggtttgcagtgcttcgtgaggaggtacacgcagattatgattcctttgatatggggtattacgcgtatggactttcgctttacggcaatatgccgcttattgagcctcttgaaacgagggagacatacaagataagggattttgtcatagtacttgatacgagctattctgtgagcggggagctggtggagcactttttacaggagacatttacgattctcacggagtcggacagcttttttgtcaggaataaaatacgcatcatacagtgtgatgacagcgtaaagactgacgaggaaattacagatgaaaagcagattaagccgcttttaaacaagtttacgctcgtaggaggcggaggcacagatttcagaccggcattttcgtatgtgagagaccttttggataagggtgagcttaagaacatgtgcggacttatatattttactgatggcaagggaattttcccggcaaagtgtccatcgtacaagtgcgcatttgtgtcggttggtgcatatgagggtaatgaggtgccgccatgggcgatgcaggtggagctggaggaaacaatatgaatataaaacaggcaaaaaacgaagtgaaaaatacagtgaaagcatacctgtcaaaggatgcacatggagagtacgtgataccgcagatcaggcagagaccgatgctcttaatcggaccgcccggcgtaggcaagacacagattatggagcagattgcaagagagtgcaaaataggtcttgtggcatataccatcacgcatcacacgcgccagtcagcggtaggactgccgtttataaaggagcgtgagtatgacggaaagagctattccgtcacggaatacacgatgagtgagattatagccagcgtctatgaaagaatggaagcaacagggcttaaggagggcatactttttattgatgagataaactgcgtgtccgagacacttgcgcctacgatgcttcaatttttgcagtgcaagacatttggtaatcaggctgttcccaagggctgggtgattgttgcggcaggaaatccgcctgagtacaataaatcagtgcgcgattttgatatggttacgctcgaccgtgtcagatatatatcgatagaagcggactatcaggtgtggaaggaatatgccagagatgtgcatatccatgatgcacttttaagctatcttgagcttcacccaaacaatttttacagggtggaaactgacgtggacggtatgaatttcgtcacggcaagaggctgggaggatttaagcagcctgcttaaggtgtacgaggcaggagaaattgcagtcacggaggatgtaataggtgagtttatccaccatcctgatatagcagaggatgtgtacgcatatctggaaatctacagaaaatacaatgaggattacggtataagcgatatattgtccggaaacgtgaaaaagtcagtatataaacgtgtgtttgatgctgattttgatgagagaatcactgtggtgaatctgcttttaagcggactgacagttgttttttcggatgtggccagagagcggaaaatggtgcagctatggtatgagtttctgaaggaatatagaaagtcacaaagaagccctgaagagcagcatgcgctgtacaacagtgctgtggaacagttttcaaagaatatggagatattgaaggagagctctcttattttgccaaaggagtattacatcagacaggatgtcttaaggcatatcaagggtgattttgatacggtgatggatgattttaccgaagaatctgagaagctttcaacgatggaggatgctgcaggagagaagctaaaccacgcatttgattttgtggaggatgtattctcggacggccaggagatgcttgtctttgttacagagctgaccatcacaccggaaatcagcagctttttagctgagaatgagtgtgaaaaatttgatatctacaatgaaaagctcatggttggaagcaataggactaagcttttaaaggagcttgagagataaatcctgttgatgtatgcagagaagatttgaaggaattatctatgatttatatatttagcgctttttatgctgaggcaaaaaatataatagaccactatggcttaaaaaaggaaaaaagccctgaaatggtgagatttgatgtgtttgcaaatgagagtatcaggcttgtgataacaggcgtaggagaaatcaatgcggcggcagcggtttcaaatattggtggtgcgtatgggatttcaacggatgatgagattttgaatgtggggtgtggcgctggttttagcagtgatatctgtttgggcagtatatttctgggaaacaagctcactgagcagatgacagggcgtacattttaccccgatatgctgatgaaagcaaatttcagggagtgcgaaattgtaacggtcgcaagggtgcttaatgaagggtgcgattcggttgtatatgatatggaggcagccgccgtttatcaggcagcagcgtttttcgtgggaccgcatcgtatgcattttataaaacttgtttcagatgccggtgagagaattgaccagtcgaaaatcacagagctttttgctttgcaggaagacaaaatatgcggctatattgatatacttttaagtgtaggtggtaataaaacttcaatagatgataagactaaaggcgaaaatatggcagacggcaatgcgacagatgatactaaatccgcttggaatattgacaggctgaccagcgatatgcgctgttccaaggtaatgggagatcagctggcacagcttataaagtattgcagactaagtggtatagattataaagctgttctggatgagtactatacaaatggcttgctgccgtgtgagagcaagcgtgaaggaaagaaatgtctgtttgaattgaaacagagattgttgtaagaaggaaatgtcaaatgtgtcaatacaataaaatgttttcacatgtatatgtggaaaaaggcgtggccgagcatccacgtacaaagcagattttagaaaagctgaataatacaacagtcatagaaattgaccattacaaggatgttttctgccgcaaaaagcagagtatttctgctcaaagcaatgccaaggcgctcattctggcagagaatacaagtggctgcatatatgaaggtgcaccggtgtgtcagagctttggaaatgagaatttctactattgctcatgcatgatgaactgcatatttgactgtgaatactgctatttaaagggcatgtatccgtctggtaatcttgtggtgtttgtaaatttggaggatatttttgcggagcttgaagcacttctggcgcaaaaaagcatatatctttgcgtatcatatgatgcagacctcgtggccatagagtcgcttaccggctttgtgagggaatggattgcttttacaaaaaagcatgagaatcttacaattgaaatccgcaccaagagtggcaggtgtgatttgtggagcaattacgaagtctgtgacagggtaattattgcctatacagtttcgcctcaaagggttgcagcagagtatgagcattttgcgtctgcacctatggagcggattcaggcagcaaaatgtgctatgggtagtggatttccagtgcgactgtgctttgatccgatgatatactgcaaggactggagaggggaatacagcaggctggttgatgacgtattttcacagatagacggttctaagctgtgggatgtgagtatcggaagctttcgcatatcgcaggattatctgaagaaaatgcgaaaggacatgccttgtagtgctgtggtgaattttccatacaacaatgtgaatgggtattaccagtatccggaaaacatacgaagtgatatggaagagtttatgatacaggctgtatccgaatatgtggataaggacaggatatttatgtggaagtgatattattgcaatacattttcaatatatacacatagtataaaggagcaatcagatgaacaaagcaattgtaaccggggcgtcttccggcatcggaaaagctatatgcaggcagcttgcagcgaatggctggttggtttacggaataggaagaagcttcgatcaaagtgatgatattgcagggatagagcgtatagtatgcgatattaccgatactgcaaagctcatcaagacaataaaagaaattaataaaaatcatgacatatcacttctcataaacaatgcaggcgtcggcttttacgctcttcatgaggaacttaatcctgtaaaaatatcacagatggtgaggacaaatcttgaggcaccgatgattatcacaaatctgctgcttcgcgatttaaagaaaaacaaaggaacaataataaatatctcatcaatcactgctgaaaagacgaatccgcacggctgtgcctatggtgccacaaaggcagggcttacgagcttttcccacagcctgtttgaggaggcgagaaagtacggtgtgcgtgtggtaaatttagagcctgatatgaccgataccaatctgtacaggaatgctgattttacagtggatgaaaatgaagctgcaagaatacagccaaatgaggttgcagacgcagtgctttatgttttggggcaaagagaaggccttgtgatgacagatatcaccataaggccacagcttcacagaattgcaagaaagtaaagtgtttatattttaaaaagcatcaaatgccattcgaacgattgacttatagtcattaagcgtctggcattttttaattttcttccagagcttttcagagtcagaaaacagcccatgcatatatgcccagatttccttcatgcggaaaatggcatccttttcaccggaaaagatggacagataaccggataaaatctcatcatgccagttctttaagcgctcgcgaagctcggctttatccatgcttatacccttaagctctgcgataagagcaggatttgcaaacagtccgcggcctatcatgatttcatcaatatcagggaagcagtcggttagggcattaaaactattagtatcagtgatatctccgttgtagcagagtgttgttttatcaggatttattttctgcatggcgagggcgaagtcatccatgcgcggcgtatttttataaaaatccttctggactctcggatgcacggtaagctcacttatcggatatttactgtatatttcgataagcttgggccatagctcatcatcgttaaagcccacgcgggtttttattgaaacaggaaaatcagcttttgtatacagctcatcgaggaagctatccagcatatcaggatatgcgagtatgccggagcctcgtttcttggatacgacggtgcctgacggacagccgagatttacatttatctcatcatatccgtaaggaacaagctgcctgtgcaggtcgatgacctcgtctgccactatagacatggcctgcggtattagagtgattccgtcgttgtttaccgggtctatgtctctttttatcttggcattcatgcgctttgcggcagggatgaatggtgtgtagtatttgtctatgtagtcaaaattgtggtggaatgcgtttcttactgtatatccggtcagcccttgcatcggtgcgagaaaaaatttcat

SEQ ID NO: 1057 - DNA, 23614 bp, unidentified
  source 1..23614: mol_type = unassigned DNA
atgaaaaagaatctgagatatatcatcgcgtcgctgctggcgctcatgatgctgctgagcctgtgcgcctgcgcccagaccggcactgccggcaatagcggacagttagaccttgactatgtgggggaggataccgaccagcccgaagaggaaaagccgtggtattcctggtttacggaggccttcagcttcggcaagaaggacacggcccccaccgcgcccagcaagcctgatagtgtggcagatttctactctcagggatcttcggatgcaccggaaggcaacaagagcaacaaggcagatcaggccactcctactacgcctgacgaggagcctgcaaatatcacaacgccagattccggcggcaagaagaacgacggtaagaaaaacgaccagaaagctgaagatagcaatactcccacacctacaccggatcagaagccggacagcaagaaggataccgtcaccatcaccatccgctgtgacacggcggtaaaaaacggcatgcatctggagagtaagtgggcgggcatcgtccccgcttctggctgtattctggatgtgaccacagtagagattgagcaggggaactcggttttcgatattcttaaccgtgtgtgtcaaaaatacaagattcacatggaacaccgcagcaagaattatataaatggtatcaataacctttacgagtttgatggcggtcgctggagcggctggatgtattcggtcaacggatggtatcccaactacggctgcggtacgtattttgtcaaggcaggagacgtaatcgaatggaactatacttgcgaccttggcagtgacctgaatgcaaagatggacggtgccgaagactggaaaaatactcatgactgatttctaaatccgattcttcggggaactgcatccggcggtcagaatggcatatttcgtactggcgttgggtgccacatgaggatgagagccgagacttgttaagaccaagttagctctaacaggatagatattgccgccctccacatttgagatagcgagagagaattatgagcgaacgaaaaaccattataaaaacggtgggtctaaaaaaatactataccgtgggcggaaacactgtccgtgcattggatggcgtggacgtatctgtgctgcagggtgaatttgtctgcattgcgggccgcagcggttccggaaaatcgactcttctgaatatgttggcaggactggagccgcccaccaaaggggagatcatcgtccgaggcaagcatcatctggaggccatggacgaggagttacggacaaagttccgccgccgctatatcggcttcgtctttcagaactacaataatttgccccaatacacggcgttggagaatgtggcgctgccactggccatccggggcgtaccggaggatgaacggaactggctggcgtggcaggccctgagccgtgtgggactacgcggacacgtagatcaccggcctgcggagctgtcgggcggccagcagcagcgcgtcagtatcgcgcgggccatcatcaccgagccatctatcgtgctggcggacgagcccaccggcaatctggacagccgcaccggtcaggaggtcatggagctgctgtgtgagatcttccgggagaggaacaccacttttgttctcagctcacatgacccgcagatgcagtgttatacagatcgtaccgtctatttcagtgacgggaaaatagagacagagaatcaccacaccggagaggagcgcacacagtgaagagagaaacggtaaaacgggtactggccctgttgatctgcgtattgatgacagtatccctgctgcccaccgtcgctatggcggaagaagtcacggaggatgtgatagatgacagcaccattgaggcttacacgtcttacgaaaacggagaggatgccggcgtcggcggggtctcggttacggacgaaaagcccaacacggatatcaaggtcatacccagcgacgccaacgccctgatcctgatggataccggcgcacagtcccccaaaggcgttcccggtcaggtggtgaagatcgtgctgccgctggcggtgaataaggagtacctgcccagcgagaaatacatgctgcgcaacatcaacatctatcccgatgtgcctaccgacgccagcgtgtccaactggccctttgagctgatctacgccagcgatgtgcagcacttaaaggatatgtcctacaactccacggcggaggtgtggttcgagttcaagatcagcgagtttgccagtaagggccgttacgccgtgccctttaagatcaatgccactgtgtggcgggaggatgccgtgaacggcaccaccatcaccgaggacgtgaccttcaaggtcagtgcctatgtgaccgttaccgacaaccgcaatatgtccggcgtcactacctccttcggcagccttcaggtggcgggtaccaatgcgggcggctcctacaccgtgcctaccggcacacccaatcagactatctccatgcggatccccgtgatcaatgtgggcggcaccctgaccagcgtgacggtctatcccgtggtctctgccgcgctggacgagttccccttcgtgatcgactccaccaatttgggcaagtatttcgactactgggccagcggcgaggtaaagtatctggactacaccttcacggtgtcgccctttgccacctccggcaacaagtccattaaattcaaggcaaattatttcgagaacagcgcccctgcggagggctccttctccacgcagtttactgtgatcgacggctatgacgcctccgccatgtcggtgatggtgcagagctataagctgtatgtggacgataccgaggtgtccggcctgatggcaggcgaggagacggagctgcgcctgaccctgatcaacaactccaaatatgacacggccaagaaaatcatctccagcctggtattcaccaattctcccggtctgacgctgtgcgtgggcggcacggataccgcctgtgccgactccatcaagccgggcggcacgacgatcctgaaatacaagatcatggccaagcaggacgcggaggttggccccgccatgctgggcatcaatctaacctatgagaccaccgaggcggtggccggtaaggcggcgcagaacatcatgctgcccatcagccagaagatggacattctggccggtacgccggaggtgtacggcacacccagcaaggataaggaatctaccatctccgtgccgctgaccaacatgggccgtgccaaggctatgaatatccgggtgctggccacggacggcatgaccgcctccaccccctgttatgtgggtgacctgctggcaggcggctccaccagtgccgatgtaacggtgggcttctccaagatcggcgcgtttgtgggcaagatgatcctccagtatgaggacgccaacggcgagacgtattctcaggacatctccgtgcccctgagcgtggcggaaagctctgcggatacagatgccaacagcgtcaacgcaaataaggacggcacaggcagccgctggtggctgtggctgctggtgattttgttggtgctgatcatcattgcgatcatcgtctatgtgatcatccgctataaacggggcgagattgggcccggtgctgaaaacaccgctgccttggacgactttgacgacgactttgacgcagacggcggcaccccggatattggagagaagccgctgacccacgatggaaacaataaggacgggaatgtatgaagccgagagatctttttcactacggctgtacgaacctgttccggcgcaagacccgcacggccctgacagccctatccatggcggtgggcgtcatgtgtatcgtggtgctgatctccgtaggtctgggctatgagcaggcgtaccgcgagagcatcgaggccatgggcagcctgacaaaaatcgatgtgacgcctgccaccggcgattacggacgcaaggcgctgctgaacgacaaggcgctggaggccttccggggcattgacggtgtggaggcggtaacgccggtctaccagcagtccgcctacatcgtctccggcaactatgtcaacatggtgcgcgtctacggcatcgacatgaccacggcggaaaacttcatgctgacgccggagcggggcgttatggccggggacggtacacacctgcatccggaagtcatgttcacagacgacgtggcggctggccttgccaacaaggcaaaggattgggaactggcagtagacgagaatggcaacgccctgattgacctgctggaggtgcctgtccgcatgaccttcgattcctccagcctgaccggcgagccgaaggccgataccgatgggcgggcgctgccctccggcaatctctacaacttgcgggtaaccggcatctgctccacgctgaacaacaacttcacctcctccgcctttatggcctatgaccggctggaggagatggtgcaggccaacgccaactatctcggcgctgccacggaaaccaaaacggcggaggaaaaggccaacggccctacctatgatctggtatgggtgaaggtgaagaacgtcaacgatgtgcagcgcatcgtcaagctgatccgtgacacgggactgaacacctactctctcaatgatatgctggagacggtgcggacgcagtcccggcagatccaggggatgctgggcgcgctgggcggcatcgccgtcctgatctccgccatctgcgtggcaaacaccatgatgatgtccattacggaacggacgcgggagatcggcgtgctgaaggtgctgggcaccgttcgcagcgacatcttcaagatgtttctctcggaggcactgatcgtaggcgtgatcggcggcgcggcgggcttggcgctgagctttatcgccaagtggctgataccggtgatcttcgcatcccgtgagctgcggtgcgtactgccctggtggctggcggtctgcggcgtgctgttcgcaggcgcggtagccattgccgccgcatggatgcccgcccgtaaggcgacgctcatcagccccaacgaagccatccgctctgagtgaggaggtagcatttatgaaaaagatatgctgtgcgattctggccgtgctctgcatcctgccgtgtctggcgggctgcggaaaaaaggataagtatgtagagtatcgtataaccttatcagatgatcttactcagcctggaacagttaccatgcagttttatgattactattttgatatggagaaagtctccatagaagatgtgcagaccggcgaaattgagactaactactatgccacgggtacgtttctatctgatacgaacttagcgaacctccccgtactgatccactttaatggagatgttcttacattggacggtacaatggtcaccacggcttctcccattatgctcatgctcgatttttctgagggcaaaacacacgaaattggcctcgagtttgatgggctcacaagagtattttttgcatcagccagttgctcataaataattgtgggcaacatcaaaatagaagtgttaaggaataggagggagtacccatgcagtagttaggaattgcaagccgatccccaaagccagctattctttgtggagtgtggatagctggagagtcacgtacactcctggaacaaatttattgaggaggatcaaaagatgaagagattcaaaagtctctccgcgctgtttcttgcgcttgtccttgcgttaagtctcagcgtccccgcgttcgcggcaacaggtaacaacacgatcacgtccattaagtataataccgaatcgtttacgattaccccgtatacctacactggcgatgatggcgatggcgagagctttaaggcatattcctgccaccttgagtctgctaacgttaacaattccgtattggcgaacatgccgcttacggtaacgtattccggcggcacgctgaaaaacggaactaccacctataccggtggcggtacggtgacaacctatgttaatgttatcaaccgtgttgcagcactgacgctgaccagcaccaacggcgtaaccgagacctactatatcagcgcatggaaaacaggtaccacattctatgcttctgtgagtgtcgagtttaatactgcctatgcgttctctcagacagcggtcaatacgaagtatacgggtgcgaacaccacccagaacccatatatgcaggcgaccaccgctacgcagaaagcgactgcccagtctgcgtatgaagagaccaatgatgcttttaagggtagcacctccgacacttttaacggtctgagctatggttataccgcggccgatatcatcacccagatctgcaacgcgaagggtgtgtatatctccaatagcagcggctatatctcccagatcggcgcacttaatcaggacactgccggccagtatgttcatcctcagtggggtggcccttacggctctggtggctggatgttcaaggttttacgtggcaacgacgcgatttacccctccattagcgcaggttctttctacctgatgcccggtgatgtagtcacttggcagtataccgctgacgttggttacgatctgggtgcgcccatgttctaagcgacacagcacttaaaaactattccttaacacttgggggatgcccggtcctttctgggccgggcatcccctgccaacataaagcgtgtgtatgctatgaacaggtaggagaaaatgaccacaaaaaacatgaccaagatttggaccaaaatttggatggtattgctggcattgcttgtgctgatagggtcactgaagccggtcacgacttatgccgtcaccggtggcttgggtgtattcctctactggccaggcgattttagctcaaacggaggcttcccccaaaacacatataccgacatacaggtctactccgaggagtacccggatgcaggctcaatgaacaaggtgacaaatattcaaccggagattttctatattgtcactatcccaggactggacgcagccacggcatcacgtaagagttacgatttaacactgactctgaaggaaaaaaacaatgacgcaccggaactaaaacttcctacaaacaattactatttaccggttcgcgttacatggaccgcgaatgatggacggcagtgcgatatttttatcattgcgatccctgaaattcgggattattccaaggcggatttcagtaagcctgcgcaaatgtacttggatctgttgcttggaaatgaattggacgacttctataacagccttgccgcaacaaaaaagggtgtggctggcggttattatattgataattatcgctgtttgatgcgaatacttaactccactaactggctttgtgcgggttttctcgattcgtataaagattactatagcaaatctgaggatgcacttgcagaagttcagcagacacttaaccaggacggttggttttctcccgagcaggcaaccgcatggtttaccgacgtgctggggtactattgggagtattgtgaagcacgcattgaagagccggagctgctgtcgctgcaggtcatgggcgttgatgcggtcaaggtatctgagtcggagtattctctctgtctgccggaaggtgtgaactggaaaaaggcttcgtcatcgatcgagtaccgcgcaaacaccatcaacgtttttgaagcgaagggaaactggactccgggagcgggaataatgctgctgctgagtgcaaaagatcctgcgacaaacactgtatataactccggcactaacggttatgtacaaggcagctattatctgcggctgagttcgagtacggatgagccggaattctcggtacattccttccagatcaatgaccgcacggcgagcattgacgaggagcatctgacaatctcattgcattttgctccggactggttgccgaaacagatccctcaaattacctgctccggaacaggctatgaattcctggatgccgctgggaagaccgtagagtctgacgaaaacgacaaaatcgacttttcaaaggccaaaaagctgcgcttatatgaggatctgacgtcatatgcgcaggcggggaaagataccgagggactgtcttaccacaaggactatgagctaaatttcacgcagggcgattccgctgaatgtgagttgttgtcctactccgtcggtgtggcgggtgagcagatcgattggagtgctgacggcaagacgatcacggtaacgattccctacgcgacggactggaatacgctcaagagcagctataccatatcctatgacgcgaccgtcaccatgccgaatggtgaggattttgaacactccgagaagacacctattcaatacacggtagctgcggagaatggaaacgaccaacggacttattctgttattgtaaagaaggttccccctgccaccggcaatgaaatcgagagcttctactgcggatcattggaaggcacgatcgacgatgatgcaaagacaataacgcttgagttgccggaagggtctaccaagcgctttgctccgcagatcacaatttccgaatttgccgttgttgagccagccagcggtgtacttcaggatttcaccgagccggttccctataccgttaccgcacagagcggcgataccaggacgtacaaagtcattgtaacggtctctacgcagcgaagagaaaatcctgataaatcggcctatcaggctaagttggacggaatcatcgataaatatcgggagagcgcggtagacgactgggagtggatgcagcttggcatctacgaaaatttgccgcaggacaacgggccgaacaccaacaacgggtttgatattgtcaaagagatcaaagacttgaacgttggcccgaaaggtagaatgacagacatcgccagactgacgatgctcctgacctcaagagggtatgattgttcaaaccttgccaagtataacggcggcaagccctttttggatggaagcaacaatgagatagacaacctcgttgcaaatattgcgtccacaactgacggtggtgtaaacggcagaattttcgcattgtgtgcgctggacatgggcaattatacgcttcccgccaatggggcgagaagcagggagtccttgttggagcagctactcaatcatgaatatgggtcggacggctatgacgttgatatggtcggtatgctgatgtacgctattgcgccgtatcaggaggtttctggttatgaagaacggacaaaggcaaaactggacgagggtgtcgaagccattttgaaagaaatgcgtgaagactacacgttccactcttggggaaccgtaaacagcgagtctgttgcacaggtcatttgcgcattggcctcttgtggcattgacccttattctgacccccgtttcggggacggtgaccgcacgatccttacacagtggatggatatgttttccacgccggatggttttaagcatgtgcagagcgaatctgccagcaacctgctggcgacatacgaatcctgttatgccttacagtggtatcttggtttcctggagaacgatgaggcggggcatccgtactatctgtattatcatcgatatgatttctccactgtgctttcttcggaagctaacatactggaattctctattgagggtcagaaaggtgtcttcggagaggaaaatggtcaaaacaccatttctgttaccttgcccaagggaatgcccctccagaatataacgcctgatttcaccttatcagcgggcgcgattttggaggctccaacgattcccgttacactcgctgagggtgcggcccagccgttcactgtgctggcggaggatggccagaccagaaaaacctattatgtcacggttacgcttggcgacgtagatccggcaggcgcaaagcttgatacttcgaccatagtcctgcaagacgccaatcagcgcaatcttgatattctggacaaggccgtcacagtgaaagaggacggcgaggacattttgctgacggtcagcagcggcatcgatgtgacaaagctgcgtgttatcgctaacatctcgtatcgcgcaagtgcctcgcctgtcttggatggctctgtgaatcttgacctctcagattggacggagtttaccattacctctgcggatggcaaaaaccacgctgcttatcgaatcaaggtgcaagcgaaaacggtagcctccatcacagcattttcgctgacgatcaatggcaaggtttacgacggagtcattgacaacgtaagcggcacgatctccgtgactggggtggacgacagcaatctgaccactacaaaatttgcgccggacatcacactgggtgctggcacaacggtgtgcagcccgctatccggaactgaacaggacttctccgcaccggtcacctatacggtcacaggccgcgatgtagagagccgtacttatacggttcgggtaacgaacacggcaggcagcttgatctctgcctccggagagacgccaacaccgtccagctctgccaggatcgagaagttcacggtactgggtgtagacggtgagatcgatcacaccgctggtacgattgaggtcgtactgccgaacgggacggacgtaaccgcggtagcacctgtggtcactgtacctgctggcgcagtggtaagccctgtgtccggtgaagtggtgaatctgtccacaccgcttacctataccgtgaggcttggcagcgaggcgcgatactatgttgttcgcgtggtgtatcagcgcagtacctcgcagcagctttgggacaaggtctctgaagataatacggtaaccgatcatcaggagagccgcagcacacaccggttctcgtaaggaaggtcagaccgatgacggagaatatattcactattacaaaaataaaggtgggaaatcaatgaaaaaaagattcattcccctattggcacttttactgtcgctatgcattattgtgcctgtatctatcgcgcaaataatggcggcaggtgcagttcagatcaatgttaccgccaaaggcggcagtgtagaaattgacggtcataccgtagccggtggcggcaaccatagtgttaaggaaaatacaaatgtcactataaaggcagttccgcaggacggttatgtgtttgactgctggtctgtgaccggaggatcaatagccgcagaagatctcaaaaaaaatccggcaacattaagtgtaacgaccggagctgttgcccttaccgcgaactttgttaaaaccgtaaccatcacggtggcaagcagcaacgatgcatggggtacagttaccgcaagcgcggggaatgcggtacccggtggagcaggtattacgctgacagccgagccgaaggaaggctaccgactggatggctggacggtctcttacaccaacggcgatcctatggttgattacagcagccgggtcaatatctacacactgaccaaaggcgaaggcaacacggcaacactggctataagcgaaacgaacaccgaggcgaaggctctgactgtaacggcgcattttgaaaaggcagatgccgggcacttccttagttacgattactgtgagctgcagccgctggttttcgatcttctccctggcaacaagaaggcagcaagcatcacagggtggtcgaacgatgcgagtgaagacattgtagtgaaatttaatgaactcggcagtgacaacaaggtcacagccttgcgcggctacacgatatggggtggcctcaagcgtgtggctgatgacgtgacgtttaagtttgacaacgcgaatgcaacgaactactcgaagggttcgggcatggttggccagaggcttgcaatcgacgagactgcttacgcggtaggcttcacaatgaccgacaaagatgggaaagtgaagcatggtactgtcttgctgcagttccccggtcgtgcgctggtggaggcggatcatggtacggtgcagtatggcgaaaagacatacaataacggcgatgtgatcacgttcacaccgggcggctccgagaccatttctgcgacagcagcagacgggtaccgtctgaaggaatgggtcattgatggagctacgcttgcgagctcggaggatggctccgcgaccttcaccgttcccgacaagttcttctctatcaagcccgtctttgaggaaactcaggctgccgtaaccatcacggcggcaagcagcaacgatgcatggggtacagttaccgcaagcgcggggaatgcggtacccggtggagcaggtattacgctgacagccgagccgaaggaaggctaccgactggatggctggacggtctcttacaccaacggcgatcctatggttgattacagcagccgggtcaatatctacacactgaccaaaggcgaaggcaacacggcaacactggctataagcgaaacgaacaccgaggcgaaggctctgactgtaacggcgcattttgaaaaggcagatgccgggcacttccttagttacgattactgtgagctgcagccgctggttttcgatcttctccctggcaacaagaaggcagcaagcatcacagggtggtcgaacgatgcgagtgaagacattgtagtgaaatttaatgaactcggcagtgacaacaaggtcacagccttgcgcggctacacgatatggggtggcctcaagcgtgtggctgatgacgtgacgtttaagtttgacaacgcgaatgcaacgaactactcgaagggttcgggcatggttggccagaggcttgcaatcgacgagactgcttacgcggtaggcttcacaatgaccgacaaagatgggaaagtgaagcatggtactgtcttgctgcagttccccggtcgtgcgctggtggaggcggatcatggtacggtgcagtatggcgaaaagacatacaataacggcgatgtgatcacgttcacaccgggcggctccgagaccatttctgcgacagcagcagacgggtaccgtctgaaggaatgggtcattgatggagctacgcttgcgagctcggaggatggctccgcgaccttcaccgttcccaacaagttcttctctatcaagcctgtctttgaaaagaccggagatactccacagggccctggctgtgccacggtggatgcagagcatggcaagctggtgtataacgacagggaatacaagaacggcgacgtgatcgtctttactcccggcgaaacagtgactgtatttgccagagtagacgagggctattatctggacagatggaacattctagacgcaactgtagaaagcgaaaatgtttataaggattctgtgacattcgtcgttcctgacgcagccttcactattaagcccatctttgaaagcaaggaaggaaaagtagagctgaatttccatgcctttaacacgggaacggatgaagaccgccccaacgcctatggctcgaaaggttggtatgagaaacttaatatttatcccttccagttctacacatttgatgcccaagatctcacgatcgatgaagcaattgcaaagaagaaccggggtgaactagataatctttataaagcaggctacactgggttaatggcaaaatggccgctttatattgaacagggaaccggcgtccttgtcgcggcgaatacatatccggcatttcctgcgggcgttgacagcaaagcaacctatatctgcgaagacctgacatcgacagctacaaataagctgggagatctggttcgctatgaggattcccagtacagaatacagaacagcagactgtatatcgcttttattgcgaacgaggatgtcaccgttaacgcaaagttccacgagcttggttattattcgttcaaggctgtatccaacgatgaaaccatgggaaccgtagaaattaccccggaatgccttgcgggtggaacgcagcaagaggcaacgcatgtagtcatgcgagcgataccgagggatggttacagatttaagcagtggatcgaagctgatggcagcacatatctgtcagcagaacagaaaatgatttcgatagctcagtttgtgtttggaaccaaggcggcatcctttacagctgtgtttgaggagattacagattctcagccgctgccgattcaagcaacgtccgaccccgaaggtaaggcaaccattgaggtcaaggcgaatggaatggctattacctcggcaaaggagaacacatctgttgttgcgtccgttgcaaatgtggatgagtattatgaattcgaccactgggagatcacaacagctacagagaccgcagtgtcgcttatttctgaggaggactgcagaaacagtagtgttgagtttgctatgccgtccgtgacggagggtgtccgtataaaggcagtcctgaaggagcggtatgtaacactcagctgggaggtcatgaagggaggcggcagtggctatcaaggtgcttccgaccttgcaaatgtggagatatccgtaaatggttcgtcggtaagcaactataccaaggtcaagaaagacgatgtgataagcttttcagtgaccgtcaatgacactgataagtatgtgttcgaaaaagttggaaaacgagttttccgcaccggtagcgctcgcatagaagaaacctttacagaatattccggcacttttaaactcacagagtggacgagtattagtttgctcgtgtgtttgaatgacaagaccgaggaaactgcccggcatgacatcatgctgacaaaggcgacaggcggtacgatcacatcttccaactcgactgcacagccgaacacgaccgtcacgctgaccgctgctcccgatagcggctacacgctgaagagctggatcgtgaaggacgaacagcagaagagcattgctgtcaccgaagataagactaacagcaatgttggtactttcacgatgcctaagagcaatgtcacggtaacggcagagtttgagtccacgtcggagattacaccgacgatcacatctgtcgcactgctgcagggtaaggccggtaataaactggcaacgggcgttctgtccggcgacaagtggacgatcaccattcccgataccgtgtcggcagagacggttgagctgatccccgaaggcacgtccggcctgtttctgaaaatcgtgacgcccaccggcgtaacagtaaagcagatggacggcggcggcagctgggcaggcgactggtctaagggtgacattgtgtgctggatgccggtaggcgaagaagttactttccgggtaattgcaggaacggccaccaaggactatacgattaagttggtctattccggttctccgttactgtccgatggctccgccacccgcagcagcaagaccgccgcaacggtgacgttcacctccaatgtggcaggcacctactactataaggtagtggatcacgatgcagcggctcccacggtggatgaaatcaagaaatctaccacccatggtacagccagcgcgggtgagacgaccttcaccatcagcaatctgaccggggatgcccgtgatgtctacatcgtggtcgtggcagccagcggcgagagtgcacccctgaagatcgggatccccgcttacgaaccaaatcccggtaagtacaccattacagtgaacacccccaagggcggtaccatcatccccaaccgcaccagcgccaatgagggcgatgagatcatcgttaccgtaacgcccgatgatggttatcagatggtggaaggctctctgacctacacgctggcgatagaaaacggtaagacggtgaagatcaccaacaaccgctttaccatgcccgaaggtaatgtgaccatcagttgtcagtgggggacagccgcgacgaccgccaagggcatcaccagcttctccatcaacggcgtggccggtgcggtgaacaataccaccaataccatcaccatcaccatgccccgcggcacagatgtgacgaagctgaccccggttatcgccacaaacggcgtcaagtctctgacgcccggtaacggcgtaacggtggacttcaccaatgccgtgacctacaccgccgtcatggaggatggcagcagcaagacctatactgtcacggtttacgtggacaaggggacgctggccgatcagttctgggacaagctgacggactttgccacccaagttccctggtggcagtatgccgaaaaacagcagagcaccagcaagtatcccaagtattggtaagtagatggctcccgaccccacagacaccctgaaataccaatcgcaaaacgaacaaaagagcagccattcctaggaatggctgctctttctctgtaatgactcaggcacgggcgtgatgggcgttggcctccccgtgtgcctgaaccccgcctacccccacggcatgacactatggggctctgaaggggctgagtgcgcctgcgaaggcaattgctatacgccgcgcgactcacgaaacgtaaatacgcatttgatgtgtcagagcagggatgccagttaagcattgagccagttgtcgagaataggccgcaccggttgaataaatgaaggaagaccacttgccgaaaacagcaggtagccttcccttagatagagagtgatttccttggaatttgtccttccgaacgtattgacaatatactcgattatgctacgctgggattagggggttaggtgcgggcgaggagcagtgtccctgcctgagctttgtctgcgaaagctgctgtggttactgcggagctacagtggatgtggagtccgagttgcttacttgctcaggtcgccttgcgagtcccaaatcaccatcggtgtattcgtcaaggatagtagatatttcatcatcaatacgtatgactgtcagcgaaacatagtgcagcttcgctcgccaatcttgcctgcgcaaagtatgcttcaactcctcaaatgccttttcgctgttcaggatgatgatcgtgtgaatccttgggatattcttatcgttctgcaaaccgaggatcacatctgaagcaagtatgtcgtgcccggtaaagtagtagaaaaaccatccttcatcgcctttttcgttgactaaaaaatgatgcatgttctcatagttcgtatctagaccgcggctacgcggagagtgttttgacgaatatggcatgaggagggttgtttcaaatatcttgtctataaaagatatgatgcgagtgccgtagtagagtagctgccaactctgaatcagttcgattacttcgcgtgtgtctcttatatacttcgccaagtcaatgtccagccctaatctatatgcaaccagattccattcaggctttgacttaacgttctcggttcttaaaaatcgagaaaacaaactgggggatagctcatattttgttgcaatatccacctgcgataccttggggttctgttgtaaaaatacgttgattacatttttgactaagtttgtgtccctaggaaacctatctctgcttcctgtgagtgccattgtctttacatagtaaccttcgaattcgtacaggtcgtttgccttatttaccttttcgctcacatgaacacctcccgtcattaaataatagtaccatttgaataaaaaaaagtcaagcatgcggcttgataaataaatctgttgagataacgcgcctgtgtttagacgattgatgcactaatataaatggttatgtttatttttttgaaccatactgttgacttttgtaaatatatatgttaatctaaaagtgcaaaaagtcgcggcggcacagcggggttcacgacttttgagaaatctagacttctaggattgatgcaaaaaaagaagggaggcgaattattacccaggatgcggcatacagtacgggtcggctcgcccggaatcaacgcctgtggagacggatttctgtcgttgaagcaggaagctactctgtagcagggccatataaaaaggctgcccccatttgcagatgggggcagccatccaagcacaccgtggtagggtccatgatgcacctgtaggacaatatgtattgtatcatgaatcctccgcaaaatcaacaacacagttttaaggaggaaaagatggggatgttactttcacgcgccgaggcggcagcgtatcttggcatcagcgcaaaattgctcgacggtttccgcaaggatggcaaaatctcttatgttcagcgggttcccggcggcaaggtctttctcagcaaggaggaattgcgtcagttcagggcaatgtacacgcgccctgtgccccgcgcatccaccgcctttgctcccgcttttcgcggcgaggtacctgaacgagggtgtcgctgatgggacgcagcaaaaaacctaaatatggcactgtcactcgcaagggaagaaagtattttcgaacacgcattaccattcaggacgggacacgagttacgctctacggccgcaccgagagtgaagtagatcaaaaggtcgcagaattgcgggcaaaagtcgcgcgagaagctcttgaacgggactgccccactgttgcgcaatatgcacagctgtgtctagagaacagatccccgtttatcgcactcagcacatttgacaattatgcacaaactatcaaaaaacatatcgtagagccgctgggcgacaaactcatgtgtgacgtaacgcgcgatgacatactcgccgcagtgcgacgctctgccgtattgtcagagtctacttatggtgcggttcagatgttctacaaaagtatttttggcgaggctgtcaaaaacggaattatttcggaaaatcccgcacttgtccttcctgcaaagggtgggaaagcaccgacaaaggctagaaagtcgctgacagacgaggaagtgcagatccttttgaacgctgttaagggattgccgccgtacactttcattttgcttgcgctgtacactggactcaggcgggaggaaatccttgccttgcggtgggatagcgtggatcttgactcaaaaacgccctcacttactgtgcgcgaggcgtggcacgtccataagaatcgcccttatatcaccgaaagattgaagagtagggcggcttatcgaactgtacctatcccctcggaattggcgcaatacttgaaagagaaagagaatacggccaattccgagtacgtggtttgcaaccgcaatggcggcctgttgtcgggctcgcaatatagccgcctgtggaaatatgttaccacgcgcagtacgaagccgcgcgaatatacgcgcattgcgccagacggaaccaagacgaaacatcgggttgttcccactttgggcgaaagggctgcacacaacagtcatgtgatttattctattgactttcgcgttacaccgcacatgctgcggcacacgtatatcaccaatctgatttatgctggtgtcgatcccaagacggtgcagtacttagcggggcacgaaaactcgaagatcaccatggatatctacgctgaagccaagtacaacaagccggacgctctggcagcgcgtgtcaattacgcattcaacattcctaacctgtaatataaaaacaggcgattgcgaaaagatgggacaattgaggggacaatttttcccttataatccccaaatcccttgcaaatacaatggtttctatcgtgggagcgcaagaagtacggtctgaaggccgcccgtcgcgcacctcagttctccaagcgctgatcggacgcaaattcacaactcaaaagctcaaaaaccccggaaaatccgcattttccggggttttcttatgctcattttcataaaatatgactgattttctccattctttcctttgaccatcgaccgttttgcaaagcttattataccacgcaagcataaggcctatgttaagcaagaggtctttggggtgattggaacagcgaaagactggcttttactacccggttgacaaaacggaccacttcctctttgctgtacttgtcatagccctccacgacgacatgcatcaaaccgtttgacagatgggtatacatcatttccagctctgtctcactggctccgggcagttctttccgccagtaagcaatgctgtccgccttggccagggcaatcatccgcataaggacggttgcgtttgtattccccagaattagaattcgacacgccgtctgattctgatcgaccatatcgtagatggcttcgatcagagccgtcacatcaagcgaattgacatagcgaagggagttctcaaatgtatcgatgagctcattctcaatgctctccatcagggcaaagcaatcgctgtaatgggcatagaaggtggcacggttaagctgcgccagcgcgcaaacctccttcaccgtaattctgtttacaggtttttccttcagcagcttcagaaaagactgcttgagcaccatttgcgtatagcgtttccttgcatccatcttctccatatagagcccctccaaaaaagtttacaaagaaaagcaacgcttcgacagaaagtgttgcttttctttcagctgtatggcaagtgctgattgtttctgtctttctcctcaagtatactgtacttgtgaaagataatcaacacttgtatgcttatttgaggaggcttttttaatgtatgataaatatcttgttacaggtgccaccggcttccttggcagagctgttgtagaagcgctggtacgccgcggcacacgagtgtatgcgcttgtgctgcatgatgacccctatatcaatttgctccccaaagaagtccataccgtcatcggtgatgtgtgtgtgaaaaactcactgacagacttcttcgcggatgcggacagccgtacctgtgtgattcactgcgccggtatcgtctctgtcgcgtccagacccggttcgaagctctatcaggtcaatgtaggtgggacatggagcgttctccggcaatgtatggagcgtaatgtgggcaaaatggtctatgttagttccgtccatgccataccggaaaagccaaagggctgcaccattacggaggattgcgaattctccccggggcttgtggacggagattacgccaagagcaaggcaaccgcaacagagcttgtcttcaatgcggcagagcgcgggctgaatgccagcattgtcttcccctccggtatcatcgggccgggcgatatacagggagggagcttcacctcaatggcgaaatcctttcttgccgggaagctgccctttgccgtttgcggcggatatgacttcgtggatgtgcgggatgtggcaaaaggcattctcgcctgttccgaaaacggagagcccggcaaaggatacattttgtccggccactatgtcaccattcgcaagatgctccagctcgtggggaaggctgcaaagctgaagtatcgccccatctgcctgccactggggcttgcaaggctggcggctccatactatgaacgtcgaagcacgaaggagcgaaagccgctgtttttcaccccttattccgttgctgttcttgcctcaaacgggcaattcagtcatgctgcagcatcggaatgctttgcgtatcatccgcgcccgctggaggagaccttgcgggacatgacagcctggcttttggggcagaggagaacggacgaagtgtaacctcacctcaacaaaaagcacctttaggggcgcgggcaaatagccccgcgccccattcgctgtcttcccagaaaaagacggctgttcctcaaaagaacagccgtcccgtttttttctgctgatatgtatctgaaatcagaccacaaacaggtacaggagatatctacaagtctgtttgtcagcccatatcggcggatagagccttgctgatttgggcttgcagtgcctccgcctgcttcttttccgtgatcgcacccacgatggggtcgcccacgatgttgccgttcctgtcaaccacataggtggtgggataggcaaagatattggtggtgaactttcccgcctcaccgtcggaagcaaaatacacgttctgataggtcgcgcccttcttggcaagcacatctttggcctcggaaatggccgtctcgttgccgtccagcgtgaaggtgttgacgccgatgagggcgccgcccttctccgcaagctccttgttcagcgcgtccagctcggcaagctcccctacgcaggggttacaggtggtaaaccaaaaattcacaacggtgacggcgtttttggcgaacagctcgctgctcttcaccgtgttaccgtccagatccttgccctcaaaggcgggaaacttctgcatactgccatcgtcaggcggcgtggtcatatcgctgcccgccgggacgctcgtattgtcatcactatcaggcgtctctgacagccagggatacttcgtctccagctccgcccgctggttctcaatatccttgatcttggtggcctcgccggtgagcagcgtcagctcctcctcggtgaactgatccttggcgttctcgatggtcttgagcagaaaatcgccgtagttgccgccgtcctctatcatggccatgcccttatcggctgccataaagaccttttcccaaagagctgtgttttccgacaggatggcattttcctgcgccatcagctgctcgtacagcgcttttgcctcttcactgccatccttgccgtccgtgtcctccgcgggctttgtgccacaggcgaccataccggcggccagcaccagcgccagcagcagtgtgatgattttctttacgttcattttgtttcctccgtttttaatgtatttgcaggttctacagattcttttttgccgtctccaaagccgtagcggaaactgacggcgttggtgggacaggcgcggatgcacatcccacagcggatgcactcggtatggttgggcgtttttgtcacgtccacatccattttgcaggccttggcgcattttccgcaggagacgcatttgttcctatccaccttcatctggaacagggacaccctgttaaacagcgcgtaaaacgcacccagcgggcacagccacttgcagaagggccggtaaaatacgatactcagcacgatcactgccagcaggatgctgaatttccaggtaaacaggctgcccagcgccgcccggatgccggaattggcaagggacagtgggatggccccctccagcacgccctgggggcagagatacttacagaagaaggggtcacccatgcctacgtcgttgacgagaaacgccggcagcaggaagaccatcaccagcagcacggcgtacttgaggtacgtcaggggcttgagcttttttgttgagagcttcttcgtggggatcttatgcagcagctcctgaaaccagccgaagggacacaggaagccacagatgaagcgccccagcagtactcccagcagaatgagaaagccggtgatataataggagaagctgaacttggaggaccccaccaccgcctgaaacgccccgatgggacaggcgccggaggctgccgggcaggagtagcagttcagccccggcacgcagacggtcttgcccgcgccctgatacaagccgcccttgagaaagttcggcaggtgcaggttggtcaataaggccgcccctgcctgtatccagccccgaaaacgggccaaaagatgggacgcgcccgaagtattcttcttatccaa

SEQ ID NO: 1058 - DNA, 14070 bp, unidentified
  source 1..14070: mol_type = unassigned DNA
atgaaagaagactggaaacccggaaccatgatttatccgctgcccgccgtactggtgagctgcggaagcactccggaggaatataacattctgactatcgcatggacggggacgatttgtacgaacccgcccatgtgctacatctccgtacgccccgaacgccactcctacgacatcatcaagcggaatatggaattcgtcatcaacctcaccacgaaagatatggcacgggccacggactggtgtggcgtacgctccggaaaggactacaacaaattcgaggaaatgcatctgacaccggggaaaagcaccgtagtcagcgcgcctcttatcgaggaatcaccgctttgcatagaatgccgggtaaaggagattatggctctcggttcgcacgacatgtttatagcggatgtggtaaatgtacgtgccgatacccgtaatctgaaccctgaaaccggcaaactggaactggcggaaacgaatcccttggtctatgtgcacggtggatattatgagctgggagaaaagataggcaaattcggatggtcagtagagaaaaagaagtaataatgcgataaaggttttaagagatggagttgcgacgaatcttgatgggcttatatctgttggccttccccgccatgatgtggggacagactccggttgtgcccggtactgccgacgaagagcattccggacaccgcaaggaaactccggtcaatttcggtttcaaaggcggtttcacctcttccttgttccttgtatcccagttcagtgtcaacggagtacccattgacgaagtgcagaacaattacaagataggatatttcggttcccttttcatgcggataaacttcgaccgccacttcctgcaaccggaaatatcctacaacatcaaccggtgcaacatcaccttcgagaaacctctgcccgaagacgccgcatcaggagcccggctggaggaagcctccattacatcgtccatccacagtatagacatccccgtcatctacggatacaacttcatcaaggaggggccgtacagccttgccgtctttggaggacccaaagtgcgctatatatgggacaggaaaagtgacatcgacttcgagaatttcgaccaggtgaatatccgtgaaaggctgcgtccgctcaatctcagtttcaccgtcggcgtatccgtcaccatctcacgcgtctttttcgacttccgttacgacatggggctgcacaacatctccaagagcgtgacatacgatattccggccgacaacaacgctgctgacgaaaacacgaaaaacgaaatccgttttcaccgcagggacaatgtgctgagtttttctttcggagtgttcttttgacagtaaatttcttccttttctttcaatttattcatttatttcccgtaaatttgtgcgcttaataagagaacacagatttatcaaacttatctaataagcagaatgaaaagagatgatttaattttcgaacttatcgaaaaagaacaccaacgtcagctcaaaggcattgaactgattgcatcagagaactttgtaagtgaccaggttatgcaggcaatgggctcctgcctcaccaacaagtatgctgaaggataccccggcaagcgttactatggtggttgtgaggtagtggaccagagtgagcagattgccatcgaccgcttgaaacagattttcggcgcagaatgggccaacgtacagccgcactccggtgcacaagccaatgcagccgtattcctcgccgtgctcaatccgggcgacaaattcatgggactgaaccttgcacacggcggtcacctctcccatggctcactggtcaacacttccggtattatctatactccctgcgaatacaatctgaaccaggaaaccggacgtgtggactatgaccagatggaagaagttgccctgcgcgagaaacccaaaatgattatcggcggcggttctgcttattcccgcgaatgggactacaagcgcatgcgcgaaatcgcggacaagataggtgccatcctaatgattgacatggctcatcctgccggactgattgcagccggtgaactggataaccccgtgaaatatgcccacatcgtgacctccactacccacaagactctgcgtggtcctcgcggtggcgttatcatgatgggtaaggacttccccaatccctggggcaagaaaactccgaagggagaaatcaagatgatgtcccagttgctggattcagccgtattccccggtatccaaggtggtccgctggaacatgtcatcgcagccaaagccgttgccttcggcgaaatcctgcaaccggaatggaaagaatatgccaagcaggtgaagaaaaacgccgctgtcttggcacaagccttgatagaccgtggcttcaccatcgtttccggcggtacggacaaccactccatgctggtagacctgcgcagcaaatatcccgatttgaccggtaaggttgccgagaaggcgttggtatctgccgacatcaccgtaaacaagaacatggttccgtttgacagccgctcggctttccagacttccggcatccgtctgggtactcctgccatcacaacccgtggtgccaaggaagacctgatgctcgaaattgccgagatgattgaaaccgttctgtccaacgtagacaacgaacaagtcatcgcagaggtacgtgcacacgtcaatgcgaagatgaaagaatacccgctgtttgcttattaataagcaaacagaattaaaaattaagaattaaaaattaaaggctgcgcagttcaaagcgaacattgcgcagcctttaatttttaattcttaatttttaattctaaacgcgctccgcgcgtttagctcagcccttctatatttccgtccacaatatcaatgtgttcggcttgtggtttcttgggtaatcccggcatacggagaatttcaccggcgatggctacaatcatttccgcaccgttattgaccacaatatccttgatgtggaactcaaagttgttgactgcaccgtatatcttcgggtcggcagagaaggagtactgcgtcttggcaatacagacggggtaatggctgatacccatctgctctatcagtttgataactttgcgggagtggagactgtaagtcactacgcttgccccgtagaggttgcaggctaccttttctattttacgttccacgcaatcgctctcttcgtaggtgaaggtcagcggttcggatggtttgttctcgatagtatctactaccagattggcaaggtcaacggctccctctcctcctttggcaaaggcgttgttcacggcaaaacctacctcaagcttttcttcgcaatggcggcggatagcttccacctcctcgtccgtatcactggcaaaacggttgaatgccacgatgacctgctggccgaatgaacgcaaattgcgtacatgcttgtccagattgccgaagccctctttcagtccttccatattgggttccttgatgcggtccagactgacaccgccatgcatcttcagtccttgtgcggtagcaacgattatcgtcagcttgggctgtaggccgctcttgcggcacttgatgttgtagaacttctccgcacccaggtcagccccgaaaccggcttccgtcactacataatcgccaaatgtcatggccatttttgtggcaagaatggagttgcaaccatgggcaatatttgcgaacggtcctccatgaacaaaagcagcagagccttcggtagtctgtaccaagttggggttgatagcatctttcaacagtacggtaatggcaccggctactcctaactccttcactgtgaaaggagtaccatcgaaacggaatcccagaataatattttcaatacggcgacggaggtcgtcgaggtctgttgccagacagagaatagccataatttcggaagccggggtaatatcgaagcccgactcctcggtaatgccgttggtgctcggtcccaatccggtgacaatgctccgcaaggaacggtcattcacatcaagtacgcgccgccagatgatttctttcagtccgaagccatccgcctgatgctggtacaagtaattgtcgagcaaagcggaaatcatgttgtgtgcggaggtaatggcgtgaaagtcgcccgtaaagtgcaggtttatcttctccatgggcagcacctgggcatatcctccaccggcagcaccgcctttcatgccgaagcaaggacctaacgagggttcgcgtaaagccacaatcgctttcttgccaatcttgttcagccccaatgccagcccgatggacacggttgttttaccgatacccgctttcgtagccgtgatagccgtcaccagtatcagattgctcttcttcactttctcttcatcaatcagatgcgtaggaatcttggctatgtaacggccatagttctctacttcgtcacgcgggatatccacactttcagccacctgctttatcttcttcagctctatgctgcgggctatttcaatgtccgatttcatacagagtcttttctttaaataacaactttaatgttttgaaagttgcaaaagtacgaaagatgtggcaaagtacaaaagaataccgtattttcacctgaccacctgcatcttctatctatttgaaccgcgacgtatccaccgcctcccgttgcttctccttatatccaccgaatttataagtaaacgatacgccgaattcgcggaagcatgagtaatgattcgtcacattctgcgtcttgaaacggatgcggggagaaatctgtcccgtctcaaaaatatcgttgcaatagaggttgagaatggctttgttcttggcgaagccgtagcgcagggcaatattcacattgcccgacgtaggcaggtcgtagatgccctgaatggctttactatgcacaaatccggtcaccgtcagcttcaagtcgggtttggtggagagagtaaaagtattgttcatctgggcaatgccatagcattgctttctgtcgaaaggaatatcccagaaatcaccatccttttcgcgatgccacaagccgatgagggtaaggcgagaattcaaccaatccttcaccttaaacgggatagaggcttgtatacctgcttgttgctgataatcaaaattgagtgtcttgtagatttcaaccagacgttcggaagattggtagagcgtctgtacggagtagtccttggtatggttgaaccaagcgctgaagatgtatttgctcttcaaaatataggtcattttaagctcatactcttgcgccggtttcagcaacggattaccatgcagctcagagtatccgccaccgatgtaagagacggcatcctgcaccgcccagtagtcgggatagtccttgtcgctgctcagagagagctgaaggatatgtcccggtgacggcatatagttcaagttgacgatgggataccagtcccactggttccagacgggagtcttgtaatgctccacagccagggaagcgtccaaagcgagtttgtcgccgaaactcttgctggaacctgcatagatattccaggtctgctcgcggcggcgggacttcatattgctcaaggcatccgatgaggtcagttgtccgccggtttcggggtcataataatattggtagctgttgtcgatgctggtagtatagatggctccgtaattcaaatcccaaccttttcccagactgtgctcctgggccagaaagaatttccatcggttgatacgttggcaatcttcggtgtagaagtcgagttcctcgtcctgcatgcggctatgcagcaactggtcggacggggaacggtagtaggtcagttcggcaccggctttgaggccgaaaggggtacgatagtccagacggccgttgtgcagccagtcggtgctattgccatgagttgtggacacctgcgtgcccgtcacgcccttccagttgtgggaggtggaatagccaccgttatagacgaaactcagctgatggtccttggcgatgttatagtccgcccctaccctgaaattatgggtatgactgcggccacggcccacctcatatgttgtcatggggtgaaccgagccgtctgccagggtgtgcacagcctctttgtcggtagtagagtagccccggccatggctgtgcgagtaaagaaaatctgctgagaatttatttttgctgaagagcaggctggcgcgttcctcaaagccttcgttatgcttctggcgatacttggcatagagttcgccttgccaggagccggggccgcctaccgattgtttcaaggtgatattgataagtgcgccacgcacctggtagcgtgcaggggcgttgtacatcacttccgccttctctatgcggctggcagggatgctgcgcagcaaggaatagagctgctctgtgctgagggtggttactttgccgtccaggataacggtgactccctgacctgccaactgcagccctccattcatctcgatgacgccgggaagctctttcacggcatcgtaggcattgtctacggggaggttctggataaggcggggcaggtcgtacaccagcttgccttgcgctgccttaacgatggggcgttcaccggtaatcatcacttccggcaaggtctgataaagactgtccagacgggcatcggtcgtgataaggctgtcggcgctgaggatgcggttgtcgtccgcaccggaggtggttgcagtgccgttgttctcttgtgccgaaaggctgatgctcaaagcacagcatacaatagggagtaaatagaatcgtttcatgtccttctttttatttatgtttatattcttcttctgcaaatcttcgtctgcaaagtacggcagaatcagcagaaacttgtgttatcagcggcttaccaagtgttatccagtgttatcgggagtgttatttagtcttatcggatgatagggttcacaatattaatcttacctttgtatgtataaaagtaaccggaaacaaacatgaaactgccattcaaatatattgccatacttgtcatcgtctccctggccggcatcttcgcctaccaagcctactggctgacggggctctaccataccatgcacagtgaaatggaaagggacatcaccgaagccatgcgcatgagcgactataacgaaatgatgatacgcgtggataaaatgaagcaggacgacataaaccacggtgaagtcagcgtatcagccggatacagcgatgacggaaaatcatttgtccgtagcagtaccaccatctcccgtgaagattctttggacaacaccaccctgcacgaaaccttcatgcccaaaggagacagtgtttacgtgacccacccgaacgattcaacccgcgtggaagtcagtgtcagggactcagacagctctccccaatccgcattgagtgccaaagggggactggatgtgattttgcgcgaccaaaacagtatgctggaactcgccacctacttccagcgcggactgcattcgggactggacatcatttccgaccccgacgtactgctttatgacagcctgctgacttcattcctgcatgaccgtaacatcaatcttccccataggctgctacatcttcacaaaggcagcaaatgggactctaccattctctatatagatacattggtaaacatcggtacccccggctatgtgcctacctcaaaagccgtggaatataattattctttcgacatcaatacaagtcaaagctaccgtctcatcatggaaccggccggcacgttggtcttgcgacagatgtcgggcattctcaccacatcattcgttattctgatcgtactcgctttctccttctggttcctgatacgcaccatcctgaaacagaagacactggaagagatgaagagcgatttcaccaacaacatcacccacgaactgaaaacccccatcgccgtagcatatgccgccaacgacgctctgctcaacttcaaccaagcggaggaaaaggcccaacgcgacaaatacctgcgtatctgccaggaacagcttcagcgcctcagtggactggttgaacagatactttccatgagtatggaacgccgcaggactttccgcctgcacccggaggagtttgcaatacgtgatattctggaaacgctcatcgaacaacacaagctgaaagcggaaagctccgtccacatatcggtggacatcgaaccggaagatttgagcgtacttgccgaccgtacgcatttcagcaacatcatcagcaacctgatagacaacgccatcaaatattcgcacggagaagccgaagtggccatccattgccgcaaggtaaccgtcgaagggcagaatgaacagaccgaaatctccgtcagcgaccacggtatcggtattgctcccgagaagcagaagcacatcttcgacaaattctaccgcgtacccacgggtaatctgcacgatgtgaaaggctatgggctgggattgttctatgtgaagaccatgatagagaagcatggtggcagcgtatcggtaaagagtgagttgggaaaaggaagtacctttacgataaggatatgataacattatttgttagggtactttacattacttgttaaggagctttacattacttgtaacaaaagcgacaattatggaaaagataaccgtacttctggttgaggacgaacagaccctcgccatgattatcaaggacacattggaagggcagaacttcatcatccacaccgcagcagacggtgaagagggattgcgcaagttcttcgacctccgtcccgacgtgctggtggcagacgtgatgatgccccgcatggacggctttgaaatggtgcgccgcatccggcagaccgacaaacagaccccggtactgttccttaccgcccgctccaccatcaacgatgtggtggaagggtttgagctgggtgccaacgactacctgaaaaagcctttcggaatgcaggaactcattatccgcataaaggccctggtaggcaaagctttctcctttacagaggaaaagcccaaagaaactaccgtttttgaaatcggtgactaccgtttcaattccgtcactcaacgacttgcttttgcaggcaccctgacttcacctaacgcggatacggaagtggaactctcccaccgcgagtccgagatactgaaacgtctttgcgagaaccgtaaccaggtggtcaacacccagaatgtattgctcgacctctggggagacgacagcttcttcaactcccgcagcctgcatgtgttcatcaccaaactgcggcataaactggccggagacgagcgcatccgtatcgtcaatgtgcggggaataggatataaactaatagtgaactaaactaaaactaaactactatttatgaaaaagttattattcattacttttatctgttcctcactctgcgcctatgcacagagcgagattccggaagacacaataaagaaccggcctcccgtaaagaaagagcagattcccttttctccaaaagagaacaagcgtacgggccttgatgaaagccagccccaacaaagtctgcaaggcgaacagcaggaagagataaatctccatctccctccctccgactatgtggagcccctgccctggacggacatgaagaagatacactttcagaaaaacatctttgaatgggacttccagcgtttcgccgatttcctgctctcgccggaagtcgtactgacgatgtacggcagccataacacctatcctgcaatgggctccatcatgcaggctggcgcaggagtcacttattacagtcccgacggacattgggaattgagcggaggggtatatgccgcccactattccatctcccaaccttcatccattaccggtgcccagtatgccaaaagggatgccccccgaggtactcaatgggacataggctacaatgcctccgtatcctaccgcatcaatccctacatgcgcctgcatgccttcggccagtattcgggctacgggagaagtaactcctttcatggatatatgaacccgatgtatccgcaaagcggttatggcatggtactggaactgaaagtgacggactggctcgacctcaacggagggatggaacgaagatacgaccccaccaaaatgaaatgggtaaattcgcccattttcgcccctaccattcgtataaagaaatagaaataatacaaagatatttccggaaatagagggaaacgagtatctttgttcagtctgcccctatgcggcagacagcaactgaaattgtgaacaaagaactatgaaacgaatcttcttctgcatcatcattttacttgcaggcatgtcatccgtcagcgcacagagcgagatgcctgccgatacggtacgtactgcagtacgtggcgaagcgtctcccgaaggcatgtctccgtctgaaaaggagcttctgccgggcgtgaagaattacgacggcttcctgctggatatggggctgatgaatctgtccacccccactcttcccaaattcactttggagataccggatgccagcaaagactatagccgcatcttccagttgaacccgaacgtgacttattcacaaggtctttcgaacatattctcactcagcaactcccggtatttcagttcgaatcccttcggactgacgggcttctggggctctaccgacaacctgcaaatgggaagtttcactttgaagaacggcatgcgcatccatacgtacggcgaatatgacaaggacggctggaaagtacccaacccttccgcactgccttgggaaaagaacaatttcaaaggggcgttcgagctgaaatcagccaacggagcctttggcatacgcatcgaggtacagcagggcagacacgtgccctattgatgcccatcacttaacaacagaatcaatgacaagaaagaaaatactggtaataggcgccaacggttttaccggcagacgcatcctggatgatttgtcccacaacgtgttttatcagacaacgggctgttccctgcacgacgacatctgtccccattcgggcgactatcgctttatccgtacggatatatgcaaccgccaggcggtgaaaaagcttttccaggaagtacagccggatgttgtaatcaatacctccgccctctccgtccccgattattgcgaaacgcaccatgcagaagcggatgccgtcaacattactgccgtggagcatctggcagaatgctgtgaggcgggaggcagccgttttatccatctttccaccgacttcgttttcggtggtgatacggaccgaccctatacggaggaggatattcccgctcccgttaattattacggctacaccaaactggaaggtgagaaacgtatcgctgccgtttgcagggattatgccatcgtgcgcgtagtggtggtgtacggtgccgccctgcccggacagcatggaaatgtgctccaactggtggcaaacagattaaggaacaatgaggaagtgttcgtcgtatccgaccaatggcgtacgcccaccttcgtgggagacgtgtcgcaaggagtggagaagctgataagtcatccgcaaaacggtatctatcatctctgtggcagcgagtgcctgaccattgcagacatcgcttatcgggtagcggacgtattggggctgaatcgctcgctcatccgtcccgtcaccacgaaggaaatgaacgaaaagacaccacgtccccgtttcagcgggctgagtatagaaaaggcacaccgggaactggggtatcaaccgtatacgctggaggaaggaataaagctgatgttcggatggtaaataatgcaggtgcggatggcaggagattcgactacagcaactccggctctgccagtcctttctctttgcgatacacacgtaccatctccagaatcacatctccatatttctccacccctttttttccgaaatacggaatgcgtacaagcatggccttatccgaaggaagcagattgctgatgcctagaattgccttctgctgaatgacggtgtatacgggcagccctaatgcggaagcttctgcattgcgccatgctaccaagcggttgtaaagttccggatgcagcacatccgtgggtacttcaacagccgcagcatcgcgtttccgctcacgcggacgtttctctttatcagcctgcttactgcttccctgcccttctttggcagaagcacttctccctttgcctttacccttctgcgaagccgaatcatcaatggaaagcagtgctttctgcttcaagtatcctgccatatggaaaccattctccagcacataatccagcaaatcagtcttcatgtcaaacacttcctccagttcctccatggcatcccggagcttcttcttcaactctttattatcagaagttaccgtactcgccatcaccgcatccagcggttgcaactgctcttgaaaataagtggcggcagagtgtatgcgcccctgcaaagtcgggtcggctgcatagtcctgcgcagtatcaatcaggcgggtatactggatactgaacttctgggctactttcgtcactttgtcgtgaaaacgttccatttcctccttgcaggctgcgagttgcttgggaaagagcttgtacaagtgttcgtctatcagccgcacataccgccgcaaagcctgctccatgggctggaaatcgaacaagcccgacagcagttccaggaaataggtctgctgcaaggaacggaagcgtttctcgtccggctcgtttctccgtgcctccatcgtgaaggtatctactgcatggtcactgataacggcctttgcagaaagcggggcactgagcaccactccctccaatgtcttgcagcggctcagagccacataggtctgcccatgcgcaaaggaggcaccggcatcaatcacggcacgttcaaacgtcagtccctggcttttgtgaatggtaatcgcccacgccagcttcagcggatattgccggaatgttccttcaatatcttctgtaatctccttggtttcctcatcaagcacgtatttggcattcgtccactcttcctcctgaagtaagaaggtagcgtcgcttcccttactgcgcacttcaattccatctgccgacacggctgtcacctctccaatcatgccattgtagtaacggtgctcaccggaggtgtcgttcttcacaaacattacctgggcaccgcgtttcagttccagtacttcatccgtgggataggaatattcgggaaactttccgtcaatcttggcacgaaaggcatacgagcgtcccggaagttgttccagctcatggtcattaatccgttgggcctgataattgtgggtcaccaggcggatgtatccttcttctttatctggtacgaaattgggaatataccggcggttcaaggcttccagcacttgcccgtcacaacggttttcgcgaatgcggttcagtaattcaagaaaagtcccatcgttctgccgatagactttctttagttctatggtgcaatattccgtctgcttcaaggcctggctggagaagaaataaggcgtgtcatagtatttgcgcagcatctgccactcatcgtctttcactacgggagacagctgctgtaagtcgccaatcatcagcagttgcacgccgccaaagggtttgttccggtcgcggaaccgcctcaagacggcatccaccgaatcgagcaagtcggcacggaccatactgatttcatcgatgaccaataaatctatgctgcgtataatgttgattttctctttcccgtaacgaaaacggtaggttgccttgccatctgcgctgaatgagctttcgggcacataaggagcgaaaggtacttggaaaaaggagtggatggtgacaccgcctgcattgatagcggcaattcccgtcggtgcaagtacaatcatccgtttcggactctccgccctcagttttcgcaggaaagttgtcttaccggtacctgccttgccggtcaaaaaaagatgagtgcctgtgttttcaatgaattgccatgcaagcgctatttcgggattattctccat

SEQ ID NO: 1059 - DNA, 79145 bp, unidentified
  source 1..79145: mol_type = unassigned DNA
  misc_difference 69543: note = a, c, g, or t
  misc_difference 69544: note = a, c, g, or t
  misc_difference 69545: note = a, c, g, or t
  misc_difference 69546: note = a, c, g, or t
  misc_difference 69547: note = a, c, g, or t
  misc_difference 69548: note = a, c, g, or t
  misc_difference 69549: note = a, c, g, or t
  misc_difference 69550: note = a, c, g, or t
  misc_difference 69551: note = a, c, g, or t
  misc_difference 69552: note = a, c, g, or t
  misc_difference 69553: note = a, c, g, or t
  misc_difference 69554: note = a, c, g, or t
  misc_difference 69555: note = a, c, g, or t
  misc_difference 69556: note = a, c, g, or t
  misc_difference 69557: note = a, c, g, or t
  misc_difference 69558: note = a, c, g, or t
  misc_difference 69559: note = a, c, g, or t
  misc_difference 69560: note = a, c, g, or t
  misc_difference 69561: note = a, c, g, or t
  misc_difference 69562: note = a, c, g, or t
  misc_difference 69563: note = a, c, g, or t
  misc_difference 69564: note = a, c, g, or t
  misc_difference 69565: note = a, c, g, or t
  misc_difference 69566: note = a, c, g, or t
  misc_difference 69567: note = a, c, g, or t
  misc_difference 69568: note = a, c, g, or t
  misc_difference 69569: note = a, c, g, or t
  misc_difference 69570: note = a, c, g, or t
  misc_difference 69571: note = a, c, g, or t
  misc_difference 69572: note = a, c, g, or t
  misc_difference 69573: note = a, c, g, or t
  misc_difference 69574: note = a, c, g, or t
  misc_difference 69575: note = a, c, g, or t
  misc_difference 69576: note = a, c, g, or t
  misc_difference 69577: note = a, c, g, or t
  misc_difference 69578: note = a, c, g, or t
  misc_difference 69579: note = a, c, g, or t
  misc_difference 69580: note = a, c, g, or t
  misc_difference 69581: note = a, c, g, or t
  misc_difference 69582: note = a, c, g, or t
  misc_difference 69583: note = a, c, g, or t
  misc_difference 69584: note = a, c, g, or t
  misc_difference 69585: note = a, c, g, or t
  misc_difference 69586: note = a, c, g, or t
  misc_difference 69587: note = a, c, g, or t
  misc_difference 69588: note = a, c, g, or t
  misc_difference 69589: note = a, c, g, or t
  misc_difference 69590: note = a, c, g, or t
  misc_difference 69591: note = a, c, g, or t
  misc_difference 69592: note = a, c, g, or t
  misc_difference 69593: note = a, c, g, or t
  misc_difference 69594: note = a, c, g, or t
  misc_difference 69595: note = a, c, g, or t
  misc_difference 69596: note = a, c, g, or t
  misc_difference 69597: note = a, c, g, or t
  misc_difference 69598: note = a, c, g, or t
  misc_difference 69599: note = a, c, g, or t
  misc_difference 69600: note = a, c, g, or t
  misc_difference 69601: note = a, c, g, or t
  misc_difference 69602: note = a, c, g, or t
  misc_difference 69603: note = a, c, g, or t
  misc_difference 69604: note = a, c, g, or t
  misc_difference 69605: note = a, c, g, or t
  misc_difference 69606: note = a, c, g, or t
  misc_difference 69607: note = a, c, g, or t
  misc_difference 69608: note = a, c, g, or t
  misc_difference 69609: note = a, c, g, or t
  misc_difference 69610: note = a, c, g, or t
  misc_difference 69611: note = a, c, g, or t
  misc_difference 69612: note = a, c, g, or t
  misc_difference 69613: note = a, c, g, or t
  misc_difference 69614: note = a, c, g, or t
  misc_difference 69615: note = a, c, g, or t
  misc_difference 69616: note = a, c, g, or t
  misc_difference 69617: note = a, c, g, or t
  misc_difference 69618: note = a, c, g, or t
  misc_difference 69619: note = a, c, g, or t
  misc_difference 69620: note = a, c, g, or t
  misc_difference 69621: note = a, c, g, or t
  misc_difference 69622: note = a, c, g, or t
  misc_difference 69623: note = a, c, g, or t
  misc_difference 69624: note = a, c, g, or t
  misc_difference 69625: note = a, c, g, or t
  misc_difference 69626: note = a, c, g, or t
  misc_difference 69627: note = a, c, g, or t
  misc_difference 69628: note = a, c, g, or t
  misc_difference 69629: note = a, c, g, or t
  misc_difference 69630: note = a, c, g, or t
  misc_difference 69631: note = a, c, g, or t
  misc_difference 69632: note = a, c, g, or t
  misc_difference 69633: note = a, c, g, or t
  misc_difference 69634: note = a, c, g, or t
  misc_difference 69635: note = a, c, g, or t
  misc_difference 69636: note = a, c, g, or t
  misc_difference 69637: note = a, c, g, or t
  misc_difference 69638: note = a, c, g, or t
  misc_difference 69639: note = a, c, g, or t
  misc_difference 69640: note = a, c, g, or t
  misc_difference 69641: note = a, c, g, or t
  misc_difference 69642: note = a, c, g, or t
ttatatttctatataactatccagaaccactgagaccccaagactgatgcgtcatacgcacatgtaagcatcagattttcctgtactcaatacaacttctgtcaaagcttaatacctgtttactgtggataagtaaactccatattggtctggctctcaagcaccttaagatatgcacggcactccttctttgcctcgtcaagtgacagattctcgtaatgtccgcactctatggctgatgcaccaaacaccggtccatcatactctagtatctgttttaagacctcttttgtgatttcaaaaacctttcccggctcaacatccctcactacgaggtagaagcctgtctgacagcccatcggtccaaaatataccacatcatctgcaatctcagagtttctcacacatgttgcaaacatatgctccactgagtgcatagctgaattggacatataatcgcctgcatttggttttcttgtacgaaggtcgtatgtaacgatttctccgtcttttcttgaaatataaaatccaggtttaagaatattatgattgattgtaaagcttttaattctttccataaaaatgtttctccttacttatttgctgcctcaaactgcttcagataatcctcaaatacattgagtgcgtcatccacaggctttggtgtgctcatatcgacaccggcactctttagcagctcgattggattcttcgagcatccaccgcacaggaaatttcctatatacttatccacagcaggctttccctcctcaagtatcttttttgaaaaagcaactgctgccgaatagcctgtcgagtactgatatacatagtacggtgtgtaaaaatgcggtatgcgcatccactcatatgatatctcatcatccacgcgcatatccggtccgtagtactgcacattcagctcatgccatagctcatttagcacatccttggtaaccggctcgcccttttgcattttccggtgagctatatgctcaaactctgcaaactgcgcctgcctgaaaagtgtcgtcctgaagccgtccagaaaatgtgttatgagatattttctctcattctcatcctcacaatgctcaagcatatagttcattagaagcgactcattgcaggtggatgcaacctctgccacaaaaatcaggtatcccgcgtaggtaatgctctgatgctcatttgaatagtatgtatgcatcgcatgtcccatctcatgagccagcgtaaacacactgtccagattgtcggcatagttcaaaagcacatacggatgagtgccgtaagcgccccatgaatacgcaccgcttctcttgttctcattctcatatacatctatccagccactctccatgccagccttaagtgtgctgacatactcatcgcccataggctcaagcgcctttgccacaagctttttcgcctcatcataggtgtatgtggtctgtacattgtccacgatcggtgcaaacaaatcatacatatgcagatgctccacacctaaaagcttcttcctaagtgccatgtacctgtgcagagccggcagatgtgcatgaaccgtctcaatcagattgtcatagacactctcaggaatatcgccaccggataaatacatggcccttgcactgtcatattttcttacccttgcataaaaagtgtcatttttcagcttgctgatgtacatcatggaaacagtattgctccacttcttgtacgaatcatacactccgcggaacacctgcttgcgcagacttctgtccttgctgcttaaaaagtctatgaaattgccgtgcgtgatacgtattttatttccctcgacatcagtgatatacgggaatttgatatccgcattgttgaacatgctgaatatattctccggcgctgcagccatctcaccgcactgcgccaggatattctcctctgcagccgataaggtatgctctttctgacgcattatctcatcaatcgcacgcttatagtgcataagctcattgctctcactgtaaaagctctcaagccttttatcatctatctgcaaaatctccggactcgcaaatgccagcgcacctgatgcctgaacagtcagtgtctctgcctttgacacatatgcctgatatttcgacacggcagtgtcctgatgcgagcgctcattcgcataaaccactatacgctccaaataataagacaactcatcctgcttcttaaaaaaatcaagcagcgttgctgcactgtcggccagatgtcccttaaatccggatagcttttctgcaagctgtgacgctttttcgcactcagcctcccacagctcatctgtctcatacatatcctcaagcttccatttgtactcgtctgagatttcatctctcttttgaagccttttctcactcattttgtgttaccttctatcttactctttttatttagaatcccacacatctgctctgcaaaatgcatatagacgtgtgggatatatgtgaattataacaattaagctctactttgtaattaaagtgcccataccacctgaaactgtcttgccctctttgttgagctttgtgataagcaccgaacggatggcagagtcaccgataaagtcgatagccgcctcaatctttggagccatggtaccctcatcaaactcgcctgctgcaaggtacttctttgcctcatcaacagtcatggtatcaagcggcttctcatcctccttgccatagttcaggcagaccttgtcaacgcttgtaagtataacaagtctgtcagcatcaagagtatctgcaagctttcctgctgcaagatccttctcgataacagcgcttgcgccctgaagcttattatcctgtgctaaaacaggaattccaccgccaccgcatgcgataacaacctgatccgcatcaacaagagcccttatagcatccttttccactatatcaacaggctttggagctgccacaactcttctgtaacctccctcaacctgtgtcacatggttgcccttcttctcttcttcctcagcctcagcctctgtcataacacggccaatgatctttgtcggatgataaaaagcctcatcatatgggtcaacaaccacctgtgtaagtattgtagaaacggtcttgtaaattcctctgccaagaagctctgtacggatagcgttctgtaaatcatatcctatatatccctgactcattgcagagcagacagctgtaggtgtagctgtatactcaggataaatcctgcaaaactcagacatagcagtgtgaatcatgcccacctgcggtccgttgctgtgtgtgataacaacctcataatcgtccctgataaaatctgcaactgcctttgctgtatgctttgtagcctcgtgctgctccggaagagttgttccaagagcatcatgtccgagtgcaataactatttttttcttcttcatgccgacctcctatgcaaaatgaaaactaatttgcttctattatctaatattttgtggaatttgtctagtactttgaactgatttaaacaacatttacgctacagcgtaagggacgtaagcccagagcaccggtgacgcacacgtactcttgcaggagcaaatagcgaagtggcttagatactgtagaaattatgcccatgaaacgcagaaacacccctgcatggacgcaggggtgaggagaaaacgcgcaggaattactgctgaatatcctttgcagagcttaaggttacttcaaccttgctctcttcgtactgtctgccactctgacgggcaacagtaagagtaaccttatctccggccttgtagctctttaacgctgactgcagctctgtcatagaagaaatctttgtgctgtcaacagcagtgatgatatctccctcctgtaagccggcatttgcggcacctgaaccagctgaaacagatgaaacatacacaccctgtgggaagccataggctaccatctcagatgaaacatcgccacccttgataccaaggtatgcctgattctcattagtatattttccatcctggataaggctctcaataataggctttgcaaccgacataggaattgcatatccgataccctcaacttcagttgaagaatattttacagagtttataccgataacctcgccattttcattcaagagtgctccaccactgtttccagggtttattgctgcatctgtctggataagcttgttgttggtaacagtctcacctgtctgtgaatcctgtgtagtaacagttctgttaagcgcacttactatacctgttgtgacagactgtccgtatccaagtgcattaccgatagcaattgcagaacttccaacagctacactatcagaatctccgattgttgcaatcttgatatttgagtaagtatcttttccaaggtctgctttctttacacgtacaactgcaagatcgtcatccggatctgttcctctgatttctgcctttaccactgaatcatcatcaaactgtactgtgagctcctctgaatctgccacaacatgattgtttgtagcaatataaagataatcatcatcctcactcacaataattcctgagccacagctctgagactgctgtgactgctttccgaaaaagctgttgtaggtgactgtacctgtatttgtgatagcaacgatgctaggcataacctcatcgacaatagatgatacatctgtcagatcctttgcatcccctgaggatgtctgcttagtcccaccggatgttgtagttgtaagctttgcacttgcagtagaagaatttgaaatagctctcgtgccaatatagcttactcctgtgaaaactccgcctccgacgagtccgaagataagagctgccgctactgtctttgctgcaaatggtccaaatgcaccaggctttctaggtgctctctgtttcttagtctttgcagccttttgatactgtgcgttctgatactgggtattctgcgtctgaccactctgatatgcgctgccttgctggtatgcctgattagaataaggctggtttgcatatgactgatttgcatttggctgtcctgctgcagaagcctgcgaatatggattgtagctctgtgaatagctttcagctgatgtattattagtctgtgcagccttctgtgactcatccggattgtaaggattacccgacattgtgaaatttacattgtttgtattgttatttgtactgttagtattatttgtattatttgtatcattcatatttctataattgttatccataataatttctcctttcgtttacatttagaagtatactgtcaatctgtgtttattttgtgacgggattatttattttttcataaatcatttaactatttatagcctatattccccattgcaggccactatgcgattataaaaataaaaataactgctcatcggcagatgcacctctaagtctgcgataaatagaaattgcagaatatcaatacatccctgccaatgaacagttaccataaatcatatattaaatttcaattccgttcttctcaagaagagctctcgctgtttcaaccgaatctgtacctgtcgcattctttacaggtgcaaactccttctccctgtctacctcaaatggcaggctattgtccatcatgtataccatatcgaggatgagtgtctcgaacttgtatgcattcggagtctcaggcttgtgctctgtaccattctcatcaatgtaaggtaccttcttctctaccacatgaagtggaaggctcttttctgcgatagccatgagcttgtccacgcggaataaatagtttaagattacaccaaagccatactgcaatgaaccattctcattctttgcctctgccatctccggggtaagctcgtaatactcaacaatcgaaggcttgccattctcaagacacatagcaccaactctctcatatggatcacattttctgaccaccttagagccgctgacacagccggactcgattgtagcacctacaaatacaggatctgcaatctgctgaagcacattgtccacagcaaatacattgagccactcaacacccttgtccttcaaatccttgtcaagaccggcattgatgagtgacttgaaccatccaccgtttccgtttggtgacatggcaagtgaatcctcagatttcatgagcagatttccatcaaaatcaactgccggaaccatctcctgcacgaaaaacttcacataatccttgttgtatccaaaatagtcgtgctcttcaaagaactctcttgtcatgccatcatttatctcgcttgtcatgacatacagcggcacccatgtaccggtctgatttgtaaccttcatgaggtttgagacaagctgctcaaagatgtagagttcctttgtctttccgatattgaacatgcccttagccttgtcaaagccaagacgtgtaccctgtccaccggcaagaagaattgcaccgaccttgccattcttgacagcatcaagacctgttgcaaggtatttgtccttatttgcctctatctctgaaagctccatagcagcaagcggtgaaaatgtacctctctgctgctccttgttgtgaatcatatcaaggtatgaccagtccatgtgctcaagctggctctcaagcttagccggagcttcctctgttaagaatttctttaagtatttctggtttgttgccgtgattttttctttgatttccggtttcataataaataatctccctaatagctaactttaattatttaatcatccgaaccatctgatgatgatttttcttctgaaccgttttcagattctgactggctctttttcagggcatcctgcttgtccttattttttttctttgccccttctgttccatcagagccaacagtatcattgtactgcgtgagatcaaatgctgaagtcttagatgtaacacctgtctttttagcaatcttatcacttactgtctgaactgtctctgttggctggtaatcagtctcattaaacaggaactgatgaagcttagaaacattctgtgccaggtctataggaattacggtatcgccagtagttgacagattcattgtagtcagctcaaatgggaagcctgttgtctccttcatctgatattttgtaacagctgttgcatactggataatctctttagctgtaaaattagtacttatctgactcataatatccttacacatctctgttagagagcctaaatctgactgtttagccttgtcaagcatagcctgaagcacaattctctgacgggatgcccttaagaaatcatcacctgaggtgcttctgatacgtgcatagcatgtagcctgagttccatcaagatgctgcataccatccccctcaagataaggagtattatatcctgtagtataatcaacctcaggaatcagataattgatttccttcatctccgcattagtaatctcaagatcaaggccaccgatatcatctatagcatctacaagagccttccagtcaacacagacatacttggttatattcaaatccaaatttgaattaagcatagctactgctctctttgccccaccatttgcataagcggcatttgcctttgcaaactttccattgcctataggcagatacgtatctctgtagacagaaacaagctgaacctccttagtatcataattcagactagcaatcatgatacaatcggaatgcccctcatcgtatgaaccattacttctgttgtccagaccaaacaacgctacattgagatatccatgcatattggcaagaacatcctcatcaatctcctcattgattccggcctcactatttgtcagcgcatcctcatatttaacctgtccgagtgtcttattataagcccaaaccactaacagaacaattaacagcagcaggatttcaaatacaaagagtataatcttcttacgtccacttcttctcttttttcttcttctcttctttgccatgttatttttcctttttcctatgaatgtaaagccacgcgtctgcgtagtcctgacgttccttctctgacatattggtatactttccaaactccagattcgtcagacgcatctgcggcctgccacacttgaagcattcaacctctttccttcttgaaaccatccgtatccagccacaatccgggcaaatgtatattttcatcatagtctttattcaaactgtccgagaacctcagctgacaaagcatcaagcttagcctgtgaatcttcaagagacactcctttaactccgaaatagaatttaatcttaggctctgtaccagaagggcgtacacagcaccaagcgttatcgttaagttcgtagtaaagtacattggaagaaggaagacctgtcggctcgacctttcctgttgtcatatcttttcttgtgtcattcttgtaatcacggatagcaagcacctgataatcaccaaatttctttggctcagcggcacgtgcctttgtcataatctcatttatctgtgcagcaccatcaatgccctttaaggtcattgtggaaatgccctctctgtagtagccgtacttctcgtacatgtcaatcatgccatcccagagtgtcttgccctgtgacttgtagaaggcagccacctcacacagcatgcaaactgctgcaggagcatccttgtcccttgcatatgtgccaggtaagcatccgtagctctcctccataccgaatacatagttgttgcagccggtcttttcgaatttgagcatctgctcaccgatatacttgaagcctgttaaaacctcgatatgctttacgccatatgctgccgcaattgccttacccatatctgttgaaacaattgactcaacaaatgcaggattctcaggcagagtaccattagcgctcttctggcttaaaatgtactcaccgataagcatagctgacatatttcctgtaaatgtcacatactcacctgtctttgtatccttgcagtatacaccgagtctgtcggcatcagggtcagttgctaaaacaatatcagcatccttttcctttgccagctcaagtgcaagcttccatgcatcaggattctcaggatttggataaggacatgtagggaaattgccatcaggcactgcctggcttggctcaatgtatacattctcaaagcccatatccttaagcactctctgtacagggcgaagacctgtgccgtggagtggtgtgtaaacgatcttgatatcctttgccatagccttgataatctccggatggatagaaagcttgcggagttctccgaaatatccctcctcaacctcatcagagatgacattgtaaaggcctgcctcaatagcagcagccttgtccatagtctttacctggtcaaacgatgtaacctttgccacctcagccatgatgcttgtatcatgaggtggagtaacctgtgcaccatcctcccagtataccttgtatccattgtactcacgaggattgtggcttgctgtgataacaacaccggctattgtaccgagtgtccttactgcgtatgaaagctccggaacaggtgcgagctgtgggaatacatatgtcttgattccgtttgctgcaaggcagagtgctgtggcatctgtgaactcatcatgcatattacgtgagtcatgtgcgattgcaacacctctctttactgcgtcctctccctgtgaaagtatgtaatttgccagtccctgtgtagcctgacggactgtgtatatattcatcctgttggtgccggctcctattacaccacgaagacctgctgtaccaaactcaagtgtgcgatagaatctgtcctctatctccttatcatcacctgcgatagccttaagctctgcctttgtagcctcatcaaaatatgggtctgtacaccatttctcgtactccgctctaaaatccatttatattaacctcctgtatcagctagtaaataagcctattaatgttaactataccgattttaccacattaacgtgcatttgaaaagttttagttccttaatatttttttaaacacaaggctcctcatccaaagtggcatcatacagacaacaagctgtgccgaaatcgtaacaaaataatcggctgcgcttatggtccctgtctttaaaatacgttttcttccggctttgtatttaaggaaataatcaaagccgccacgcctccttagcatatcatcaccggttctggcatacacaagagtctcacctatatttgccatacgacagtgatttctgatcatattcgcccaaagaagagaatcctccataagcagacagtcctgataattgcccgcagcaagcaccgcagatcttttgtacatcacagtcatgtgattgaacgcatcgcgctttctctgatactgctttatcacataatttccgagaggcactgtcctctctgatataatattatgcatatcatcggaaaactcgctgatgtagccgcctatgatatcaagctttggattttccgaaaaagcattcagctgtctttcaaaccggtcaggcacacatatatcatccgtgtccatcctggccacaagctcattagagcaatgctttatgccttcagcaagtgcaagaccgagcccgctgtttttttcaagctttaccgtaacaaaatttatctccgaaggcctgcattcatactcactgattgcctcataaagctcatctgtcagcctgccatcctccaccagcactatctcgtccggtaaaacagtctgtgaatatacgctttccatgcactccctgaaatactcaggcttttccttgtaataaattgacagtaatactgaaaatttaactttattcataaatattatcctccccgacaagcagcctaatgtatcaccgcaagcatagtctctatgcacagcctgatgtcatttgtcagcgaaaacttctttaaatacttaagattgtacctcatcttgcccggcagcaccttgtggatatatgtgtaatccacatcatccgaagcctcaagaagcctgtcctcatccttgtacctgatgcttgcctcacttgtgattccggctggcatcagaagtgttgccatcatcgcaggtgtatatgccatgacatacttctccacctccggtcttgtgccaacaaagctcatatcaccacagagcacatttatgagctgcggaatctcgtcaagcctgtattttctgatgacagcgccgactcttgtgattcttgaatccccaccgacagtcacgagtgagccctttttgtcagcgtcattcaccatggttctgaacttgaatatgcgaaacttcctgccatactgtgtgatacgctcctgtctgaaaaaaacaggtcctctgctatccacctttatccagacagcaaggaccagtataacaggcgaaagcagcacaagaagaacagcggacataatcacatcaaaaatgcgtttgaataccatgcttgtcctctttctgctcagatgcctgtaatatttaagtgtaaaatcatttttcatgaatgtaggaatctctccccatgttctccatctactcatgtaaaatctccaataaattattaattatatactccacatcctcatcgctaagctttgtgttgagaggaagtgtaatttcattctcatactgatgataagcatttggaaaatcagctatgtcaaagcccatattcttatatgctgtcatcatcggaagtggcttgaaatgcacatttgtggcgatacctcgctccgccatctgcactataagcgcattgcgcctgtccacgccgatgcccggtatgcgaagcagatacagatgtccgctcgatgtatgcctgtctgtaaaatgaggcacagtcaagagaccaagcggcttaaatgcctcgtcatagcgctctataatatcacggcgcctcttaagaagcccatcatatctgtcaagctgtaccagaccaatggcagcctggatatcagtcatattgcacttatacgaaggagccacaatatcatactcccagttgccctgaccattcttgtggaaagcatccttcgtctgtccgtggagtgaaagcagcataaactgcttgtagatatactcatcatcaaagccctctataggtctccaggtgagtgctccgccctctgcagtggtcagattcttgaccgcatgaaacgaaaagcttgtaaaatcagctacattgccacacataatccgctcaccgtctctcatgtatgaggcgccaaaagcatgagctgagtcagccgccacaatcacacgtccgattgccctctgcacatcgtttgacggatgaaaaagagccttttttctttccacaatatccaaaatcctgtcatagtcgcaaggcacgcctgcaatatcaaccggcacgataacctttgtcttttctgtaatagcagcctccaaagcctcgtaatccatctcaaaggaatcaggtgctacgtctataaacttaagtgtcgcaccgacatgcacagcagggcttgcagatgcagtataagtgtatgcacttgtgatgacctcatcacctgcacctattcctaagaatctgagtatcgactcaagacacgcagtagcagagcccagagccacagccttattcgtgccgcatagcttagcaatcctcttctcaaattccttagtccttggacctgttgtaatccagtcgcttcgtagcacatcagcaacagctgacacctctgcttctgttatatcaggtggtgaaaatgaaatctgtcttttttccatagttatgttcctcgcttccggcataaaatatgccaaacatccggcttttacaatctatattatgagcttcaaaagatatttagtcctccaggtcaggatgatatgtcttgaccacagatgcaactatctgcttgatatcctttgcttctgaggtgcatgccttctcgagcatctcaagctgcttctcaaagagctcatcatccatctcaataggctcacccacatgaatcagcttgtttggagtctccttaagaccctcctcactcatcagcatctcctcgtagagcttctcgcccggacgcagtcctgtgtatacaatctggatatccacatcaggctccagtcccgaaagcctgataagattccttgccatatcatcaatcttgacaggctcgcccatatcgagtacgaaaatctctcctccatgagcatagagcccggcctgcagtacaagtgccaccgcctccggaattgtcataaagtacctaataatacgcttgtccgtcacagtaaccggaccgccatcctctatctgcttcttaaatagcgggataacacttccgttacttccgagcacatttccaaaacgtaccgctacaaaatcagtcccagtctgcctgttcatcatctgtataaccatctcgcacaggcgctttgacgcgcccatgatattagtcggattgaccgccttatctgtagagataagtacaaacttcttcacatggtactctgctgcaagccttgagagctttaatgtgccaagcacattgttttttattgcctcattcgggctctcctccatcagcggtacatgcttatgtgctgccgcatgatagataatctcaggatgatatgtctgaaatacatagtgcagcctgttggtattgcgcacagagccaatcagcgtctccacccttacataaggatacttacgcttcagctcctgctgtatatcgtatgcattattctcgtaaatatcaaaaatgataagaagcttcgggtcctctctggctatctgacggcaaagctcactacctatggagccaccgccacctgtaaccataaccaccttgccctgtaaaaatgaatgaataccatcattatccacaacaaccggatccctgccaagcaaatcctctatactgaccggacgcagattagaaaccgaaaccctgccgtccaccatctgatatattcccggaaccacagacacatcacagccggtatccttacaaatattgagtatatccttcctgtccttacccgatgtggaaggtacagcatacacaatctttgtgatatcatacttctcaaccatctccggaatgtcgtttcgattgccgacaataggcacgccgtctatgaagcggccgagcttcgccggattgtcatctatgatacagcaggcctttgtgtgcagatgtgagctcatgataagctctctgataagcatcctgcccgcatttcctgctcctataatcatgactctctcatcaccgtttgcaaagcctctctgctcaagcatcttctggcctgtcctgataaatctgtacgcaaaccggcacgctgtgcacagtgcaaagctgagcatcagtccgataatccagaaggcatacggcatcttaatctcatacacctcatgaatgataacgcacagaaccgtaagcaccagaaaggcaccaataatatgcataaactcattgatgctcgcaaagcgccatatactgtgatacagcctgaaaatataaaacaccacaagtgaaatcaccataaacaatggcacaatgtgcagatacccctccaaaaatgagagcggaatatgtgaatatgaaaactcaaacctgatcatcaaagcgaaaaagaatgagattgcaataatacacatatcaacaaatgcaagaaccaatgccctgaaaacccattgcttgtcattgcccatgtatgaatccggcttctccggaccatcgcattttgttttgtcttttagattatttgtatcttttttcatgtcaagtctattactcatatagaattttctccttttgtcctacactgcaaaaagcagcttctatatccctatgcaaatcaacttctcataaactgcatttaaatttacgctttattataccatacacacactattatagttcttattattttattaaatataccacatttagcgatttttgaaaacaaacagcttgcttatgacatagttgagcacaaccacaaccacctgtgctgcaagcttcacccacatgcttggatagtccaaaagcgtgataaaaataaagataatagcctcttcaataaccagtgtgataaatctgccactgaaaaaagcaaacatctgtactaaaaacgccgtctttgtcggcgtagcaaccttaaacacccacttcttgttggtaacatatgagaaaagtacagcaaacacccatgccagcgcattcgcaatcagctcattgattccaaacaaaacattaaaaatagcatatgcgcctatgctgatcacaaaggtcatattgccaaaaaccgcgtataaaacaagctccttaaactcctctttcctgtttcgtattataatattatccatttctccacctatgtgacaggctatataactctgtcgtaatttatacgtgtaagttgatagtaatgttaatttgcgatttttatataataactgcatagccaaaataagtcaatatgtgatatgatatctgcatgaaaaagaaaacacaaaaatacaagagtataaaactaaactacatatataatgtgagctaccagatactcacactgatcacaccgcttatcacagcgccgtacctctcgagggtgcttaaggcagacggaataggtgcatacagctatacctactcactggtatcatactttatcatgtttgccgcactgggcactgtaaactacggaaacagggaaatatcatacctgcaggaggacagagcaaaacgcacaaaaaccttctgggagatagagcttctatccgtcatcagcgtgattgtgtgtctgtgtgcatatatggtattcacacttgcatttgggcactcaccgctcaaaaagcacctgctattgattgaagccgtgtacctgatatcagttgcttctgatatctcctggctgtttcagggacttgaggaatttggcaaaatagtcggtcgaaacgtgatttttaaaatcataaacattgcttttatcttcatcgccgtacgctcagagagtgatttgctcatatatgtggcaggaatatgtctattagagctttttgccaatatatccatctggttttacctgcctcaatatgttgacagaccaaagcttaaggagcttaagccattctctcatctaagggctacactcacactctttgtacctacaatagctacaaccatatacacagcgcttgacaaaaccatgctcaacaacataacaggcagcatgacagaaaacggctactatgagcaggccaataagatatccaaaatggttctcatgctcgtaacctcactcggtactgtgatgcttccaagaataggaagagccttcagtgaaaataaaccagacgaagtaaaagccctcctttataagagctttcaattcgtctggtttataggtcttgccctgtgctttggcctgataggcatcgcacgcaatttctcgccatggttttttggtccgggatatgaaaaggtgccatatctcatcatgataatggctacactgttgccgattataggcttaagcaatgtaatcggtatacagtatctggtaacaaccaagcgtgaaagcctgctgacacgctcagtatgtatcggagccgcagccaattttgtcatgaatatgattctcatacatcagctctattcatacggtgcagccatagcctctgtcatctcggaggtaataataactgccgtacagctttacttcatacgaaatgagcttagcatcccaaaaatattttctctatcgtggaaatatctcatatcagcagtctgtatgcttatagtactgctgctcatggatgcaaggctgtcagtcagcttcatgcacacaatgattatgattgtgaccggatttatagtctatatggtgctgcttgtactgatgcgtgacgagatggtatgtgaaggcataaggctcatcaaagccagaatcaaatgccactaaataataccattctgcaacgcttaattccccggcagcttcacttatttggctgcctcatactctccaaccacctgtgcctctcctctgtcagtatattctcttgccattttcagagcttttttagtcctcttcacagactttttccatcttgaaagctctgattttgccgtatcagactttataccatattgattcacagccatatcgccaatatatgccgtaagctttttggcaccataagcattcaagtgctcaaaatcagcgaagtcatgggaatcatctatccctgcaatgctctcataatcagtactcaggtcaagaaaatcgtatccatactccttcgttatactttcaatctgctcaagacccgacttgtcagctgcctgtgtctcatgaggtggctgcagcaacagcacatgctctatgccaagcttattgcagtacgaaagcagctccttaagatatgccctgcactcatcagtcagcatataggcttctttagtaggctgtccgatatttgccagattgtcacggcctccggtgatgcctgtttttgaataaaagcctttcagatagcctccaccactgagcctcatataggcacgagtgacaaatgaggtatacaccgcctcagggtccttccagttgccatgatacttttccaatggaaaataaagggtatccgatatgttatccttcaccttttcatcatccttattgatatttttgggaatagtctttaccgtgtcaagcttgttctgtgacataggcatattgtcaatccactttctcagataaacctcatcagtcagattccaattgccctgactaaatgctgcagcactgattacaagaagcttcggcttctgtctcttcacaatctccgtgacgatggacttgtacatattgcatggcacagctcctattgaaagattgcacgacttaaggccatactcatcccacgccaacgccggcgcatagcccgtgtatacctcacttggtccaatcatgaccatatcaaggctgttctctggctctgcgtaaaagccatatatattttcaatatcgctgctgtcaatggcaataaatgcctttgatactatttgcatgagcaataggaggactattgcaaatgcagggattttaataaatttcatggtgtttccttttctattaaaacgctttattttgatattttttcagtaaacactatatagtatagcggattagtattaaaaaacaacaccctgattcatatttatcattttctgatatgaagctgtttacccgggtagaatataaaatcgataagcctgattttctttatgatacactcatacaatatccagcatatagcagtgcttcctgcaaatccacatatacactgcagcgccatattggttataccggccctgttcaatataatcctgattccacctacaaatatcacattcatcgcataaaacggcatgctgtcacggccgatagtctgtaaccatttagggaaatcacaataccctgataaaaaatagcttactgcaaatataaatacagtcactatacaggcggtaagccgctcaaacagactgctacacaggggattgctgctcatgtcatcctgtaatactatgccggacgactcaacaagcacactcataacggcaaggctcagcacagcatacctattatacagtttatcaagccacttcttaatcaggcatcccagataaaagtacatctgaaagccggctatgtagttaaagccctcatagtgaaagctgccatagcatgtgaaagcaattattaaaaacagcacaaataaaagctccattttataattaaaatgtggcagaagcctcgcaaacacataatcaaccatatacgcaacacaatataagagaaacagtgcgtataaataccataaaaactctatcggcttccacggtatgcttatcaggctgctaacggaaaccggctcccttatcaaatttgaaagggcaaatttaataatccagtaaataactgaaatcatcacgtaaggcagaaggatattaaatgctttatgacatatccggctaaaaatgccttgtgaaacattccctacatattcactgtataagaagcctgaaactgcgataaagcaaggcatgtgaaagctgtatattacatttgcaataccattcattgtatcatcaaatgaatacatgtctgtcaggcccaatgtagtgtgacctaaaatcacaaataaaataaggatgccctttatgaaatcaattgttttatctcgtgtggtgttggtttgcatgttatgacctttccttaaacacaaccagcttactaatcacgtaattcagcacaataacaataacctgcgcaatcaccttaatcagcatactattaaacccaagccatgtgataaacacaagcaatatagcttcctcaacaaccagtgtaatcactcgccctgaataaaacacaaacatctgctttataaatgcctgcacactatcagtcggtgactgaaatacccagacacgattcgtcagaaatgcaaacataacagttataatccatgaaagaatattggcaataagctcatttattcccataccaacattaaaacatgcatatgtagctatgctcacaataaagctcaatccaccaaaaaataaatacaatagcatctctttgtacttcttgtagaatggattaaaaattctgagtataggtaattccattaatttatcaaatactttcattccacataaaacctaataaatcacaacctttgttccatttggaatattatcatacagccactttgcattattaatgtccaatcttacacagccatgagaaacttgtttgccaagcgttccatcttgtatatgtgtcatactaccacgattataaagcactgaatggaacaaatagtttccataaaactgcgtataataccaacatgtataagacctgctaccaaaagatttacctcttccatagattgtaaactccccttttactgtaggcgtagaaggctttcccggcccacatgaccacgatgcaactcgactccaattaccatagcttccactataaacgcctacctgacatgcagatgtgtctgtcataataagccatcttgtagaactggctcttacctgtgcgttcttagacattacatctaatgctgccggtttcggtgtatacacgggcttatttttataataatttgcaacacttccaggtgcaggtgccccctttcttaccaaattaatccttagagcctctactctataactaataccagttgagcctgatgtctgcccatttgaagcccaacctaaccatccataattctctatatgtgaactgtagtatatattataaaatgttgctaactgacctgtaagctttatctcaatggcttctacctgcttagccctacatgaggttccagaatattgccccaaagttttccatccagtccatcctatatcctgcacatgcgttctatacatgatagtaccggttaatgaatgtacagtatcctgagataaattgatattaattccttcaattctcagttttcgtcctgtcgtacctgtaatgtttccccctgaaacccacggcatattacctatatcctgtttatagttctattttatcacatatgcattttatttaaaacaaaaaaagaaactaatacaaattatctgtatcagtttcttttttattaatttatctggcaatatatgccattgtatttttagaaattattccaccataattgttgccaggtgctgactgtcctttcttcactaatactatctgcaatgcctctaaatgaaggttttgtccggatgttcctgcattctgtccattctttgcccatccaagccatccgtaattttgtgcatgtactctgtaatagatatcgtattgatttgccatttctcccgtcagagacatatttattgcctctacattcagagctctgcctgtcgttcctgcaagtgcaccatccatcaccgtattctgccagccgatattctgtacatgtgtctggtattttattcctcctgaacacggctgcccgtcaagatctatctttattgcttcaagtccaagatttctgcctgttgttccactgagacttccgttttccactgcactctgccatccgatattacttacgtggctctgatatcttaccgatgcatttgtgttgattatcggaacagtactggtttttgatatatacgcttttgcgttattagatgtgtatcctccataaaatactgtaggagccatatctccctttgccgttacaactatctggattgcttcaagtctatatgcatatcctgaggttcctgctgcctctccattttttgcccaggctaaccagccatagttctgtgcatgtactctgtagtatatatcatacttatcagcatctttaccggtaagttttagcatcaacgcttccacatgcttattctggccggttgttccactctgttctccattgaacgagtttccatgccatccgtcatttttcacatgtgttgtatagatcacaccaatgtctgcatctgattttacatttatttttattgcctcaagctgcagtcctctgcctacggttcccgccatagctccatttgacacaccattctgccatccgatatttgctacatgtgtctggtatgatactgatacactgtttaatacccaatgtgcatacagtacatgatcagaagctgtttttactacactctcagcatttatctgttctccactgtctacagccgtccaccagcctgcaaatgtatatccgcttcttgtcggtgtaggtaattcaccatatgcatttccaaaagtaacagtttttgtattagcagtaactgttccaccatcagcattaaatgtaactgcgtagctgtttgctgtccagtgtgcatagatagtctgatcagatgtaacctctacttttgtatctttagtaatctgtgttccaccgttagctgctgtataccagccggtaaatgtataaccatctctttcaggagattccaaatcgccatatgtgccgccatatgtaatattcttgcttgtatttgtaagattacctcctgctgcatcataatttaattttactgtaaccggagtccataccgcattaactgtagtatctgaagcaatcttattatatgccttatcccacgataatacatacccggtctttgttatttccggagctttcgcccctctcatacacaaaacattctgtgactcaacaatctgaccattatcaacaaaatccactttatatctaagtggtgacgcatcacgttcttcatttataccatatgatatgtaatggtctacataaccctcataatcatcaccaaacgcactttgtaagtccctatatcttgttttgtaacttataacatcaaaattctcacttgcctgacgaccctctcgtattccattttctagataatgctgataatataaataccaattatctccaaaagcattttgcaaatctatattattatccttataaaaatgcacatcaaaaatttcattaccacgacgaccttcagccatgccatatttaataaaatgttgcagtgcagcttctgcagtatttccccaattattcttcacatcaggattattattcaaataatatgatacgtcaaatataaggtgatagtcttcttgttttaatccaaaataattaacaattccctgtgcatctgcgatgccaagtttttttaaagctgtctccgatccaaggtaattagtcgcgtcactttgattacttatatacgcatgttcaataataattcccgggaaaccggcctttttactatttcttattacactatagtaatcacaaatagatccatctgtataggtatctccactctcagaatttctgatacgcgttccatcatttgccagtcctaatgcgactaactgattaagaacctcgtttgctaatgctcccccctgtgcaccaatatttgcatttaagctggaattaggataataaactgttgcgccatgaacactcgagctggttgtcgaattattatgaattgaaacaaatacacttgctcctactgacttagcatagtttactctatcttcaagagctacataatgatcatcatttcttgtcatatatacgtttacacgtttgtatttactaagttcttccttgcaatactgtgcaatcttcaaattaagtgttttttctaaataggtctttccaccataacttgcctgtgctccaccatcgttgccgccatgccccggatcaagaacaacattcactgccgaactagctctaaagagattattctgctgtacatcagccgctgctgcaatagcctcgctaattgtattccccgcagcttgtgttgatgtttcatccggatttattactactgcatcatacacttcactgcccgtattttcattatctgaattgctattatctgaatcctccgcatatgcatcagcattcaaatccattacaacagtatcaattccaaactgtgaattaattccaatagcttcaaagtctactgaatacccgtcagtttcgagagacttaactgtataacagcctgaaaccagatcacttgattcaaatatcaggtttccatcctccgtcatctctccacttatttcaaatgactgatttaaatcggtattttcaactgttaatctagcatttgattgatcaatgccatccgctaatccaacaattatccttacagcatctccctttttaacagatggatctgcaacagataaatatgtaactatctgattttcactattatcttgttgttgatagctctccgtactattacctgtctctgcagaatcagcaaaaacaaaagtgtttgccgaaatcagcatagaaagcgtcaacaacagtgctactacttttttcatcttaaaacgcctttccttttgtaataaatctaaaatatagtttatcacataagaaaagacgtttaaagagttacctttttatattttcttaagattttttataattcgacggattgcaacaagttaattatcaactcataatatgtatcaggaaatgctagtatttcatattttatcacaacaagaaagacaacgtttaaagactttttacctattttatttagtttttaccataaagcaatttcttcctatacaattgagaatctttcaataattcaacatttatatagtccagaccatatttttcaatcaaagtatcctctccagaataaaggttagttcctaatccaagtctatttccctctatttgaacccctaaagctgccaatgttgttggatacaagtccaaagttgtatattctctttcaacacatggtttttcattaaccgctgcgccattaacaattgtaaaatatgttcttctattaaaatctgttgcattttgtctttctatataatcagaatccattgtaagatgatctccggaaataacaactgttgtattatcataaaaatcctgttgtttaatccaatccaggaattcagaaacttgcctgcttgaacatgcaataacattactatattgttcatcatattgattctgacataattcacatacatagccatctgtaaaatgcgtatctactgttaacattgtaagattaaacggttcatctttagaagctaaattatttaattcattttttgcatattcaaataatttttcatcttcatatccccaccaaaccatataatcatcatctatgtagcctctatcaattgcagtataataatcaaaaatatcatagtttccgtgtccgtgaaaatacgatgaacgtccagcaaatttcttatctgaaccaatcaaaaattcctgattgtatccttctcctttcaggacatctcctatagcccaaacacctggaacataattattatctgattcccactttgaatttaaggtatcattacttattaagttctcattaattggtacaccggatgtctgtgcaaccaatccacccattgtaaaagtcgcgcccgaagtcgtatacgcaccattcaattttccatatattccaaaattttcattctccaatgaaatttgtgtaagctccggaatataattttcactcatagcaccaccaacgctctgatctgaatatgtcatttccatagattctaaaaaaatatatatcagatttcttttttcctttgggaatgtaattgctacatctcttccatcaacataattatcttcatatatcgttgaatcctgctttgtatattttaaatacgatatgatatcaaaatggaaacaacacaatataattgaatatccaattgctatacaccctaaaagcgacatccaaaatttatatatccacttatttttcttttttctgaatatcaataatccaaatgtaaccattaaaacgcatattataataatcaaaataatggaaataaatatcacactgaatgatgaagtatttgttccttccaaaggtgtatttaaatgatatattatctgtcctattggcacatctttaaaatttttctgcatataccaaaaaccatatagcaatgctccacctaatgcagttaatatatatgttatgaaagcagacaggaaattaaaaatcctactatgtttcttatcatcattattctgacacaataatacaaattgcaaaataccaaatagcaaataacaaaacgtgcctatataaaacaatactaattgtctattcaaaaacagtttaactaccttataatttagtttttgtgacaaaataaacatattatcctgagtaagtgcagtaatatacaagccatcatcatgtacctcatactcaacatccttacgagatgatatgtatttttctagtttcgaaccagatacttctatggaatttccccaaaaatcagaaagtgtaatactcttaatcgaatatacctctaatgtatttataggatcaactctaaataaattattgttgatttctgccagacccatttttattttgaaattcgcttttttattttcaaaatatgcattaatactatcctcttctgtcattttcttaacactgggcgcataatacatttgggcatagtttttatttgaatgctcttctccatattcaatcgaaaaattatatgtatgttttccgaatattcctatacataatccaattaataataacgcaataaaagccacgtctattatagctaaaactacacttaacaagcgtctattattacataattcgttttttatctttcgcataataaaataccccttatttatatataaagaaacaaggagtattatattataatcttgtatttttttcaactttttcttaattttttcttaattttttcttaatctctttttgtgttcttttttaaaattgtatagattatacaaaaataaaatattaaaaacaacaccattacagaagtgagaaaaccgtatgctccaccttttattccatatctagccactaagtattcatttgccaatttcgcaactatagcagaaactatatatcctataattatcattcctgattttcgcatcacagttaaaacataataaccaaaataagataacgcattaattccacccgcaaacataagtaaaatcaataccatcctatattgtattaattctgaacctgttaaaatctgtaatacaggaattcctaaaatccaagccccaattatacaaattatagtaaagcctactattattactgatatttttgatattgaaacaataaatggtttcttgtaatctgaagcatattcgtctgctaatttagttaacgcgggcttcataacaaaagttgcaaatagatttacaatagaaacaggcataaataatgtctgaaaatatgctgaatagtttgataccatttttgcatctattgctattcgactagcacttaaaatatatgaccataaaaaagaacctataaataaaggaaaacaattcttgagaatacccaaaatatatttctcattccagataacagctatatttctaaatgttttcatcggcattacatcaaaaataatcaaaccaagtattgcaataagaattgacaacgatatagctaaaatcatatttttcgtaataataagaactactaacattacagtaactgacataaccgttctaaatgcttgagattttcctgttaaatctaaacgaccatctttttgaaatgctccctcgtataaatctgcatatgcatcaacaaatctataaatacacatcaataaaataacgatgcacttatatatatttgatttagctgtcaatatcgaataaacgatactaacaacaaccgacacaacaaataaaatatattttactgccttgtaatgtccaaattcaaaagtgcttttagtatctgtaacctgaaatgtccttgtttcataatactctataaaagcaagcatctgcgctactgttattgctatggcaaaaattcctccatcatcttcaccaactattctaattatcaataaagataatatcattgatgctgccgcaaatatcatgcttccaatcatattccaaacaaaattatttttttcagaggtctcactactaacatatttatgacacgctattgttaatagtttatttactttcattttcctcttctttcttataataatttctcactgcaatttcttcggtaagactgtttatcatattatctaaattggaaattcttaaagtcaaataaaaattatgaacaaaaagtaccattattgaaaatagaaatataaaatttaccgggctttttattccgcatatatctgcaaaaaaatatgcaatttgaggaaaaatacttaaaattaataataaaatacttgatacaatccaaaataaagcatattcaatttttagttttgctttctttattttcttcattataaagaaaaaaacacataatgacgcaacaaataaaataactctcaatgatgttgacatactctatatcctccctatctttttctaaaattctgtacaaacaatatagacattaacattctaaacatataagaaatggatcttgcaaaattcaaataacttgttcctgcaacacgctccttcatttcaacctgcacctcagcaacctttgctccattttttatcaaatatgatatcgtatccggttctggtccataattaatttcctgtgcaaattctttaatacattttctgctatataatctcataccagatgttggatcatttatttttactccagttgtcagttttatcgctgtggatataagtctgcttcccaacattctagcagaaataggctttttttcatccacaaatcttgaaccaataacaatatcatagccttcatcaagcttctttagcattttgtcgatatattcaggtaaatgctgtccatctgcgtcaaactgaataaagcaatcgtaaccttttaaataagcatattttgctcccgcctgaaatcctcctgccaatccaagatttattggcaaatcaattatattatatttatttttttcacaaactgagtatgtgctatcctttgagccatcatttacaataacataatcaaattgtgaataattttctttaatattattcacaacttcttctatactttcttcctcattatacgctgggattactattaatagccgattcatatctacaccttactttctatacattgttttctttttcactaagagaatatatttttgttaagacctttgcaaccggtctattccaaaattttaaaaacatctcataatcctctttacttcttaaattatctcctattactgctgatgtttccgactcttcatgaattctgtgtgccattaatatttcattacaatataaaaactccccctctgctctagatattctttcccatgtttcccaatcaacattacttctaaaacctgttttaaataacggttcataatcacataaagcttcctttgaatatgtaacagaaggacagcaaattgcatttccaagtcttatagcacttctcttatttttaattctgtatgccttgtcatgattccttaaattctttaacattatccttttcagtttcaaattaaacccattgtcagaaaaatttccattaatgagctccgagtaatctgaaaacgcgattaaagcatgtggatatttatcaaatgtatttataatttcagttgaataattttctctataaatatcatcctgatgtgctattgttatatattgcgcatcagagcatgaatatgcaaaattccaatctcccgcaattcccttttcacctttattaacgaacatctcaatctgatatttattacataaattttcaatatagttgttcggtgttgatgttgctaacttaatatttgatttttttttctgttttttcaatgaaattatgcaatcttctaaatatttactttctttatatgcacaaatcacaaactcatgttttatcatttttcctccctataacattttgattaaaatatactgatatatgcaccacattgaaacgctttgcataattatcattacaatataattatatactctataatcaaatttcaacctgattccactaccacccaaaacggcaaataatggataaatcaatggtgttatatatcttgattgacatccagctattgtatttgaaccaacttctgtatatgcaatgtacagtgatgtagctatcaaaactactgttccaaaaaacatcaaaatatcatatatataaactattttcgaatatgccttaacgtcgtattcacgtttatctgttaatgttgtaaaaaccaaaaatgcaaatactattatagcaactgttgttgtaccaattcccagatatgcaaagtgatcaataaacccattcatatttctaattgacaaatagtctttcaaaaaatttaataacgtacgtgtatattctactgggttatgaataatatacaatatctgttcagttggattaacacctgcaccacctcttacatcaccgccttttgaagtttcaaaaatggttttcaatagcaaatcaaataacataattacaaaggccatagagcaaatgctataatattttttcttattctcaattttgttccgtttcatcaaaaatggaattatcaaaaatgctaaataaatttgctttggaattattgctattgcaaatgctataaccataatgaccgtatcttttgtcgaaaccacaccttcttcctgacagttgcccacaaaatacgccattccaatcatgacaaatccaataacccatgtatcataagaataattgcttgctataaataaagatgttggaaacatagccacaacagctaatatcatttttccactatgtaatcgtttcatggcaaaataacaacataatgaatatactaatactattggaatttgtccaaatttatatatcacaaaaaagtttgctccaaacaatcttagcaaggcaatcacaactccactaggcaatgccgtcaaagaaatattatgatctatatattttattattgcatcactattcttgtttaaagtattaatcttttcaatattttgagcataagtgtctgtattctgaataaaattccccccattagtcaagacttctaactctggttctgataaacctatatgtgcaacagacgaagaacttattgcaaatttaaaatgtgaatcaatatcccaactaatatgaccaattggagaaacaaataacatagtaatagaagaaacaaaaaccagcctgacaagtaatttctccggcttatcttttatcgttctatagctaatcaatataaataaaataatagcgactatagcagaacaaaatagccacgtactatacataaactttagtccactaacaaaatacgcaattatagctcctataaccaaagaaactataaatataagtaaatctcttaatgctattttatattttctaccgataaagcaaataattgtatcactaaaattcaattttttgtctataaataataaaatcgatataataaaaacagtaaaacaaatagagtaaattattctttcataatgcatattttctttgtcaatactaattattgacttacctgaatatatttctatatcatcaaagttaaaatcagaatcaacatctattctaatttgtttaaggcttttgttagtaagttcaaaccctacgttgtcatcccctgaaaaaatagtttttatacaactatcattttcattaaattcattgccatcatcaaaatataactgtacatctaaatcgccagatactttatcttttaatttaataacaattgttgttacattctttatattttcttttttaaaaacaatatgcggatctactccattaatacaaatttgaccactttgatttatataacaaccgctatattctattatatccgatgtatcatatcgttctaataaattatcagcatttccgcgaatctttaattctttacgaggggaccaaaccatggctactgtcacaagacttaatatactaaatattaaaatccataatgatattttgctaatatttttttttgacatttcttactcctacaacaaatgatttcatttgtttattataatatgtcgttttgtcttcgttgcttttccattacagcacacatatatttgatacttacctgcatcaattttgtcgaactcacatataaatcctgataattctgcacctggttttcgcttaaaatgaatagccaaatcgcttctaaaaatcttacgagtagttattagataggacttattatctgatttcagtaataattgtatattcccattatacggtttttcattataaaatccccatccctcaattatacatttatttcctacataaatattatcaatcgcattcacaacttttctacaaatatcaaattcctttgtacattcttcaacaacacactttccaatattctctttcatcatattatatgagaaatcaggagcatgctgtgtcagatttgagctataaaatggatctttatttttaaagtacggatgcaatttatataaatgtttttgttctgccattaatcgtttaaactttttctcacttttcaaatcgttaccacgacttaccgattcatgatgataaagtataacatcattcctaacaacattataatatccagcctctacaagcctaaaacaaagttcaacgtcattatatgcaaccggcatatcctcattaaacccatttactttattaaactttgcagcatttacgagcatacaagcagccgtaacaacaagccagttataatctattttatttcgtccgaaataatatatattatcatcattataacctataaatgcatgaactggaccattagcaatattgataacaccaatatgctgaattttcttactattcgggtataacagctttgccccaactgctccaacatgctctaattctgcatgtccaaccattctttcaagccattcctcattaattatttcaatatcatcatttagaaataagtagtaatcacccttagcttctttagctcctatattacacattcttgaaaagttaaagttcattttttcatagatatatctaaaattatacttgtctgctaatccctgatacagtttcttattttcgtcattgcttccattgtccacaagaataacttcaaaattcctatatctggtaatttcatacaaggtctctatacatctttttaagactttatagttgtcttttgatggtattatcacgcttataagcggattggtctgcgagatataattcaccctatattgatacattatatctaccatttccaaattagccttgagaccacgtctcgcaagagcatcttccttgctcttctttgcagcctcgaatatatatggctttgcagatggatccaaagctgttgattcttttctttctctccaatgatataagattttatcaatatgagctattttatttgtcttttcagtaaatctaagagtaaaatcatagtcttgtgcaccttcataaccagctcttaatccacctatctcatttgcaatacttctgcgatacactccaaaatgacaagtatacatatgtgacattaatgtatccggagaccaatccggcttaaaatgtggcatatgtctattgaaaccatcatcatcaattttatcctcatcactatagataaaatccaaattgggattttcattcaatttttttacaacttcataaagtgcatttggacgcaatacatcatcacaatccataaatgcgacaaattcccctgtcgcaatttcaagcgctgaatttgtgcaacgtgaaatatgaccattctctgttctgtagacaatcttgattttttcgtttccttcatactttgcaagagtctctctcacactatcccatgaagaacagtcatcagccagacaaagctcccaatttgtatatacctgattaagtacagactcaatacaaggaataagatgtctgtccagtacattataaacaggtaccaaaattgaaatcttaggattatattcaaacttctcatcatagttctcatttgcttcaagcatagtaatccatgtttcatattccaaactgcgatttaatcttgctgccctacgtgctcttaccttctccggaactactttatgataaattggtcttgctactttttttatattttgcttgataatattcataaataataacctgcacccttcaattgcttatcttttatcgcgcttcaatctcaatatatggattgtatactgcatatttatttaatttcttcaaagtcttacccaggattaattctaaatcattctcacatccagccttatccggcattatcatagataataatacactcttatctaacatcacacagtctgatgagactgaataacaatctcttgtacttacaagtctgttaaaatttcctgcttcgaatcttccatatcccttaaacggatatataacgcttccttcctgatctacatctatgccagcctgcaaaatatatttcttattacatatttttgcacctactgctcctacctccggtcttgttaaatatccaagcatttcttctatacattttaagctcttgacttcaaatctgttatttataatccatacataatcagttcgtatatcttttacaacttcttttatctgttcttttttttctataaacaagtaattcttattaacatacttggaactgcactcaattgaatccacacatgccttatcatatattctatcaccaaccacaataatagttattggcgttgtcttactatacccatatatgatgtgataagtcccatgatatggtccttcttcaaccttagcatcaattttctttcttttaatatggtcttcaagtgctttttttccggctttaaatgcataaagcttactatcaggattttcagatgtagaattttcatggcatcgccaatgatataatatcttaggtatatgatatatagaatcagttttttctgcacacctaagaatataatcataatcctgtgcaccatccaagtcaggatttaaaattccaacctgcttagcaatcgacattcttactacaaacaaatgacaaatataattattagctcttaaaagatctatattaaaattcggtttgaaatatggttggaagcgttttgtaccaccagcaactattttatcttcatctgaatatataatatctgcatcaggctcattctctaaaagttttgcgcactcaaaaagtgcatccggagctaacatatcatcatgatctgcaaaaacaataaaatctcctgttgccatttctatagcagcatttgtatttgctgaaatcccatgattttcctctaaaactttaaatttaatccttttatcatcagccagatacttttcaattatattgatagtctctttatcttcaccagatttatattcgctagcatcgacaatacagagctcccaatcagaatatgtctgtgcttttatagaatcaatcatagctcttagatattctgcattggttctatataccggcacgactatactaaatttatagtcctctttgaaaaggtatcttctttgcagctctagcaaattatcatcaagtcggtttttctcctgccagattttatatgcattttcttcatcaagctttctcttgatttttttggcagttgcaaacagaccattttttttaatatttaatactattccactattcatatttacattgcatcttcattgacttctcttacaacaccagttatttctacacttgaaacgccatgactaaatgacatatctatccaaggatcatcctttccaaaatagaatacatcatcaacttgtctgccattcgtagctataatattgacatttgcatcttctgctacaatcttcaagtcactaagcgatatcgttgtaccctctaccggatcatatctcacatgctggcattttgtcgggaattcatatacctgtttaaagatattaccatccatcggcataacctgagtaaatgtagctctctcattaaagcctgttccatcatcaaagtaaagcttcgacaattcatcgttttcactcttcttaaactgatatgcatcacatacctcttttgccccaccaatcatctttactttgccatgatcaagccaaacaactgtatcacacatctcccgtatctgagatatcatatgtgatacaaatagcactgtagttccgccactcatcaaatcaagcattttattcttacttttttcctgaaagtcagcatctcctacagctaatatttcatccacaatcagtatttccggattcacaatagtcgccaccgaaaaagccagtctcataagcattccggaggaatagtttctaattggctgctctataaactctccaagctcagagaattcaaggatttcatcaaacttttcatccaggaactcttttgaatatcccagtattgaaccattaagatatatattttctctgccactaagatccatatcaaagccacttccgagctctagcattggaacaatattaccatgtgttacgacagttccctctgtaggcttcataatccctgagattaccttcaatattgtactttttccggctccgttgtgacctactattcccacaacctcaccttttttcacattgaagctcacatctttaagtgcccagaattcctcatatttgagttttcccttcactttctggatcataaactctttcaggctattcaatttatcatttgccattcgaaagcatatagacacatcttttacttctatcatgttcataggtcatactccttaatgattacagattgaaaataaacttgtcctcattctttttaaagaaccagaaaccaagtataaatggtacaactgatagcagaatacaatataaataatgctgtggtgacggtgataccccatctatgagaatgcttctcacaaagtatataaactgatacatcggattacaatgaaaagcttttaataatataggtgaagtaataatattttctgtatagaaaataggtgtcgcatagagccacactgtgctcagtacattccatataaactgcgtatccttaaaaaacaccattgacgtactaaggaaatagctcattcccagactaaatatcatcatgcatatgataggaaatggcaataatataaatgccggtctaggccataatcctgtaacaaatgtcactatgagcaaagggataagtgaaaatccaaggtttactaatgatgacattgcccttgacagaggatatatatatttaggtacatatacctttgttataagtgaagagtttgatgttatagctgaaattcccatagcacaacattcattaaagaagttaaacataacaattccactaagcagatatacagggtaattcgccactcccgaactaaatatagtagaaaataccacatactgaacaagcatcattaagagtggattcaaaaagctccaacacacaccaagcacagaacgcttatatttagtcttaaaatctctctttaccaactgacttatcaggaacttgtaatgtgaaacagaatctaagaatgcaataaccactgtttgtttacctgatttccatttatttaatgatacaacaaaataaacaataagaagaattcctattgctcccattattatccaataatagttgccaaaccatattgtgttcattccatctatagagaggcataactccccctcaagaccctcgttatttacatacacgcgagtgctatcatcatatgatttggatatctctccttttgccatcttgatagaatttccatagtaaaaagagatttgactgtcatcatccaatgatttgcaaatcaattctaatgtgtagctttcattattatccaccttgattttttcaggcaattctatatcatatggctgattatcacttagctctgacatatccacatcaatatcagcgatattttttccggttgcatctgtaatcttcgcttcaagcgttccatttgcagttttaccataggtggctggggtaactgtcaccccttcaagatactgactatcaaccgtaaaggtctgcttaatcgtatctccctcagtaaactctcccactacctgagactgtgagacagtgtcactctgagtttcctggtagtgaaactgcttacttgacactaaatatactaaacatatagaagcaaaataaaccaacaatgttattccaaatactttttttataaatttttcttccataacaattaaattctttcctaatctaaaataatatttgtcactaaatgcctaagaattatactctctactgatacttttgtcaaatcatccccacacagcctgtcccagccgtctcatagtcccggtcttatacatatcattttccttataaaaccgttgtcttacgcgtctggatttaccttccagtgccgcataccttactgccagactgtcagttggcagattatatgtctttgcaaattctctcgcctgaagccgtcccagcctcatgctctcctgtatctgttttttctgccagacacggcgtacaatatatgagagcttatttatcccaagtgccccaagactgttgtctccatgctgtctgtacagtatcgtcggctcatctataaatgctgttttaccaaactgtgcagctacaagtgctgcccaccagtcatgcattatagtgttgtctatatttgtgatgcgaagcatcttatctcttaaggccctgtttaccatcattgtacagcctgtcacagaattctgcaatataaactggttgattgtacgcttgtgacagtcaagactctggtattcgctcatcgtgtccgctattgtattcagctcgctatctaccacgcgaagctccgtgtataccaggcacggaatatctgctttgtcctcaatagccagtatcttatcatatgtcagctctatcttcttttccaaccatacatcgtcctgatcacaggtcatatagtatggcgcttccacctgatcaaacatatagaaaaagttgtactttgcaccgccggttgatttaccatctatcagatgtatcttatcctggtatttttccacatagctttctacagcagctatcgtgttgtctgtagagccatcatcgtgtatatatagctcccagtccttgcaggtctgcgacaggatagagtctatctgctgacatatatatttttctccattgtatgtagccatgagaatggctatcttgtctgtgctatgcattcttcctcttccactttcttccggccctgttgcccagaaactttgccgcactgtcaaatatgcagtgcactgctgccccaatcttgaactgctttaagagctttttttctatgaaaagtaccatcctgataccctcacctgtggtaccgtcacactttatctcatccttataggtctccataaagaccgctacatcaaagttgcgcttgtactgctgcttaaatgtatagttgtgtgagtgatacacctgcgctgtggcacaatagcctatcttgtatcctgccttaagtgccctggctgccatcagcatatcctcatttgtgagcagtgggctttcaaagccgcctatgtcttcaaagaaatcacgtctgtaggctgagcatacatctgagaagaaatatgcctttattccaagtcttggtatatcctctttgcttctgacaaagctttcagcaggataattaaactccctgactaatgcctcatccggctttgcatcctttcttgggagctgtctggctgatatcatgacgacatcttcgttttcaaagcctgccagcatattctccacatagtgttcatctgaaggcagtgcatcctgcgacaaaaacatcactacgtcgccctttgacatggctacagcatagtttctcgtgccaccatggtcaaattcgcttctcttgacctttagtgtcctaaagcctgcctgctctgccattcgcactgtggcatcctcggattctgaatctatcactattatctcatcaggcttacggctctgtctgcccagtatatctatcagacctggcatatactctgcagcgttgagagtaggtattatgaggcttatttttatactatttaaatccaatttcttcatcatatttctcacatatgttctgattattgtgctccatcctccctgattacagagaaaacggttctgaaaagtatctttatatccagccaaagcgaacagtgctccacatagtacatctccatcctctggcgctctccgctctcataggtggcattgtttctggcatatgcctgccagtaacctgtcagccccggctttacgctcagaagctttgcgatgtccttgccgtatatctcggtttccttctccacgattggacgcggtcccactattgagagctcacccttaagtatgttgattagctgtggcagctcatcaaggctggtctttcgcagaaagcctcctatttttgtgattcgaggatcattgtctatcttaaattcctttacatactgctccagctgttcaggtgtcagtatcttttccagatcacctgcattcgtcttcatgctcctgaacttgtatacagatattttctttcccttatagccgactcgtgtgtgcccatagaacacgctgccgccatcactcattctgattatcacagcgagtatgataaacaccggtgacagcactataagtccaagcagtgaggcaacaatatccaccagacgctttataaatctgtataccggctttccgctgtcttcagtggccggatatgcctgtatgtcatagcttaaaggctctctatccttcactagctcgctcaagcatctcatctcatcaaccagctgtgccggcatgacaagctctctctttgacactgacctgcacagaggacatactgccctgaaaataatcctcagatcaaggcccaccgtccagttcagtatatattcctggtcgtactcgctttgctcctcctcggtaagcagcctgtgttccctgctgtatacctgccagaagcctatgattccgggctttaccgatagactttttctgtgaaatgcagagtattctataaactctggcagtgatggagcaggatttcccaccatgctcatatctccccacagcacattccaggctgatggcagattttcaagccttaatgccctaagcattcttccaaccggtgtaaatctcgggtctttttccttctttccatccagtatccatttgtcatatctatccctcgcatccatgtacatggcgcggaatttatagtaataaaatcttcgtccgtttttgccgactctgacaagcgatatgagcaccggtccatggtcgcctgtgactattttgcctataaatgcaacaagccacacaggcactataagtatgcttccggccacaccaaacagcagatctatcagctttttaataagtagatgccttacgcggtatgtcttattcttccatgtgaccactgcgtattttccaaggaaatccatatagtgctcaccgaccttggcctcatactcattgacattcaggtgcactgtcttgcccatttcattgagcactgtaacaaactctctctgcttaaacggatagttgtccggcagatgtacaaacactgagtctatctctgctgttgatatcacctgaagcaggttatcggcagttgcgacgacctctatcttgtctactatctcaccgaccatatcacaatccagaattgcaatattcgatatacgaaaatcccagtttcttgtggtctttatcttttttatcactcgctccacctggtctgaggtggtgacaagcataattttctcattggcccctgagcggtgatattcctttgtcaccagtcttttcagcagctgtctgactatcacagtgaatatggtactcagtatgaaggtcatacccatctgccctctggagaaatattcacttgtttttgtgaaatatacacagccgactgtgattgcacccacatatacatacattttcaggacattgtatatttcaggaaatagctttcggtttatcagattatcatctgcaaatgccacgaaatgtactaccacatatgccacgagctccaccagaaaaagtgtaagatagtgctctgtatggtttataagtcccgttctaaagaaaccgaacttgtaccagtttgcaatcagataagatgtaaacatcacaattatatcaagaagtacctcaaggtactggattatccatttttttgagttcatatctttctcccggatttttccttatcagcagtatctataccggcaagcagtacaagcaggaaaggattatatgcaatctccagcagatggtgttccataaaggagtgcactccaaccatgactattgctgcaaaaagcacatattgctttgtcgctattgccttgtgaccaataaatattaataatatcagcactacagcaaacactattattccatactcaaacagcatcctaatatacatatcatctataaagaaatactttgcagggtctatcccggtcgggtctgcaacacctccccagccctgttcctctataaactgtccaaatggcttgatgctatactcactccacactttgtggctcaccatcagcctttgagacagtacagagtctattttaaccattatagcattgctctcactataaaaatagctgagtgcaagaaaaagactcgtccacactatcggcaggtatttaaatatctcacacaccctgcgcgccagatttttcctctcaagcagataaatcagacccatcaaaaccaagaatcctgtcaggcagactgttcctgtaaatgctcctgcttttatatatataaatacagctgctgctatcactataagccatctgagccatgccagatatctgtatttttcgttttcctgtactctcttccatataccaaggcagctcaccgccaatatcagataaaatatatgtgccgcaaagtccgtcggatatatgatgccgtatgaatgtctggctgctgctgcatttctaggtgaataacctatcacatccgctatcacacctgtctgactggctatagctgccactataagcatgaccgataccaccgccgtatatacctttagtatattgtcaaaactcacattttttgcccctacaataagtagtaccggctgcagcagttcataataaccggtttgtaagcctactattccaaatataagaacaactacggcaattgcaagctgctcttttctgctgtaatatccggaaaaaaggaccttggctcctgtatacaaaaccatcgctgcaagaaaaagcttaaaggttcctaccagcacctgctgcgagaacatagtagtctcgtatacacattttgccagcacaataccatataatataaagtatcctacatcccatctgttaattttctgtgttgaaatcgatttatttttgtccataaatgatattttaccatatttgatatataattgccacatttcaaaaaattataacaaaaatttaataaaagctacagtttatgcgtctccgctcaactgtagcctttaaaatcgacctatttaattacttcaggtcatcatctgtaattgtttcaccattcataaccttctgtatcaactgtttagcatgctctacgctgctctcatccggaatagtaacataaactttctgaataggcatagaatatgttgttttcttggtaccctgaccagttactgcaaatgacttaatattccagcttcctccctctgacagctgcatattgataagagatgaaatatctgagcttttaaaatccatggaaatcattccctcaagactgtcaagaataccggagtagttggtcaataatgccgtactgtttgtcatcttatctattactgctgaaataagatccatctgatggcgtcccctgccattatctccgtccggaagattatgcctctcacgggcatatgccaatgcttcctctccgtttaattcatttggaccctttgaaaacttgtaagaatccatagatgaactaaatgcctgttcagaattcacagtaactccacctatttggtctataagagtctcaaaacctgtgaaattaatctgagcatagtagttgattgtatccagatcatatactgaagccaatgtcttcattgaacaatctataccatacaatccacaatgtgtcagtttatcctttgtcccatgagataccgacgtttcaacatagtaatctctaggtgtatttaacaataacacctgtctactctcaggattgacaaaagccagaatatttacatcgcttcggctctttgcaagcttcttgcttctggtatctgatccactgatatatacaacgaacggctcctttgtcacctgaacatccttttctgtcttctcaacctcatatgtcttagtataagcatacaatacctttgtctttgtttcaaaatcttcatacccctctgtatctgtgataacagatacatatgaggtattgagtatcatcgcctttacctcacccgaataaagggcatccaccatctctattgcagacgcatatggctttgtattgattgtactgtctgtttttttattaatatcatctattgtttcctttgtctcttcatatccatatgaatcagtatatgcaaaggtataatccttggcatcatcaatagtctcagcgggatcatccttcataacatagacaacaatcttatcctccatgacatttttatttccggtcatatcattaagtgtgcccatcaccttgctaagcacagacgtgccatataagctacatatgataaccagtatagatataaatgttcccaatcctcgcttaaaatagcccgacgcttttggtttcattatgttttgtcctaagtgaacaagtgcaaacaccaggaactccataattaataaacccccggctgcaaacataatatactttgcaggtaacatttttgtttttacagccatagcaaatatcatagcactagcaataagctgtaaaaccaataatacccttgcaaatattatccattttgtagcctttttctttttcttcatttgtttctccttctatctataaatacatagtacttatctattttaacaaatgattttgatttttcaatattttaacaatgattataacaaaattaataattttttttaaaatttaaatgtgttttccagtgtctcccacttctgatccttatcactcaagttgattggtgtgccatcctcaagtgtgtatccgcttccgtcagcgcttcccggatactctccgacaagctgtggccactcgatgccgattgcaggatcattccatgcaaggccgctctcatctccaaggtgccagaaatctgttaccttgtagcagaactctgctacatctgagagtactaaaaatccgtgtgcaaagccctccggaataaggaactgcttcttgttctcctctgtgagctctactccgaaccacttgccgtatgtctttgaatcgcttcttaagtctacagccacatcaaatactgagccttttactgcacgcacaagctttgcctgtgggtattccttctggaaatggagtccgcggagcactccctttgtggagcatgactgattatcctgtacgaacactctgtcaatgccagcttcctgcatatcctttgaattgtatgtctccataaagtatccacggttgtctccatgcactgtaggctcgatgatgcaaagtccttcgattccacctacgtttttctgtactttaatctgtcccatgatttctatgtcctttcttgtattacgtgaacatcccaacatctaactcaacctcgctacttcgtagcttctttgctcactaaaattctatctcctgcagatatctgtgcagcgcatcctgccatgtagggagtggcttaaatccattctccacgagcttgctcttgtccagtctgctgttaaacggacgtgctgcctttgacacaccgtactctgctgttgtaacaggtgctactgtaagtctgtcctcagaatactctgtatgaccaagctccactgcctgcttaaagatttcctttgtaaaatcataccagcttatatatccaccctcgtttgtagcgtgatagtaaccgtatttatcagtctctatcatatctacgagcaatcttgaaaggtcgagtgtatatgtcggtgtaccaatctgatcacttactactgtaagcttatcgtgtgtcttgccgacatttagcattgtcttgatgaagttcttgccgtttacaccaaatacccatgctatacgcactataaagtacttctcaagtgtatttgccactgcaagctctccgtcaagctttgtctgtccatatacattgagtggtgcatagtccttgcagtcaggctgccatggtgtggtgccctgtccgtcaaatacataatctgtgctgatatataccatcttggcatctatcttcttgcaggcatccgcgatattctgtgtgccgtctgcgttgattgcatgcacctttgcttttttatcatcatcctcggccagatctactgctgtccatgctgcacagtgtactaccacgtcaggcttaagctctgtgattgttttttccactgcatcacggtctgtgatgtcgagtgagacatatggcatctttgtaactgctgtgccatcatctgctccgctgtactgtggtgctatatctgttccgattccttcgtaaccgcgtgctgcaaggtcgttcattacgtcgtgtccgagctgacctgcaactcctgtaacaaatactttcatttttggtctcctttatacaaatattcgtaaacaggcccaacatatatgcgcaatcccgcatgctttggcatgctttcccgctgcttacgcagctaagattgcttatatacgttgttcctgctctattctagagcctcaaagaatcaaaatgcgcttatgtaagcgagcttacaacacgcatttcgattcttcaaggtttacgaatagcagttatctattcgcgtacatcttctcgtaatagttctggtactctccactgatgattgtctcccaccactcacggttatcaaggtaccatttgattgtcttcttgatgccgtcctcaaacttggtctctgggagccatccgagctcgttgtggatctttgtagggtcgattgcgtaacgcatatcatgtcccttacgatctcctacgaatgtgataaggctctcaggcttgttgagctccttgcagataatttttacgatttcaaggtttgtcttctcattgtggccacctacattgtaaacctctcctacacgtccgttgtggatgataaggtcgattgccttgcagtgatcctctacataaagccagtcacgtacgttctcgcctgttccgtataccgggagtggcttgtcattaagcgcatttgcaatcataagtgggataagcttctccgggaaatggtatggtccgtagttgtttgagcaacggctgattgttacaggaagtccatatgtgcggtggtaagcaagcacgagtaagtctgctgctgcctttgatgatgaatatgggcttgatgtatggattggtgtatcctcatggaagaaaaggtcagggcggtcaagtggcagatctccgtatacctcatctgttgatacctggtgatatcttttaataccatacttgcggcatgcgtccataagcactgatgttccgatgatatttgtatcaaggaatacctgtgggttctcgattgaacggtcaacgtgtgactctgctgcgaagtttacaaccatatcaggatgctcttcctcaaataatttgtatacagcgtcacggtctgtgatgctctcctttacgaaacggaagtttggattgtccattacaggctcaagtgttgagagatttcctgcatatgtgagacagtctaagcatacgatacggtaatccggatatttgttaagcatgtgaaatacgaagttgcttccgataaatcctgctccacctgttactataattgtcattttgatttcctccttaatataactgctcgcggtattttccatcaagtacgtcctttaagtactgtccgtactgattcttctttactagctcatatgtctttaatacttcatcctttgtaatccagccgtttaagtaagcgatttcctcaagacatgctatcttacggtgctgatgtgtctcaactgtcttgacaaagtttgtagcatctacaaggctctcatgtgttcctgtgtcaagccatgtgaagccctgtcccaaaagctctacattgagggcttttttctcaagatagattctgtttaagtctgttatctcaagctctcctctggctgatggcttaaggttctttgcatactctactacattgttatcgtagaagtaaagacctgtgacacagtaattgctctttggatgctcaggtttttcctcgattgaaatagcctttccttccttatcaaactctacaataccgaatctctcagggtcatctacatagtagccgaatactgtggcgcccttaccgctcttggcattttcaactgcggccttgagtctcttgttgagtccgtgtcctgcgaagatgttgtctccgagaaccatggctactgtgtcatccccgatgaatttctcaccgataacgaatgcctgtgcaagtccgtccgggcttggctgtacctcgtaggtgaggttgacaccaaactgatgtccgtctcctaagagctccttaaatcttggtgtatcctgtggtgttgaaatgatcaggatatctctgatgccggcattcataagcactgacataggatagtagatcattggcttgtcataaattggaagtaactgctttgatgttaccattgtgagtgggtaaagacgtgtgcctgaacctcccgctaatataatacctttcatgttgttctccttcaaactgaaactacgtgctgcatttgatgctttcggtctgtagaatccactgacctgattcatcatttacctgcattataaaaggtgccccaagggcaccttcaagtacttttttatatttttagcatttttcacaaaatatatgcttataatatcctgtttttaaatcattttcgtgcaataaatacacctgcatcctttgtgatatggaaccctccctctgtcttctttctgacaaatgccgcaaattccttatagcggtccacaatatacctgttctggttgccgtggcacgaaagcacatactctatcacaggctctgctttttctaccacaagctcatcctcgtacccatgccagcttacatcaccaaagtattttccaagtattgcctcaccattttctttaccgaattgctcatacagcctttccgctgacagctctatgcggtcatcaaactcctgtaccaggtcgtttatttccttcatatgccgtgagctgtatgtactgcacacaaacacgccaccgggctttagcaccctttggatttcactgcacacggcatccagattgtcacaatagaacagtacatggtctgctatcacgcagtcatacgatgcatccggcttatacagcctgtgggcatccatcacctcatatgtgaagcgcttgtcgtctgcacctacatttctcgtcgcatcccttaccatgccatacgatatatcagtcagggttatctgcatatctgccggtatcctgtctatgttctgtgtccagagagaggcatcaccacagcccacctcaagcaccttttccccctcaaaaaagctgcactcatcaaatacccagctaaaccagctcaccggattcatcgagaaatccctgtgcagattgattctggctgatatatttgaagcatccctgtactgctgctttagcttttgctccatctcgtttatattaaccagctccagcatatgactccagtccacacttcgcccctcgtctatcacctctgaagcctcctgcagtgctgatttcataagcttcatctgctctatcctctcctccacgagaccaagctgcatgtgaagcgactcagacatgacattgctgtccgtgtttctgagtgtcatctccttgatatcatccagggaaaatcccagatatttgaggaacagtatctgctgtagacgcgcaaagtcgtcatcattatagaatctggctccgttttcgtttacgtaggatggttttaaaatattgtgctcgtcatagtacctgatggtcttttttgtaatatgcgctttttttgcaaattctcctgaggagtagtagccgggtagtttcatcgttgcgttgcctttcctcttattttcttacttttgaacttcctatatctaagtatatcataattttctaatacaggatttattaatatttacttattttcattgtttctgcttgtttttccggaaaatgtacttataattataatatcactatgcaacaaggagaaaacaatgaaatacgattatatagtagtaggttccggtctctacggagccatcttcgcccacgaggcaaaggccaagggcaaatcagtgcttgttgtagacaagcgtcctaacatagcaggaaatgtctacacagagaagcaggagggcatcaatgtacacatgtacggagcccacatattccacaccaatgacaagagggtctggaactacatcacacagtttgctgagttcaaccgcttcacaaacagccctgtagccaactacaagggggagctgtactcaatgcctttcaatatgtacaccttcaacaagatgtggggtgtggtgacaccagaggaggctgctgcaaagattgaggagcagaaaaaggaaataaccggtgagcctaaaaatctcgaggagcaggctatttcactcgttggacgtgatatctatgagaagctcgtgaagggctacactgagaagcagtggggtcgtgattgtaaggagcttccggctttcatcataaagcgtcttcctgttagacttacctttgacaacaattacttcaatgctctttatcagggtattccaatcggtggatacaccaagatggttgagaatctgctcgacggcattgaggtcagactaaataccgactaccttgagcacaaggctgagcttgatgctcttgctgacaaggttgtatacacaggtccgattgacgcatactttggctttaagctaggtactttggagtaccgctcagtgcgctttgagaatgagaccctcgatattcctaacttccagggaaatgccgctgtcaactatacagaccgcgagactccatggacacgtatcatcgagcacaagtggttcgagttcggtaaggatgaggatggaaatgatctgccaaagactattatcagccgtgagtactcttctgagtggaaggcaggcgatgagccttactaccctgtaaacgatgagaaaaacggacagctctacgccaggtataaggagcttgccgataaggagaccggtgttatattcggtggtcgtctcggcgagtacaagtactacgatatggatactaccattgcttctgtacttgatatgtgtgagaaggagcttggctaatagtcaggcttcccacaaaatgctttgttcatgtcatattcaaaagcgccatggcaatttaccatggcgcttttatttacaatttttttccggccagatttatctcagccgcaggaatatgctccctcaggcactcatatccatattccttcgaatatgcatatatagccggaagctgtcttgaaagaaatagcgccggtgcttctgtcacagagtatgcgccacagtgcccgaactcaagaacatcaccaagttcaagcttcttaagcttcacctcgcgtaccagcacatctgccactgtacagaggcttccgcagagtgtatagtctgtgtccggcagttctgtgaattccacaccggcagctctatatatactaatcggcggcacctgcatagccattctctgtccaaagtaattcagatggtggattcctccatcaagaatcgcataattggcatcgcctgtcgatttaaggtcctttacctgtgtgtaatatttaccgcatgaggctgcaaggaaacgtcccatctcaatgccaagcggatattccacagcaaattctctaagcacctctgctgcctcatcaagtgcttgtttttccctttcctgccagtcttcctcaaaatactccacacaaagtcccgggccatactctacaagctgtggctcaaaaccgtatttttcttttaatccggtaagtgcagactttattttttgcaagtccttatttattttgcgcaagctcttctgtgtgccggaataatagtggatgcctattaccatgatgcccttaaactcatccggatgcgaaatgatatattcaatatcctcaagcgacatgccaaactggttgccgcttgtcaggcgcagtatgacctgtgccttcttttcgaccaatccagcttcatgcgcaccttccggcatacgttcaagcatcacttctgatatcagcgctgcatgtcttatgctctcacaggtgagtataccggcgccatatgaaactgctcgctctatatcgcatttttccttcatcacacctgaatagatgatgctctccggcttcacgcccagtgctatacatatctcaagctctcctgggctgcacacctccacatgatctaagccctccggcagcctgtgaagcagaaacggatttgcctttatcgaaaagcaaagcggtatcctacgtcctcctttacaatcaagagcagcccttatcatggctgctctttttgcaaactcatccgtatcaaatacatagtacggtgtctgtctcatatgctttattcctccacaagctctttaacaagcttctcgattgcatctactgagttgaaattctcaggaaccagatcctttggtctgattgtgatgtcaaactcatcagtcaactccgacacgagtgaaactatatcaaatgactcaagaattttgtcatcgatgagctttgtctccttctcaaaatccacatccggtcttaattcctctaaaatctctaaaattgtgtctctcattttacatttcctccagttttttcatatcatattttccgtttggaagcttaggaagctgctccagcttcttgattttccttggcaccataaagcccgggagctcgtccctcagtgccagcgcgaggcttctcctgtcacagtcacctgtgtagaaaagtatcagcacctcttttgctttattatatataacacagctttctgcgactccctcgaccacattggcggcatgctccacctcgtcaagctccacacggtgtcccatgtgctttatctggcggtccatacgtccacagaaatgaagtatgccatcctcattgagccttccgtaatcccctgtgcgatacatccgctcaggataagccttattgagtggattgagtgtaaatgccgcagctgtcctctccggatcattataataacccagcgccaagattggtccacatacacatatctcgccctgttctccaacagccggctcatttccatgctcatctatcaggaaaaccctgtaattgtcataggcttttcctataggaagcacctcgtcatcttccactgtatgatccacgctatagtatgtgcatgatgctgtggcctctgtcggcccatactggttcacaaaatgcgcttccggcagattttcctgccatttcctgagcaccctgcacggcatcactgagcctgagaagcagatttttctaagactcttaagccctacttcctcaaatgctccaagcgatgtgaggatggtaaatgccgaaacactccagcctacactgctgactttcttatcattcatgtaatcaaacagggcatttggctccataaaatactcttttggaataatcgctgtgctgcagccggtctttagcggcagataaatgtccctgattgccgcaatatagtcaagcggcgactgattgcccagcacatcactttcctctatatgcattacatcacagtaagcattgatgtatgtcataagtgacagatgcgatgtcatgactccctttggattgccggtggagcctgacgtgtagatgatatacagtgggtctgtcatggacatctgcctgcggactgcagcgagcatatccagtgagctgtcatctgtttttcctgcacagcctgccacaacaccaccatctgtatcgttctcactatccgtcacatcgtctcctgctgattcactgattttacaattactatcagcgcacgccacctgctcaaagcgcgatatatcctcagcaataaatatctgcggtctatcgaagccttctgcctttgccagctcatccactatgctctccacatgctcaaggctttccctgtctgccacaatagcccttggacacagattttcaagtattttttcaattctcttgtcaggaagcgatgcatcaatcggcgcatacggtctgcctgcatatgccactcccaggaagtatgccggtgtcaccattttccttccggcaaatactgcaacaggggttctgtccactccaagctgttctatcagatatgctcctgtatttcttgctatatcatatacctgcgcaaacgtaatactacattcagtatccgaaaatgcaggcttgtcaggggattttgccactgtggcctcaagccactccagtacgtttttcatcttagtcctctttcatgcattaataaacgttgccgaaaaaattatagcacataacatccgaaaaaaatgtcatgtgctatcgaattaataattcttaagaaagccttaatttttttctgtaggtttttctatatttgattctcctattaaatatatcggtctgtcctttgcctcgagataaagctttgacagatacagtccaagtatccctatgctaagaagctgtataccaccgataaaaagaatgatgaccaccgttgatgcccagcctgctaccggatcaccaaatacaagtctccttattatgataaaaagcatagctgctatcgccacaataaagctgaacactcctgctattgatgcgatgtatagcggagcatttgaaaatgctactattccatctaaactatagagaaacagctgccaaaatgaccactttgtctcgcctgccaccctgtttacattctcaaattcaagccacttcaccttaaagcctacccagccaaacagtccctttgaaaacctgttgtattccttaagcgaaagcagtgcatccacgtatttcctgttcatcagcctgtagtcacgtgccccatcaaccatatttgcctttgaaatcttactcatcagcctataaaactttctggcaaaaaaagatctgatcgctggttcacctttgcgtgtcacccgccttgtaccgacagcatcatagccctcttttgtaaggacctgatacatcttcggaagcatttccgggggatcctgaaggtctgcatccattattgccacatattcacccaccgcatgctgcaagcctgcatacatggctgcctccttgccaaaattacgcgaaaatgatatgtatttcacaccggaatcatttgtggcaagctcctttgcaacatcaagcgtaccatccatggagccgtcatccactataatcagctcatatgacaatcccgatgtctcactcgcttgactcatctgattcagtacccaggttattttattataaaaaagaggcagagcctctttctcgttaaagcatggcaccacaatgcttatcttatttttttccatataagccaccctgcatataacatcaaataaataaaaaatccgattgctgctcctgccgtatttgtcacaaaatcatccagctggcaatatcctctgccggtaaccatctgcgtgtactcaattgctgcgcttataagagcaccaacaggtattgtaaaccatctcatccaatttttaaaaaccagtggaaataaaagcccaaatggtataaacaatactatattttctataaaataagcgtgcatctgaagtgtcatgccccatgtgctccacagcaccatatcggcgacgccggttctgcttcccggctcccttgaataatacactatcattataagcgtatacatataagccacaaatgtgccgcagaacagcatatgccagattttgcccactatcttttttcttctctcatctgcctgtgatacctctctcattgtgaaaagatatcgcagcagacacacaaaaatatacatcgcaatgcagattaaagccaaatataccgctgacggaagatatttgaacttttcctgtatgtctcttattatataatcctttaaactcaatgtccttttttatgctccttgtaggcacgaatgaactccagctgtcgttcatcgtcctttttctgttcgtcatcagacatatgactcactttaataattatacacaatattatgccaattacaataataccggcacataatataaaaataattaagatttcaggcatagactatttcctccggcagaatttaattactattctctctacagattaaattatatccacttaatttatcttaattcactcatttatgaaccctgataacagcaaaagctgcatgatattctcacacagcttttgtatattacgtgtattatctttggcattaacctttattttaattttgcaacaaccatatccacatatttctgacagatttcctcgctctctgcctcaaccatgacacggataacaggctctgtacccgactcacgcacaagtatacgtcctgtatcgccaagctctgcagtaacctggtcgacagccgcctgaacctcaggatttgcaagtgcctcggccttgtcagccacacgcacattctgaagtacctgtgggtagatactaagcccctcacagagctggctcatcttctgttttctcgccatcatgacctccatcatcttaaggctggtaaggataccatcacctgttgatgcatacttggagaagatgatatgtcccgactgctctccgccgatgcggcagccgttctgctgcatgtactcgtatacatatttatcacctactgcagtctttgcgtagccgattccaagctcatcaagggccttatagagtccaaagtttgacataacagttgtgacaacagtattgttatcaagctttcctctctctttcatgtactttccatatatgtagaggatatggtctcctgtgattacattgcccagttcgtctacacagagacatctgtctgcatctccatcgtatgcgaagcctacatcaagaccattgtccaccacgtacttctgtaagccctcgatatgtgtagagcctgcattattgttgatgtttagaccgtttggctcattgttgatgacatagcactttgctccaagtgcctcaaaaatagactttgccatgttccatgagcttccgttggcacagtcaagacctaccttcatgcccttgaatgagtagacaccaagcgatatgaggtatcccatgtaacggttacggcctgctacatagtcaactgtacatccgatagcatccttatgtgcataaggcaattccttccactcctgaccaaacaggcgcagcttgccgtctatatagtcctcgacaaggagaattgtctcctcatccatcttctctccattgctgttgataagcttgattccattgtcatagtatggattatggcttgccgaaatcatgataccacagtcaaaatcatcggttcttgctacatatgccactgatggagttgtggtaacgtgtaatagatatgcatctgctcccgatgctgtaagtcctgatacaagggagtactcaaacatgtagcttgaacgtcttgtatcctttcctattactatcttcgccggctcgtcgagctgcttctgcttcttaagctctccataataccagcccaaaaatctaccaatctgatatgcgtgctctgctgttaaattgacattggcctctccacggaagccgtctgttccaaagtattttcccattgttgtccccttgtgaataaatttttcttatattatacacttaataaatgtgtttgtgtagtaaaataagcttatttgttaaattattcgacttcataaaatcaattgtttataaatatgataaaattaacatatgtatataaatcaaagctacaaagatatcttatgacactccatataatatctcttctcattcgcttctccgattgagaatgtctttctaggaagctccccgcccgcatttattgcagggaacaatgtgctcttgtctatcgactgaagaaagattccacattccttagtctccctaaccagtccgtgaagtgcctcatcaccatggatatagtctatttccacattgtcatgtgtctcaagatacttgtctaaaataccctggagtatctcaaccgggaggcggtcacctctatttgtgatattaattccggaattctttatttcggtagcgcctgattcaacatactcaaatactatctcatcgccctcagtgctcgcaagtccttgttttgtgatttcagcttcgaaaaacgacagcatgtcctttacatcaacatttgtaagcagtctgtgaataggcttaaactcaagcgcctcactgtgcagattacagatttccacaagagcatgccttgcaggatgagttttcaactgctcctctgtgaattttcctgattttttgatattttcccagcatgtcttcgctgttgcaagggaatggtttccatcacctactgcaaataaaaagcctccacagctattctgttttgctgcaaatgcctctgtcacctgccttgctgcctcaccctcgacagcatagccgcggatatgtccgcctccctgcatgagctctgtatcgtaaagcttacgaagagtatccctgatagcatacacatactcgattattccatgctttacagctgctatatttgcagcatcttcctgtgtagcaccctggcatccatcaattttttgtctgtctatatgatcatcaacaagcagcataacatgtggcagctcaatagctgcattctctcttattttcactctcggaggtatacgtgagattactgttccctctgttgctctgatgagagtcttctttttcgggtcgaaatcatagtcatccagatcaataagtcctactattccaagacgcacccctgactccgtagtacgctcaacaagcacatagccatctgccaccgcttgctttagggttccatctgtgagatatgtatccatagtggtattaatatatttgattctctcatcatcagtcattgaagcatattttgttttcctgccggtttctttgtcatttttgacaccagcccctgacgaattgcaatcattctcctgtttcgtaattgttcccagatatatctcaggaaataccacattaagtgttgacggagcatcgcccacatacttttccacagcatcccaataatcagcctgacttgtgaactggtcacaggcgataactgaccatttttccatatctataccatcgtttggcaaaagaatatttgccggattgaaacaatttgacatatcaacaattctcctttaaatatacaaaatatataacaaaaatccgctatactctatagtataacggatttacttttatttgcatatattaaattccttttgttgttagaattcttccaactgcatcatctaatttttctgccggtatctcaccactgttaactgcagacagcactgcattatagctgctctcaaagcctgttgaaacataaatcatgctcattcctgccttaacagctgccacagccgcctcatcctgtgtacataccttattaagagatgcgtctgataaatcatctgtaatcaaaaggccattaaagcccatggtagttctcatatagtttacggcacctgctgatgtagagcatggcgtggtttcctctcctgtcacactctggcaaatcacatttcccatcatgactgccggaacacctgcttcaattgccttctgatatggcacaaaatcagatgcctcaagatcctccagcttatctgtcatccagagcattcctgtcgctgaatctgtagtagcctttccttttccgggaaagctctttgctacagaattgattcctgcatcattatagctgcttacctgtgctgcaacacagtcacctacagtcgctgactcgctgccaaatgcatatgtatcgttatctgcattatcaccatatgctatatccgctgtcggcccaaaattcatattaagaccattggtagccatatatgagcctatctttcctgcactgctgcccgctgcgtcagcatctccaagctgtgatggtgcctgctgtgcctcatatccattagctgaagcaagaggaagtctttctccaccttcttcatcaattgcaaggaacagattcacgcccagtcgctcctgcgaaaatgactgcagactgctcatcatctttgtaactgcggcctctcctgagaagttctcctgtctgaacacaaaaccaccaagaggatatgtaccaatagctgcctttgtcttgttaccggcctgagttaactgtgatacacctgtaatctcctcaggtctcgtaatgaatagctgggctaccttttcctctgttgtcatagaagacagcttcgtcttgacagaatctgacggagtaaatgccggtgctgtatgctgtccatcaacttgtacctgcttagttccatccgtctcctgagtaggattctgtgtctcctgctggctttctgttattttcttattcgacttattccccggcatcacaaaatgcactgctccaaataccagcacaactatcagtgcaattacttctattgtgatgaggtacttatctccattttgtctgaagttcatatttaatccccaaaatttgtgtttgttaaatcgttattaggtccgcttacttttcctgataatgcactgctgtattcgtttacagttgcactaggagtatagcctgtatcaccttcaaggaactgatgcactcctgtagccatgtctgcaagtgtagtcggcacctcaacccatgcaccatcgacctttccaccatagaacacctgtggatacgccgtcgaatcctctactgtatagtctgcaagatttttaaatactgaaagaatctcatcagtattatagttagtgttgacatgtccaatcaggtctgataccatcttaatctttgccgctgtattcatctgcttagctgattcaaaaaccttgaacagcactgttctctgtctttcagcacgcttatagtctcctccagctgtataacgtattctggaatacgcaactgcctgagttccatccagtgtatatgtgccggctgaatcaatatgggatgagcttgttccacgaatcttattgacctcatcaatatatccgtttatcacctttgcctcagatgcatcaatatcctgtacaatgcctcctacctcatctataatttcaccgactgtattgaaattgactgtaacataattctttatgtctaagtccagatttttgttaagtgtatctactgcaagctccggtccgccaaacgcatgtgcatgtgtcaccttctggtatccatgaccatcaatattcatcatacagtctctgaaaatagataccatgcggattttcttagcatcatgatcaaccctgacaatcataatggaatcggaacgtgttcctttatcaagctgatctgagcggctgtcaacaccaaatagtgcaaattcctctatgcctgatttgtctgtaatgttgtcatcctcagtctgagtatcggcttttgtcttaactgcctctgtacccggctttatgtctttggcttctttattcttaacattactgctgttaatctttacaagtattatcgctataatagcaataagtacaatcattactgccgtaataattatatttttcttttttttcatctgcactattctccgtcattcatatatgtctgtgcctgctaattttcgtcatcgtccctgccataataattgccataataattaccataatagtttccatagtaatgaccatacttagactcctcaaacctgcacttattgagcacagctccaagaatcttgacgcctgagtcctcaagtgtacgctttgtattgatgattgcacggctgcttgtagcattctgggcagcaactattactgctccgtctacattcttaccaactacggccgcatcaatcgcagctcctgtaggaggagtatcgacaagcacatagtcaaagttcttctctccaaactcgataagctctttaaactcctctgtctcaagaagctccgtaggatttggtacctcatgtcctgcaaaaagaatgaacacacccttgatgtttgtcgcatatatcactttgtccaaagatacctgacctgagagataatgtgagagtccgtatatctttccaccgctctccagcttcgctctgattcgtcctacaaggactgacttacgcatatcggtatctactacaaggactgacttcttagagtccgccatcgaacgagccagatccataactacggttgtctttccctcattaggcaagctgctggtaaaaaggatagacttcacaccttttccactaaagctgatgcttgttttaagagctcgaagagactccttcattgtatagctctggtcttttatctgattaataactactgtttccattaaactgccctcttcttactcttgctatcgtctgatttagatgattgagttttcttcttttttcttctctttgtcttggctccatcatactctgcctcatcaacaggaagtgatgcaagcaccttgaggcctgttctggtctccatatcatctgcattggaaattgtatcgtcaagcatgtatccaagtacaactatgccggcagcaagaaacagtccgagtacagcaccgataactgtattcttaaggatattattattcaccggtgtctttgaagcatatgctttctgtataatctttggctgtgactgatccatattgtcagcgatatactgtgatgaaacttttgcaatctcatctgccactgtttttgaagcttccaaatcagtgtctgtaaccacaatcttgagcacacgtgtatctgtcggattctctattgaaaccctcctgctaagctgctcgtatgtctcgtccatatccagattgtcaattacctgcgataaaactgtcctgcctgtgataacgtactcatagtcgtttgtcagactcgagcctacctgaatatcagcaagactggtgatagatgttgacttgctcagtacatacatctctgcagatgcctcatactccggtacaaaagtaatcttggagtataatccaaatactgctgcaagaagcaccattgatgccacaagtgccttccagtgcttcactaattcgtgaaacagcgctactaaatcgatttcaatttcctgatctcttattggttcgttgttttccattttcctaccctttacatattgtaacattatttttcggtttaatcctatgctatattactacacttcatttcttttgtctatttttagaagtcacaaaaaaagtattaagaatatgtcatattttgtaaataattatgccatataatagaaaagtgccgtttccggcacttttctttattgtattttcatttgctatattttatttgttcctgttctattgttgctgttctagttctgctgtggctgttctgatggttcagtcggtgccaccggctgtggctgtggttttggatttactgttacggttattgaactgcttgcgctattccagcctgccatttcacctgctatagctgtaatctgtacgctaccagccctgtggatagtcacatttccggcagcatccaccgttgcaatcgatgtatcacttgactggtaataaagccctgctccgtttgaagcacttgctcccagagaaaatggtgcatctccctctgttacagttttattaccgcaacctattgtcacagatggtgtctggtttggctgtggctttgcatttacagtgattgtaatcgtcttgctgccggccttatagcttgtagtagcctcagacttgacagtgatttttgcagttccgacacctgctatcgtcacattacctttctcatccactctcactacaccctcattatcacttgagtatgtgagctttgcattatcctctgctgtcacaccgagattgaatgctccgtcgccctctgtcacattataagagccagctccgccaaaactctgcgctttgccggccaccttgtcaacaccaccatatacaattactttttcatctaatgtcacattctcatatagcttcttcgcagctgaataaggcatatttatgcagccatggctgccgctgtacatgtagatatttccaccgaaggtacttctccacgaagcatcatggaatccaattccaccattgaatggtataaagaaattaacccatgacttatatccgtctccccttaagtatctgtccttatctcttgagaagatagaatacactccggtaggtgttccatgaccttttgaaatacatcctgtaacacactgacttgatacaacaagctctccattcttgtatacatataccatctggttggtaagatccacttcacagtaattgccaccatatgtgacatattcacctgtttcttcttcctttgcctcactgtaaactgcttccactgttgcagactttttattgtttattgcctcagcaatcgcctcatacagcttgtttccatctacagtctgtcctgatgatgctacaggcacatttattatacttccgcctgttgtcttaaactgtcctgttttcttctttgacacatcatgctttttggctagctctgtacaatatgtagccatattctcgccatcaagcgaaactgacaatccgtcattgtccactataagccactgggctatctgatcctttcctacagcctctgtagcagcttcacctgttgccggtgtgaaattacatgtcaccgtcacatcaagatatgcattggcttcttttaatgccttctttacctgctcgctgtccgcagccttttctccatcaacatatcctgttgcagatgtaagctctaccttatccttcagctcctttacagcgcttgtcagatttgtagctgcattgtcatatacaggtgcatctcccgatacaccgtcaacaccctcaaattgtcctgcatctgcattgtaggctattgtagcacgatatggcacaattgatcttatatcaaaggtctgtgtgtctgtcgcagccttcttttgttcgtcatcatttgcatctgtatccgtatcactctgagccgcagcatcagactgtgactgcgtttttgcagtgatataagagtctacaagagccgtctccagctcatcagacttgtccattttaaaaagcttcacctgcttttccggttccttatccttattggccgcatttatcagttcctgaagatctgctttgtcattgtacttgagtcccaaatcctcagctgtcatatcaaatgatgcatcgtcaagcttcactgatatcttatacttgcctacagcggtctttatggctttctttgcctcgtcagcagtcattccacctacatcaactgatgcaagcttgtacttttcagggaatgtcttgtatgctttctttccacagcttgccatgcccaatgccataagcacacaggccaaaactaccaggagttttatacttttcttcttcatctttgtcctctttatcttaattttatattattctcacagcaccatattttatcactttcttatatatgcctcaagtgagatttgtcacatattttccgattatttaaacatattattcatcattatgataacaaaaagcttcctaatgacgcacaatatgtaacaggcgtataaaatagttctgataaaccttatcgctcatatgcattttattcaacatacaaaatactttataattcttatttacacatttatacatatctgtattctttttttcgatttgactgacaaacagcttcatcctttttctaagctgttttttatcagtgtttctaatcaggcaaagctgcaaataatcgttgataaatttgcttgttttatcaaaccacagctgctttccgcctatactaaagtgctccgcatcccggcctgcctcaatcagcctcatgataaccttctcataatggtcaagcctcttcagtgagctttctatcgaaacgctctgatttacgtcaccgactctatactcataaagtgccttatcatatgcgtagatactttctgcatatgccattgggattattgaaaactcctgatcctcgtaaaataccccctcagaaagtgtcagtcctgtatttctataaaactgcgtattatatatcaccccatgcagactcagcccccaccagaaatcatacagatgctcatccacatatcctgcattatatggtccaccattttttgttatatacttatcgtcgtacggatactcatcagtattttctctctgcagcacatatgatctatagctcatcagcactgcatctgcgaaattctcatgtttattttcattatctttaagataacaaatagtttctttcaacacatcagtgtttacccagtcatcagcgtctactaccttaaaatagcttccttttattatttttactccttcattaattgccgagccatgaccaccattttctttattcagtatccggtacacgtcaggatatttatttacatatttttgcgcgatttctacactattatcggtagagccgtcatttacaacaacaatgtccagcatatttaaaagagagttatcatcaataataaatgatgataaccctttatccaaaaactttgccgcattatatgtcggtattattattgatagtatctttttattttctgtttccatatcctatctaattcctgtttctatatgttaatttccacttatatcgctgtctgtcaccatatttgacaatggtagtcagtattattttctgtatagtctgtctgctctgccaacccttttggcaaactcaagcagctttgcaaattgattctcgtaaaagctgttgctcacatgcagcttattaaacagccaaaatactttatatttacgctgtactgcctcatacataagtgcacttttttgagcaagcttcatgttaaactgctctactatcgctctgccggattgtctgtcggtattttttatcaaagctatttgataatagcttgtgattatgcccgacgtctttctgataaagtgttcctttccaccctgtggcatttttgcaaagctcttctctgcctcaagtacattaaatataacctgctccaaatctggaagacgcttcacctgacttgctgctgaaacactttgatttacatctccaactctgtatacatacaactcttcctgaataaatctgacagtttttgcatacgaaaacggaacagttgcatactcctggtcttcgtaaaatacatgctctgtaagcttatatccaagtgctttatagaaccatgtgttatatatcactccgtgaaatgatagaccatcatatacatcatcccacatatttactatatcctttaaattgtactctcctgtaaaatcaggcacactcacatctgccggtctgtactcatcctttgatatgtcataatacctgaagctttgtatcaccgcatccgaatctacatgctcgagatattcaaccaggtgctttagcgcaagcgtatctacccagtcatctgcatcgaccacctttaaatactttcctctcacatgctccacgcctgtgttgattgcagaaccgtgtccaccatttgttttatttactatgacaaaggtatccggataccagtccacaaatttctgcgccacttcaacacttttgtcaggtgtgccgtcatttacgactatcacctcaagcttatcgagtatagccttgtcaatatctatttcctcaaagcggccctccgttgccattttacagttgtgctgtgctgtctgtgcatctgtatccctgcataccagaaatgacgacagccccttattcagaaacttttctgcattatatgttggtattatgattgataatattttactcattaactgttctatccgtcctgattactattattaaaaagagtattgcatactcattaacgcctattcatgaaattaattaccacgcagtctgctatagacccatgctgccatcggaaatatcttaaaccctgtttttctaagcatccagacgctcttcctgttgcacgcctggtacactcccgggtgctcctcacgcagcatctcgtcaaacttcttcatctgctcaacgttccttgtatcattgccctttgccagaaatatctggtactcatcatcgactgcctcggctatgccgcgctcaaggtactgcttcttgtaggtctgcagattgccgtgcacgttgttgtactcaaacagtgcatcaagcaccttaaggtgctggtcatgacgcttgatcatcatctttatgtccacgctctggccactccttccaagtctgtactgatacagcggcagaggtgaaaacgtgatgcttgtgcagtatggtatagggtagagtatatactcctggtcctcgtagaagcagtgctcatccacacgaatatcattcttctgcaatacatcagtacggatggtcatggaatgtatagtgatcagcgggtccatgactgcctcagcaaagccccactccctgttgtagtgataagagttggacactgcctttctgcgctttgtgaccttctttgtcttatcatccaccaggttgaagtcattggatatgacatccgagtgcgtgtgcttcaaaagctgtacaaattgtggcaaaaggctcttgtccagccagtcatcaccatccaccaccttgaaatactttcctgttgcacgcggtatcgcatagttgatggtagatccatggcctccgttctccttggagagcaccttgaagctgtatggatatttctgctcgtaggtatgtgccaggctggctgtagaatctgtggaaccatcatccactatgagtatctccagacttctgagcacagacaaatctataaacgagtcaagacagttctttatatacttttcaacattgtaagccggaacgactatggttaaaagcttctccatatatgtttctccatgtatacctgtttccttgtgtactactctccgagtccatccttgatgtactgtataagatgttcaagcgcctcactctcatcctcgccattgcagataagctctatctcatcgcctgactttatgcatgctccaagcactgaaagtacactctttgcattagctacatttttctcgtcatatataaatgttacctttgatttaaatttcattgcctctttgcagagattgccggccggacgtaaatgtaatccggtaggattcttgattattattttttgtgctaccacttttattacctcttttcggttatatatctatcaatgtgatgaactgtcagagccgttatttccggtgtttcctgacgatgtgctgcccgatgacgnnnnnnnnnnnnnnnnnnnnnnnnnnnnnnnnnnnnnnnnnnnnnnnnnnnnnnnnnnnnnnnnnnnnnnnnnnnnnnnnnnnnnnnnnnnnnnnnnnnngaactgtcagagccgttatttccggtgtttcctgacgatgtgctgcccgatgacgatgaaccgcctgtgccggtatcgcctgttgttgagcccgaggctgttcctgtaccatcagttcccgttgtgccgcctccgtcaccttcccttccgataactatctgaacctttatctcgccccatgtgtacttggtctcatccagatttggctttaccgtcactgtatgtgtacctgtaccaaggcctgtcacatcaattttccccttcagtgtagttcccgaaagtgtatctatatcagactgggtgccgcttactatgacactgctcttatctgttacaaatgtaagcgtatatccctcttccagtccgtcatatgtgatattggaactgttcagcgtcatggttgaagtcgcatttgtttcaatctttatatctatactgagctttgccttggatgagttcactataaaaactccatccggcagatatcctgtcaggtcaacagatgtacttatatcgtctgttgcgcccgatatatcgattgggcccacatctatagatgtgatattgttcaatgcttctgcattacccttgagcattacagactcctctgatagttctactccgagcacgctctttcctcctgccggtgagcctgtcgtagtacacttgataggcacctccttggtacttaggacatcaacggtcactgctatagactgatattggctgtccacatcaagctttgatatatctatctcatcgccattatcatcaatcagagtgagatcaccgcgatcagttatctgattatctgatattatggtattgtcatcgacctttatatttacattggccgatgctatagttgaaacaatggactcaggacctccgatctttactacctttggatttgcctgtggcttgtttcccagtgctttcgcacctgagagacttccatccaatgatacctttacctcaaactgcttctgcatatatttttcaaccgaaagcgggagcatatggtctccaccgttgaaggtaatcgaatgtctgtacttggtgcatccaatatctacctttacgcttgccttattcgtatcatccttatctactatgatatttgcaaggtcgacatttgcgtaaaaatcagaatcatcaagctcgttcagatagcttctcttgcctgataccgaaaagctgatggtcttttccgaatccttgatggtaggccatagccccttgtcaacaaccgaatcacggcctgtgacggtgactgttgtggtaaatgtctttgtcttgaccgggtcattgagattgtagaccacaagccagagtataaatgcaaatgctatcgcaagtattttaaagcctatattatttgtgaaggtttttagaagcttctttcccattcttaaacctccttttaattaattcaaatttacccggctccctatgtctgttctgcagaagcttaagctgtgtgcgtagatgatcggcatctatatcgtgctcaatctgccccttgtatgctgtagaaactgatcctgtctcctctgaaactatgatagtaagcgaatcacttacctcgctgactccgaccgctgcacggtgtctggttcccaaatccttcgagagtgacaggctgtctgatagcggaaggtaacatgtagctgacaccacacggttgccacgcacgataaccgctccgtcatgaagcggtgtatttttctcaaaaatattgatgaggagctgacttgtaagtatggcatccacatctattcctgttctgatatactctcccagatttatctcatcctccatgactattagcgctcctgtctttactctgcccatcgcaaagcatgcacgcaccagctcatcaattgtcttgtcggagaatttctcaatctcgcccctgccggtattgaagaaatcacccaaaaaggtctttccaccaatattctccaaggcatttcgaagctcaggctgaaaaataacaacaagtgccacgagacctatattaaagagtttctcagcaagccacagtattgtatccatctggaacaatgctgcaacaagcacaaacaacagtatgataataaggcccttgaacagattccatgccctcgtggtctttatccacaaaagtatatgatagaagagcactgaaataataagtatctctataatgtctatcacaccgattttgatgcccggcacatttgtgaatgtaaggaactgatccttgaagcgtatcaatacaccactcacattatccatagcgccctcctttctcttatactatgtaactatttgtcatcctcaaatatattttcgtctatttcgagatcttttgcaatagcctctttgctgatattttcctgattatgtctctgaatcttctttccaaggcttcctgtattgccaaagtgctttacaaccttttcctccttggcaatcatcttctttggaactgccttgacgtaataataatattcatcatcctcaaactgtacattttctgtacgtgcatagtcaagattcataaatataaactgtatgacaacacctgcaaaaatagctgctacagtgctgagcacaagccagattatcttctccggcagtccgagcaccagataagcaacaacaagtgcaaccaactgtatgagccctcctgctatggtagcaacagtccatgaattgttgattttcaatcgtctgacctgatacaccaccagtgtggtgataacaaagattgccataactataaacatctctttgttgtcaagaagctgtcccattgtcacattgagctttgtagtgctctgcccctttttatctaccacctctgcaagcgctgatgcattctgtctgattccgtcaaggaaatagtacagcagtgtgccacatattattgcaacaaccgaataagctcttcttaaaagacctgctgcaaccggcacaacagatggtatgtgaagctgaaagcatataggtgtaagtatcacaagcatgccatccttcggtgcaaaacgaaaatagacaaaatacagtactaaaaaaagtacaaatgtgatagcaaaaacctctatggacagcgcatacatatctaaaagtatcataatcgaagcaatccagagtattgcattcaccggaagcagtgcacacacaagcgctaaaagcagtgccacaagcatcgagctgattttcgccatatatccgatattcaaatctattgttataaatgcgataaatgcaacggcaaatctcacaaccggaagtataaagtgctcatactcaccgcaaaatttgactgccttatccttaatttccagtaacttgttcataaagcctccctaacgcttaatcttttcctcacgggaatatattctgcccactgccttcaggtgatttgcgtatttgcgcacttctcttctgccggccctatatcttgcagtatacaccacaattgtgacaaaaatgtaaaccgccataaatgcaatatacagtatgcctattgtgacacccattgccttaaaatcaagcttattgattctatccaaaagctctgctgcattgacagcaacccacatcacaacaagccctgcaaatgcgaatgtacctgtgaagaagctttttaagccctctttccatatatagtcccatccgtagtagcttgcggactgtttctgcacacggctgtcatcgcttttgctgtcacaaagagcaatattaaacagttcccttactttttcttcgtttatcataaatcatcctcttacctgttatatctcatacggtttttgtcatcctgctgccacagcccttgcaattagatattctcatctgataaccccctcctaacttccctgtcctatgcaaatacacagcacatatacacgaccgagacatttctttgctatctcgtgcccaatcgactctgccgtactgcctgtagtatatatatcatctactattagtatatggtcatattgtacaatactatcgaccacttgaaaagccccctcgagacaatttctgcgttcaacataccccattgtcttgagtggactggtatttttcactctgcgcacaagcccttttgccatccttatgcctgttttttcagacaatgcccttgcaaaacactctgcctgattgtagcctctctggcgcatttttttacggtgcatcggcaccggaataataacatctatcccacatctctgtatccagtccgaatatctttccactgctgtctgtgcaaaataagccgcatactcacgtctgtttgaatacttgaacctgtacatggtctgctttatgctgcccttgtatgcaaaaagcgccttgccctgcctgtagctgtcatcttcccgcatctgcctatgatgctcgagtgcccgtgcgcagtcgtcacaatactctcttcgctcagacaaaaccggcttcccgcagcgcatacactgtggctgctcaaccggaaagagcttttcacagcatctgctgtgtatatatctctcaaccggaccaattataccatcacataccggacagcgcggtggaaataccagattgattacgcctctcccaatatcctttattttgttcactaatccccctgactgtaatatccccatttgtaacaatattaacaaaaaagcgacaatacattcctgcaatgcagggacatatcatcgccctcacggctgcctgttataaaacgtatattctagaattcttcatctctcttgcctgcaaggaactctacatactttcctgtaccgatagcaacacatgtcataggctgctctgcagtcattgtattgatgccggtcttttcctcgataagctcctcaagacctctgagcagcgaaccgcctcctgtaagcacgattcctctgtctgcgacatcggctgcaagctccggtggagtcttttcaagcactgagtgcactgcctcaactatctgaagagttgcctcacgaagtgcttcctctgtctcctctgagctgactgtaatagtccttggaagtcctgttacaaggtttcttcctcttacctcaattgtctccggctgtgggagagggtagcatgtaccaatcttgattttgatatcctcagctgttctctctccgatgagaaggttatgcttctttctcatgtatctgacaattgcctcatcaaaatcatctccggctatcttgatagatgtgctgactaccgaaccaccgagtgagataactgctatatctgatgtaccgcctccgatatctactatcatatttccgcatggctttgaaatatcaatacctgcaccgattgcagctgcgattggctcctcgataatcttaacatctctggctcctgctgcaaatgtagcatcctcaacggccttcttctcaacctctgtaacaccacttggcacacatacgctcacgagcggctttctgaagcttttcttaccaagcgccttctggatgaagtgcttgatcatcttctctgtaactgtataatctgagataacaccctgacgcagcggtctgactgcaacgatattacccggtgtccttccgagcatgaggcgtgcttcctctccgattgccttaatcttgttggtgtccctgtcaaaggctactactgaaggctcctttaacacaacaccctttccttttatataaacaagtatacttgctgttcctaaatcgattccgatatctgatccgaccattttaatagcccctttcctgccatatctttaaatttacacatacactctcttattatatacaataaatcccatttttcaaactttttttttgaaaaaggtcatatttaataaaattttaaagtttatccttgtctttttccagatatggtttcaaaaaccggcctgtatatgactgttttacctcgcatatctcctcaggtgtgccctgcgctatgacggttccgccgccgtctccgccctcaggtcccatatctatgatatagtcagctgtctttatcacgtcgaggttgtgctcgataacaactacagtattgcctccgtctgatagcctgcgcagtatctccacaagcttgtgtacatctgcaaagtgcagtcctgtggtaggctcatcaagtatatatatggtctttccggtgctctttctgctaagctctgtggcaagcttgatacgctgtgcctcaccacccgaaagctctgtggacggctgtcccagcttcacgtaggatagtccgacatcatagagcgactggattttgttctggatctttggcacatttttgaaaaactcaagtgcctcctccactgtcatatcaagaacatcgtatatgctcttgcccttgtactttacatcgagtgtctccctgttatatcgtttgcctccacagacctcacacggcacatatacatcaggcaggaaatgcatctctatcttaaggattccatcacctccgcaggcctcacaccgaccgccctttacattaaaactgaaacggccctttttatagccctttgccttggcatcaggtgttgatgcaaacaggtctcttatcatgtcaaatacacctgtatatgtggcaggattagagcggggtgtacggcctatcggtgactggtcgatgtctatgaccttgtcaagctgttcaagaccatctataccgtcgtggtcacctgcgatacacctggctctgtttaaggatttggccagatgcttgtatagtatctcattggtcaatgagctctttcccgagcccgacacgcctgtaacacaggtcatgataccaagaggtatctgcacatcaatatttttcaggttattctccctggctcctcttatcgtgatatatccgcttggcttgcgcctctcctgtggcaccggtatctttattttaccgctcagatatgctcctgtgagtgattttttgcactttataatgtcctttaacgagcctgccgccactatctctccgccgtgtgaaccggctcccggtcctacatccacgatataatccgctgcacgcatggtatcctcatcatgctccaccactatgagagtattgcccagattcttaagattcataagtgcgccgagcagcttgtcattatccctctgatgcagtccgatacttggctcatcaagtatatatgccacacctacaagtcctgagccaatctgcgtggcaagcctgattcgctgggcttccccgcctgaaaggcttgccgtgccacgggtaagggtgaggtaatcaagaccgacctgctgcaaaaagccaaccctcgcacggatttcctttagtatctggtctcctatatagtgctgctgctctgtaagctctatatcagcaaggaacttcacaagctccttcacagacatggaggtcatctcatatatgttcttgtccgcaaccgtaacggcaagtgacgacggcttaagcctctgccccttacagctcgtacacggagtaatgcgcataaactgctcatactctgcctttgccgtatcagaaaaggtctccttgtatcggcgctcaacattgtccacaaggccgttccatacaaggtcatagacgccttcgcctctctgccccttgtatctgaccttgagcactctgccgtctccaccgtaaaacagcagctttttcatatctgcagataaatcatcaatcggtgtgtcgagaggaagcccatagccctcatgcagcgcacgaagtgtcgcataggtatagctctttgggtctgtacatgactgccagcccatcacctgtatggcaccctcagatatggaaagcgatgcatccggcaccataagctgcgggtcaaactccatcttgtagccaagtccgtagcaggtcggacatgctccgaacggattgttgaaggagaaacttctcggctcaacctcatctatgcttatgccacagtcagggcacgcaaaattctgggaaaaggtcatctgttcgccatctacaatatcaactatggcattgccctctgtcagttcaaatacattttcaagtgaatcagtaagcctcttctctatgcccggctttacaaccaaacggtctacaacaatatcaatattgtgctttatatttttctccatcgggatatcctcggagagctcatacatgctgccatctacaatcacacgcacatatccgctctttttggctctctcgaacagcttctggtgctcacccttgcggcctctgaccaccggtgcaagaagctggatacgggtgcgctcaggcagtgccataacagtatccaccatctggtctatcgtctgctttgtaatggcacgcccgcacttcggacagtgtggtattccaattctggcataaagcagtctgaagtaatcatatatctctgtgaccgttccgacagttgaacgtgggttcttgttggtggatttctggtcaatggaaatggcaggcggaagtccctctatagactccacattcggcttctccatctgtcctaaaaactgacgtgcatacgatgaaagtgactccatatacctgcgctgcccctcagcatatatggtatcaaatgccagtgatgacttgcctgagcctgaaagccctgtaaaaacaacaaactcatctctcgggatgtcaagactgacgcactttagattgtgttcgctggcacctcgtattttgatgtattttctttctttttttgccataatttgtgttcctccaaattgcttccaaatatcataagcttttatcgtatatccctcaatgtgtttttcagcataataagcttatccctgtactcagcagccgcctcgaaattgagctctgccgctgcttttttcatctttttctctatatctgctatatgcttctcaagctcttttttgctcattgactccggatctttgtcaagagcattctcatcggccgctaccttctttgagatagctatgagatcacgcacggatttctgtatagtctgtggcgtgatgccgtgagcctcattgtactcttcctgtacctttctacgacgctttgtctcgtcaattgcgacacgcatggagtctgtaatcttgtcagcgtacatgataacatggccctcactgttacgtgcggcacgtcctatcgtctgtataagtgaggtctctgagcgaaggaagccttccttatccgcatcgagtatagcaacaagtgtaatctccgggatatcaaggccctccctgagcagattgatgccgacgagcacgtcaaatacgtcaagacgcaggtcacgtattatctccgctctctcaagtgtatctatatctgaatgcaggtactttaccctgatgccaagctctgccatatagttcgtgagatcctcagccatacgctttgtgagtgtggtgataagcaccttgtgatggtttgcagtctccttattgacctctgacacaaggtcatcaatctgtccctcaacagggcgcactgatatctcaggatccaaaagtcctgtcggtctgataatctgc

SEQ ID NO: 1060 - DNA, 15929 bp, unidentified
  source 1..15929: mol_type = unassigned DNA
taaaactgtatactatgtctttgcactgttgtatactatgttactacactgcacaattatccgccagtacggcgagccgccgtacctgattcgtgtagataggttcattaaatgaaaaattgaaaattgaaaatggaaaattgcggtcgggaagatggtttgcaatataaaaaaacatattatgcccgagcgtagtatagtagctgtttgcacaatttaatgtagcggcgaactgtgttcgccaatcatttcgtgtgcaaacacgaaatgaataaatcgcaattgtatttttatatcataactatcttaaacaaataatttatattaagtcggtttggttttgtaaccaaaccgatcggcgaacgaagttcgccgctacaaacgctacaaagaatatgctgtaatcaaaaaaataatttgcaagaaaattaaataaacttgcaaaaattaaatttgtgccgtagcttagatttttgacctgttattgtaaactgtaatttaaaaaacagcaaaaaactttaaaaaatattcaaaaaagtattgacaatcggttaacaaggctttataattcaagacagtaaggcaaaggtcttacgaagttttcggaaaactgaatataaaaaggacaaggaagttcactttggtttcttctgattttgcaacaaatttttaaaaacttgcaaaatcggataaaaacattgtgagctttatttttttgcttcggcaaaaacggtttatgtggaggttaaaaatggattcaggaaatataggctttgtgctgctttgtgcggctttcgtatttgtaatgactccgggtcttgcaatgttctacggcggtcttgtacgaaagaaaaatgttgtaaatacaatgatgacatcaatttttattatcggtatcggaattgttatgtgggtgcttttcggttattcgctttcgtttgctccttcgggaaatgcttttatcggtgatttccgttggctcggtcttgagggtgtttcactcacggagggctacacggatgatgcgtcgattccgaatatggtattctctgcgttccagatgatgtttgccgtaatcacccctgctcttatcacgggtgcggttgcaggcagaatgaagtttaagtcaattttcgttttcacaattttctggtcgcttatcgtttattatccgctcgctcacatggtgtggggacagggaggacttttaggtgcagacggtatcggtgctctcgactttgcaggcggcgatgttgtacatatcagttcgggtgtttcggcacttgtactttgcatactcctcggcaagcgtcacgattatgaacattcaatttacagaattcacaatatcccgacagttgtactcggtgcgtcgctccttatgttcggttggttcggctttaatgcgggttctgcacttgccgccgacggtcttgcggctcacgcatttatgacaactggtgtttcagccgcagccgcaatgctctcgtggatgctctgcgatgttatcaagaacaaaaagcctacgcttatcggtgcaagcacgggtatggttgcaggtcttgtaggtatcacgcccggtgccggctttgttccgatgtgggcggcagttattatcggtttgacaacaagccccgtttgctatattatgatttcatacggcaagaaaaaattcggctttgacgatgcgcttgacgcattcagctgtcacggtacaggcggtatctggggcggacttctcacaggtgtgttctcatgcacggcaatcaacagcagtgcaggtaacggtcttgtgtacggtgagtttgcacagttcggtgctcaggcggcaggtatcggcatcacaattgtaattgcggttgtcggaacactcatctgctacggcatcacaagacttcttacaggcaaaatcagggttgacctcagagatgagcttatgggacttgatgtttcacagcacggtgaatctgcttatccgtcatttaacggtcttgacaactaacggaggttttaaagtatggaaaacaataacgatattcagcttataaaaatagaggccgttgttcgtgaagaaatgtttgtagatgtcaaaaaggctctcacggatatcggtgtaaacggaattacagcgtatcaggttgtcggctgcggaattcagcgaggtatgtcggagtatgtaagaggacagaaggttgatgttcaggttttgccgaaaatcaagtttgaaattgttgtttcttccgaagaatgggagagaaaaacaattgaggcaatcagaaaaacagcctttacgagcaacccgggtgacggtaaaatatttacctactatcttaaacaggcggttaaaatccgtacgggagaaacaggctacgatgcaattcagactcccaactttgacgactgatattttcctattttcctatatcaaaaaagtgcgtaccgaatttcggtacgcactttttgcttgtaaaattgtttatcttcttattgtaatatcttccgggctgacagtattgtcacgaagtctgttgtaataatcgggatttgaatgctttatgcttatcggctttagctcgggagttgcaaaacagtgtgttgttctgcctgttgcagaaagttctccgtttttattgttgaagagtttatagtcaaaaatcattcttgaacccgtaaaaaatacaaggcttacttcaacggaatactcatcgccgaatttaagcggctttttgtaacgggcatatgcgtcaacatttggaatatataatccttttgattgcatttcggcaacatcacaaccgatgtcgtgcatatactgaattcttgcatcttcaaaatatctgataaaatttgagtgatgaacaatgttcatacagtctgtttcatagtatgaaacctttgctttgtataatttctcggtcatattttctcctttacatatattcggaaaatccgtaattattttttaagcaacaaaccgtttttaaggtcctctgctgcctgtttttttattacaaaatgctgtttcttgcctgttgcagtctgcggaagatcgttgacaaaacggtagtatctcggagcctgatattttgaaatattcggtgagctgtcacagaagtcaataagctcggcaaccgtaagactttcgtcggccttgattacatatgccgcaacgcactcgcctcttgttgaatcgggaacacctgttacgatacattcctgaaccttcgggtgtgagttgagaatttcctcaattcttgctggataaatattttcgcccttgctgataatcatatcatcttttctgcctgcaactgtaacaaactgctcgctgttccaagtgccgatgtcgcctgtgtacatccaacccttgtagaacttgtcttttgtagccttttcgttatttacatagcagtaggtagttttgttcggacatttgatgatgatttctccctctgttttgttatcgcaggggactgtgtcatcgggctctgcttttctgtcgtcataaacatttacaagtcttacctcatcatctgtgcatgatctgcctgccgaacctgccatttcaggaaggtcatacggacgaagaaatgtattccagaaagattccgttgtgccgtagccgttaaaaatgttgggggagagaagttcctgatagcgaatgcaagcggctttttcaagcggactgcccatggtaataatgcccttgagcgaagaaaggtctttcggatgcttttcctgtcgggctgcaagcatttcaagagttgacggaacacctgtgatgaatgtaattccgtatctttcgataaactccatacaactcctcgggttgaaggttctcataatcacaagacacgcacctgcatagagagtaggtgtgggaccgccggaatgaataccgccacggtgaaaccacggcgtcatattcatcgtaatgtcaacgggtgagagcggaaagtgcataattacatcgtgagccgaaagaacttcgttgattgcgttaagcggaacaccctttggagtgcctgttgtacccgaggtctgaagtctcaaaacctcgtcataaatatgcggtgcatagtcaacaggcggattttcgtaactgctgtccttgatgtaatcgtcaaagaaaatgtgtccttcgggaagagttacttcctttttggaattattaacgcagagaatcaattttggtttatgctcgcagatttcaagggcctgtacggctgtttgcataatgtctgcatcataaacataaacaacaggcttgttgtgtcccataatttctgcggtttcgcccggtgataggttaaagttagcgggatttgagattgcaccgagtttctgcggcgcaatgtaaccgaacaaaaactgcggtgagttgtaaagctgcataaacacgatgtcgtttttcttgacgccgtcttttttcatagcgtttgcaaatctgtttgcatcggcattaagttctttgtagctccatgttctgccgctctgaggatcaattgcggcaggtttatccgaaaagcgtcttacatttctcataaagccgttaagccatgtaaattcactttcaaatgtttctctgaacatctgtgaatcatatgttaaattcataatatcctcctgtcctattatgtatgggtgtgcattattttatacacacatatgtgtgttacttgtatgttgttttgtcggcagattatttgccgtatttgcctacgataatacttgagttctgaccgccgaatccgaatgcgtttgacatggcaaagttgatttcggctttctttgcggtatttgcaacaaagtcaatgccggcacattcggggtcaacctcgttgagattgattgtaggcggaactgtgcctgtttcaatagccttgacacaggtaattgtttctgtaataccgcctgcgcccatcatatgacctgttgcgccctttgttgagcttacataggggagagtgctgccgaaaaccttcttgattgaagatgtttcaactgtgtcacccttgtttgttgcagtaccgtgggcattgatgtagccgatgtcggaaggattgattcctgcctctgcaattgcctgtttcatacaagcgattgcacctcgtccttcgggatgcggagcagttacatggtaagcgtcatccgtgttgccgcaacctctgatttctgcataaatctttgcacctcttgcaagagcgtgttcctctgtttcaagaacgagcgcaccgccgccttcacctattacaaaaccgtcacgggtaacatcaaacggacggcttgcagtgcttggcgaatcgtttcttcttgaaagagcttttgcgttggcaagcgaataaattacaagaggacagagaacggactctgctcctactgcgagcataatatcagccttgccgctctgcatacacatacaagctgtgttgattgcgtcaccgcctgacgaacaagctgtgcttaccgtaaagctcggtccctgaatattgtagtcgattgcgatatttgcggcggcaatgtttccgagaattttgggaataaaacgaggacctacctttttgtgtgatgcgcctgtgagtgcctcctgagtatatgcgattgttgcaatacctgccattgcagtacccataacaatacccgttctttcgggttcaatctcaattccgctctgtttcatggcttcctcagccgcaatataagcgtattgcataaacggatctgtttttctgattaaatcctttggaagatagtctgacggattaaagtcctttacttcgccggcaatctgaacagcgagttcagacggatcaaaagtcttaattgtgtcaatgcccgatgcacctgccgtgatattattccagtagttttcaacaccgatgccgacaggtgttaccgcacccataccggttacaactattttcttcattcgttaagctccttgttttaaaataagttatttacattttgcatattattatgctatacttgaattgtaccaaatatggaaaaattattcaataccgttgattatgcaaaaatgacgatttggcagtcctaaatttacagttttgcataatattgaaaaaaaccgacaaaatactgcgggaaattgtcaaaacggaggttattatggatataaatcagctcaattgctttataactgtggctcagacgctcaacttttcagaggcggcaaggcggaactatgtttctcagtcaaccgtcagcagatatgtaagcgaccttgaaaaggagtttggggttcagctttttacacgctctcaccgtgatgttatcataacaagcgagggcaaggcacttttgccctatgcgattgaaattgttgaaactttaaagaaagcaaaaaccgttatcaagcagatgcatgacggaggtcagggtaaaattacgctcggctgtgatgttacctcgctttcgttcccgacaaaatgtattgccgactttgcggaaaaatatccgggaattacaattgatgtgcgacagcttgacgaagctgaccgcacacttgcaatcacaggcggtgaatacgacttttgctttatgccgagagatatggttcccgaaagctcaggtattgaatcaatcattacacataatgaaaccttgtccgttgtaacagcgaaaaattcaaaattcagcggaagaaaaagcgttaagctttccgaattggctgacgaaagtattctggtactttcggagtcggttgcaccgattgtgtatatggaaattatggacttgttccgcacatttcacataaccccgaaaattgaaaattcatttgacgatcttgtttccatatatgtgtcatcgtcatcgggaatcggcgtgtctgtcataccaacctcggttgccgcatacacttctaacgaatacaccgattcataccttattgatgatgcggacacaagcatagcctatgttatggcatggggaaagaatatttcaaatcctgctgcaaagctttttatggaggctgttaagaaatatgccaagggagatgacaacatttacgggctgtaactgagcatatttctcaatataaattccaataaagaactatagtgaaaatttcacaaaataaacacacattattttcaaaaaaggtatttactttataaatcttcggtgttataattacggtagtcaaggagaagttgacaaaatatcctttcaggaggtaattaaaatgtacagatttactttaccgagagatctctatcatggtaaggatgctctctcaagtcttaaaaatttatccggcaaaaaggctgttgtagttgtcggcggcggttcaatgaagcgtttcggttttcttgacaaggctgttgactatcttaaagaagcaggtatggaggttaagcttatcgagggcgtagagcctgacccatctgttgaaacagttatgaagggcgccgctgttatgcgtgaatttgaacccgactggattgttgcaatgggcggcggttctccgattgatgccgcaaaggctatgtgggtattctatgagtatcccgacacaacctttgaggaaatcattactccgttcagtttcccgacacttcgtacaaaggctaaattctgcgctatcccgtcaacatcgggtactgcaacagaagttacggctttctcagttatcacagactatgcaaagggtatcaaatatccgcttgctgactttaatatcacacctgatgttgctatcgttgatcctgcacttgccgaaacaatgccggctaaacttactgctcacacaggtatggacgctatgactcacgcaattgaggcttatgtttcaactctcaactgtgagtacacagatccgcttgcactccatgcaattgagatgattcacgacaacctcaagaagtcttatgagggcgacatggcttgccgtgataaaatgcacgatgcacagtgccttgcaggtatggcattctcaaatgctctgctcggtatcgttcactcaatggctcacaagacaggtgcggctttcacaggcggtcacattattcacggctgtgcaaacgctatgtatcttcctaaggttatcaagtataactcaaaagatcctgttgcagctgagcgttatgctaagattgctaagttcatcaacctcaagggcgaaacaacagaagaacttgttgacgcactcatcgctgaactccgttcaatgaacgatcagctcaacattccgcagggcattaagaactacggtccgggtggcgttaaggctgacgagagcattatcgacgaaaaagaattcctcgaaaagctccccgaagttgccaagaacgcaattgccgatgcttgcacaggttctaacccacgccagccaaatcaggaagaaatggaaaaacttctcaaggcttgctactacgatacagaaatcgacttctgattcgtttgacaaatctatttgtacttatcacagctctccgttttcggggagctgttttctacttcaaaatgactgacaaatgaaagagttttaattaaatttgctttaaactattgcaaaattaattcttttatcatataatataagcagtgaaaggagttgattgatatgacaacagtaagtcttcgttttgatgacaatactaaaaaagaacttgacgaaatgtgtgctgaaatgggtatgaatctgaccacattttttatgatttacgcaaaaaaagcacttcgtgagcgaaaaattccgtttatggtagatgctcctttaaagattgatgaaaatgataattatgatgattaagcatctgtcaaacgacaggtgctttttgtcttttataagagtaaaaaatccgcataaaaatgctcttaaaaggcataaaaatcatatggacaatattgctttgttgtgctaaaattgacttgaaattgatgaatttggtgatataaaaatgaaaattgcagtaataaacggtcagaaccataaaggctcaacctatcatattggcaagcaggttgccgataaattaggcggcgaggttacggagttttttcttccgagagatttcggcgatttttgcgtaggttgtacgcagtgttttctaaaatccgaaacactttgtccgcattatgagcgactgaaaaagattaccgaggctatggacgaggctgatgtactcatcttcacaacgcccgtgtatgtttatcattgcacaggctcaatgaaagcatttcttgatcattacggttatcgttggatggttcaccgtcccgaacagaaaatgttcacaaagcaggcggttgtaatttcgacagccgcaggttcgggtacaaaatctgccaacaaggatatcgccgacagtatgttcttttggggcgttccaaaaacttatcgttacggtgtcaatgttcgtgcaacaaattattcaggcgtcaccgatgaactcaaaaagaaaattgacaaaaaaactacctcaattgccaataaggtaaagaaaaataacggcaaagttaaggcagggttaaaaacaaaaggctttttctttattatgagaatgattcagaaaagcggctggaatgaagccgataaaaattactgggcagaacgaggttggaacggtaaaaacagaccgtggaaaaatacataaggagatgttttaaatgccaaaaaatactgaaatcagcttgagaaacaaggttatttattcgatttatgtccgtaatcacacaaatgacggcacatttaatgccgttgcagaggatcttgaccgaataaagtcactcggcacggacatcatttggtttatgccgattcatccgattggcgtcaagaataaaaaaggctctctcggctgtccttatgcaaacaaggactatcgcacaacaaatcccgaatacggcacaatggacgatttcaagagccttgttgaaaaaattcacgcaaagggcatgaagtgcatcattgatgttgtctataaccacacctcgcccgactcaaatctttctgttgaacatcccgaatttttctacagaaagccggacggcaattttggcaacaaagtcggtgattggagcgacataatcgaccttgattattctaacaaagaattatggcagtatcagattgattcactcgttatgtgggcgaagattgttgacggcttccgttgcgatgttgcatcattcgttcccgttgaattttggaaacaggcgagagaggctgttgcaaaggtaaatcccgactgcatttggcttgccgaaagcgtacacagttctttcaatgtgttctctcgcaagagcggaatttataccgcaagcgactatgagctttttgacgcttttgatatggaatatgactacgatatccgtgaggttttcgacaaatatttgaagggcgaaaccacactttcaaattatatggatatgttcaattatcaggaggcaatttatccgcagaattacgataaaatgcgttgccttgaaaatcacgatcagccccgaatctgccattatgtaaagaacaggagcgaccttgaaaattacacagcttttctgtatttcttgaagggttcaaccctcatctatgcaggtcaggagttcggttgtgacgaaactccaagcctttttgacaaggatgttttcccacgcaacacaggcattgatttgagcaaacttcttgcaaagcttgatacaatcaagaaaagcgttcttgatgatgacgattatttcaaggctgatgcagatgatgaaaacgatattgcaattcttgagcgtgacaacagcaagagcaaaaaagtcggcattttcagccttaaatcaaagtcggctgatgtaaaagttgaccttcccgacggcgactataagaacgaaatcagcggtgagacagttacagtttcaaacggaaagattcattgcaacggcaaagcaataattatccgcaagtaaaataaaattccatataagaataatacaacctccctgcaaagcatttcagcttacggggaggttgttctttatataaaaatccgtgttgcatggttacaacacggatttcttggttttatttaattgaaccgtcgccacccataagagcggtcatttcttcaatgcgtttcaaaggaaacggtggttcgcaaagcagttttttatatgcttacttagctttatttttattactgccgaaaattttagtcggaataatgcttccgaggaatgcggcgagcaaaatccacggaataactcttgcgtcaaagcagagcaaaaggagcattgttacggcaagcggttttttcattgtgacaccgagaagtcctgccgttacgactgccgcacaaaatgccgtgtcaagtccgccgagcattgcaacaccgtagccgatgctcactccgcagaagatgacggggaagaagtgaccgcctttccaacccgactttatgcagatgtttgtgagaacaagtttaagcacaccgctgataatgagaatccacggtgcaaattcggcaaagctttccttgacaacggtaatgctttcttcgcccgaaaacattgtgagagggaggtatgtacccataacaccgaggataattccgccgagagttgtgctgataataatgccgagtttaccctgaatgagtgcgaaaaattttccgaaaatctttgaagatatgataaacagaaaaccgcatacagcacccaaaagtgcgagaggaattccccacaaacgctcaaaatttgtaatgttataaccccagagtcgtggaagtcccatacttccgccgaaaacggagttaagcaaaaacagagttcccgccgcaaaaagtacggcaatgatgtttgaaataagctttgttgaacggatatcggtaggcttttcttcgctgtcaagcctttcttcattgaccgatgcaagaccgaaaagcggtgcgtagaataccgcactcaaggttgcgcttatgccgatttgcattagttcgggaattttacttttagcgtctttcatatgacttcctgcccagtagcaaagtccgacgataacgcctgtcaagcctgcctcggggccaagacttccgccgaaaacaaggggcaaaagtgccgaaatgcagagcaaaagcaccttgttgtacgggtaaaatttatctttttttacctttttcataacctcgtcaagttcatcgggaacggcatttgtcagcttttgccatattccgagaataagtccgccagccgtacagacgataatcggataaaatttgaaatcaaaatttgacggaattgtatcccacacaagaccgattcccaaacccataagttttagaaacagccatactatcagcgaagtaaccgcaccgctgaatccgcaaaaaatgtagtataaaaaattgttggcaacagtccgtttagtcattgtcgcacctccgtgtgtttataattgaattataacataaaacacagcaaaaaaacaattattccgcacaaaaagtgcgaaataattgctttttattatttttttaattttagagcctcttctaaacaaaaacagctgacaccaatgccgatgtcagccataaaaacctatttgattttaaatttcaaaagcggcacttacctttttgaattctctttttctgatgatgaagtaggcaatcaaaacggatgtgcctgtgataagccatgaaacggggtaaaccataaggagcatatcataggtgtggtatgccttgaatactgtgaagagccagatgattctgaacacaacagaaccgaagattgtgaggattgcagggaggagtgaatgtccgattcctctgagcgcaccgccgctgatttcgtatgaacctgtcataagctcaaggagcataacaatcgccattctgatgattgcgtacttgataacggtggggtcggttgtgaagaaggtgatgaaaaatccgcttccgagcatgaatataacgctcacacagcctgtgaaaatacagctgaaaagcatacaaagcctaaacacctttttgcatctgtcaaactgaagtgcgccgtagttctgacttgtgaatgtaacggctgtctggctgaacgcacatactatatagtatgtaatgtattcaaagttgagttcagccgatgagcctgcaaccgcctgtgaaccgaagccgtttatggctgtctgaatgaatacatttgaaattgagaaaaccataccctgaatacctgcaggagcaccgattttcaaaatcataatgagatgttctttcttgaatgaaagtttttttggattgactctgattgactcgtcttcgtttctgatgaggaacatcataacaagtccggcgcttatgccgtcggcaattactgttgcaatgccgactcctgcaacgctcatatcgcagacgattacaaagaagaggttcaaaagaacatttacaatacctgaaattacaagacagtagagcggacggcttgtgtcgccgacacttctcaaaattgccgaaccaaagttgtagagcattacaaacggcatgcccataaagtaaattctcaggtatgttgccgcaaggtcaattacatcatccggtgtgttcatcagccttaacagcggtgctgcgataatctgaccgagtatcagaagaagaaatccgcatataagtgaaagtgttattaccgtgtgaacagcttccgaaacttttttacggtcattttgaccgatatatcgtgcaatcaaaacatttgcgccgaccgaaagtcccgtgaataacagcacaagcatattgatgagcggagcgttgcttccgactgcggcaagtgcctgactgcttgaaaatctgccgaccaccgcaacatcggttgagttgaaaagctgttgaagaatactggatcctgcaagcggaagtgtgaaaagaagaattttttttccgagcggaccttccagcatatttatctggtgtgagcgctgtcgcttttcttttacggtattctgacctttgtttcttctaaacagacttgcaaacgcaagtgagagcatttttttgactttctccattaatttctaacctcttcaatcacataaccgttgtaaacgatactatccttttccgttttccacaattattgtaatcctgttgcccgaaataaacaagcaaaataccttataaacataaagtttactttgctcacaattttagttacaataactacctcgtcaaaattcttctttttatgcctttataatatggtaaaaactgcttttctgcatattttcagaccgatttttctcaataagcaaggctttgaatttgtatgcaatttgtgccttttcaacaaaagtaaaattgctctcttgtaagcattgacgaaaaattttttaacctacaaataaatgattttaaaattgttgtatatgcctattaaattataatgatacaattatgatacaagcttaatataatatatttttaaagggataagcgaaaaggagtgaatgttatgaagaaaaagattgctgtaattgtggttgcaattgttttatgcgttgccgccgcagtatttgccgtgccgaaaatcagtttctatgcgtgtgagcctaccgtgtattttgatgttgagtactgcgacaaggttgacacaaagatgtctgccgaagatgccgaaaccgtgaagaaaatgtttgagggcaaatccgcatattttgattcaccgtcttgtggtttttccgaaaatgcatcaataagaataggctgtaatacatatatgcctgcgtgtgacggtgatgaaacagttaagcacggatttatgtattttagtctttcaaaaagcgaaaataacgaacttcgcaagattatgaaaaagtacggagcagatacgagaaaagctatctaaaaccgttgacagacgcatttccgtgtgttaaacttttctcgaaaaatatacggaggtgtttttatgaaaaactacaactgggcaacactcggttgcggagttattgcaaatgagcttgcagccgcactcaaaagcagaggacagaaactttattctgttgcaaaccgtacccatgaaaaggcggttgcgtttgccgaaaagtacggcattgaaaaggtttacaacgatattgacgagctgtttaaagacgaaaatgttgacataatttacatttccacaccgcacaacacgcatataaaatatcttcgcaaggctcttgcggcaggaaagcatgttttgtgcgaaaagtcgataacgcttaattcagatgaacttgacgaggcaatctctcttgcagagaaaaaccatgttgtgcttgcagaggcaatgacaattttccatatgccgatttacaaggcacttcttgaaaaggtaaattcaggtgaccttggcgagcttaggcttattcagatgaatttcggcagttacaaagagtacaatatgaacaaccgatttttcaaccgcaatcttgcaggcggtgcaatgcttgacatcggcgtgtatgcgctttcgtttgttcgtatgtttatgagctcatgcccaaacgatgtgttgtcgcaggttaaatatgcagaaacaggcgttgacgaacaagcgagtattcttttaaagaataaagaggaggaaatggcaactgttattctttcgcttcatgcaaaacagccaaagcgtggcacaatctcgtttgacaagggttatgttgaaatctttgaatatcccagaggtatggaggcgaagattacatatacggctgacggccattgtgaaacaatctcggcaggtcatacaaaggacgctttgctttatgaggttgaagatatggaaaaggcgatagagggcgacacggctcttatgcaccttgactacacaaaggatgttatgaaaatcatgaccgacatccgcaaaagctggggcatgaaatatcccgaagaagagtaagttttttgaatttaatttgatactaaacacaaaactccaccgtgaaa

SEQ ID NO: 1061 - DNA, 21236 bp, unidentified
  source 1..21236: mol_type = unassigned DNA
gaatcatcgatcagcaacagctttttatccttgatcaattcatgaacagcgatcagtttcatcttggcgatcaaattacgctggctctggatcgttggcataaatgaacgtggccatgtaggagtgtatttaataaatggtctggaaaatggaatgccggactcattggagtaaccgaccgcatgtgcgattccagaatccggtacacctgctacaatatccggtttgacattatcacgttttgccaagcatgcaccacaacgatagcgcatttcctcaacgctgactccctcataggaactggacggataaccatagtatacccataagaaggtgcagatcttcatatctttgcccggagcaactaacgttttgacgccctctgtggtaatgacgtcaatctctccaggaccaagttctttataatcatgatagcccaaattacgatacgcaaaatcctcaaacgtcacacaatacgcattttccttttgtccaattacgattggtgtacgtccatacttatctctggccgcataaattcctttcggcgtcagtagcatcaaagtcagagagccgtcgatcgtctcaagcgcataacgaataccatcgatcagattctccttttgattgatcagggcagctactaattctgttgcattaatgtcaccgccactcatctccaggaaatgtgcatggcccttatcaaaaatatcctgaacgatctcatcaatattattgatcttacttaccgttgtaattgcatacgttccgtgatgagaacgcacaatcaacggctgtggctcataatcggaaatacagccaattcccatatttcctttcatttcctgcacatctttgtcaaactttgtacgaaatggggagttctcgatattatggatcgaacgatcgaatccattctctccgtatactgctaagcctcctcgtctcgtacctaaatgtgaatgataatctgttccaaaaaacaggtcaaacaaacaatcttctttggacaccacaccaaaaaatccgcccataaaatgcctccatttctaaacacgtcttgtgtactttactaccgattccttattttcattgctggcatcttttgataccacacacagcactcattattttatcaattcatatagtcagttgcaagacctatttttaagaagcactacctaaccaatcctatcaaatatgcagattttctattccataaaaataacggcattgtatattgcttttgcaatatacaatgccgttatttttacttccagcgatatactaaacaaaatatattcctatatacgataatatcgaacggagagttcgacttgtttagcttgagtggagctgcggggagtcgaaccccggtccgaacccagattcaatgtacttctactgtcatagtcagtgttttaacattccctccaagcagcgcccactaacaggctatgctctttagtagcttcatagattttccgtcatcgcaaagctttgacaacggagtgtcccgcaggtatgacaccggctaccttagcggcggggcgctaagaccgatgagctgcgcttaggcagctaatgctaaattatcttcagcgtttaattttaaatcgaactttttacgtggtgtccgaccacggacagcttctccatctgcagtgagcccgtcgaaaccagtacaaccccttgttgtaaccggtagatgcgttatataaaacgctcaccaaaatgtttctgctaacattacattatgcaaatataacactttttataccatctgtcaagaatacatcgttccgttttgctctttcgttttgctctttttccaataattatgcgcttatttccttgacgatctgttttactgcttcctcatcccttttcggatctcaaacgaattatctttaatactatcaacccaaaaacgacagaaacaagttctttaccacttatctctgtcgtttactatgtacaacatttcgtacacgattcaatttctataaatgaatgaccaaattaaaactcaacatattttccttctgctttatcattgataacatagtatgctttacgctctaccggatcaatatatacacgcagggatttgatagctccaacacgatgaccctcagccttatatacctcatggatcttctcaataatggaagctgtcttaaactgctcaccattaaactcaacaaatacttcctgtattttctctaccggtttcttaacagttttctttctaggctttcttgtcttcttctctgccactttctcttctgccttctttactgtctctttcacagccggcttaacttctgccttagcagcaggcttttcctctgtcttcttaacaggtgccggtgctgcagctttcacctcaggtttcttagctgctactgccttcattgcagtctctacagatgtgtttttagctggtgctttggtctgtgttgctttcttaattgtcttagccatttttcttctccctttcataaataaatcaatcaaagaatttatacatttactaacgcttacaatggcaagtttatacccaacagagcgcagttgcaagggatttttaaaattttgttagttctgtatacttttttacttatttttgtcattttttattcaatttgcaatacaaaaataacgaattaagaaacatttttccaaagcacccgttaaagccttaacatttcactaatctttcatcttcggtttgaatatgagagaacccaaatatccaaaaattaacgctgcagatactcctactgcacatgcactaaatcctcccttaaataaaccaataaatccttctgcatctaccgctttttttactccttgatataggacatttccaaatccaagcaagggaaccgtcgcccctgctcctgcccatttggcaaatggctcgtacacaccgaccgccccaagtacagcgccgctgcataccaacagtaccataatccttcccggtaatagctttgtattatccattaatatttgcacaataacacatatcagaccgccaacaataaacgccaatatataatccaatgtgatacacctctttccactaattttgcattcaagatcatcaaaaataatgatttttttgtctatttttcatttcccattttcccactttacaaccgggatcttttcctctaattttttgttatttttgaccctttttatcaaataattaccattaatttattgtaatgttactcaaacttctcatgccttaaattttccacaaccacctattacttccgttatgggaagtttgagtcatgttaattagaaataagggtttccaatcttacggcgtgtgcaattcccggaatgctattaccttcgttaaaactgacgactgacagcaatgctcccgttggaacaaacaacactcgtttccattctccgatctccaactgtttcaacacatacccggcaagcatgaccgcactgcatccgcagccgctgccgcccgcctgtgcttgtgcatccctgccatatatctcaataccacaatcaatataacgatctgcaatatcatacccttctgaccgcaaaatgtcgattaaaatatctttgccaaccatccccagatctcctgtaatgatctggtcatactctgacggatctgttccgaaatctttgaaatgtgctgcgaccaccgatgcggctgcaggggccatacaggcacccatgttcatcgtatctttcacaccataatcaacgatctttccggtcgtaatcccggtaattttggccattccctgtttctgatcccctttacatatcacaacggctccacttcctgtcaccgtccaagtcgaggctttaggacgctgatttgcatagcctagcggaaaacgaaattgtttttcagcactggcaaaatggctggaagtcattgcaagtacataatctgcgaatccaccttctacaagcatagaaccgatcccgatggattctcccatcgttgaacaggctccatacacaccaaacaacggtttatcaaatcctgctaaaccaaaagaagacgccataagctgtcccaggagatcgcccgccacaatgtaacggattgcctctttaccacagcctgctttttgaatagcaagttctgcggcacgctcctgaagtctgccttctgcgtcttcccatgtatctccaccaaccttagggtctgactcgatctggtcaaatacatcaccaaatgggccatccccttccttttgccctactacagatgcagcagcgcaaatgatcggtggctcttcaaatttcacactttgtattccctgctgtttcttcaaacctacatcacacctttctctgttttcgctcaatgcagtattgccttacaattgcagatacccagctctttacaagaaagtatttccgatatagttttttttattcgagttttgctaacaacacgcgcttttttgtccctttatttatcctcatccatcaaattgctctcgtctccaaggtcaatctttttcatctttctgcgatagaagatatcgtagaataccggaacaataaacaatgtcataagcgttgcatacagcaatcctccgatcgttacgattgccataccacgagacatctgtgcactggtgtctgtgctaaataccatcgttgacatagcaagaactgtcgtaagcgccgtcattaagatcgggcgcatacgggtaaccccggtttccaccaatgcgtcttttttggatacgccatccagacgaagctggttgacataatctacaaacacaataccattgtttacaacgacaccggccaataccaagaatcccatcattgacataacagacaattcctcgcctgcgatcaaaaggccaagcaatccaccggtgaatgcaagcggtattgtaagcaacacgataaacggcgacaaaagtccttggaactgcgctaccatgatcagataaatgaataagatagcaagcgagatcataaggagcatgtttttcatcatctcattatttgtctcgctctcaccggagatcttcacatcgtagccatccagcgtttcgtatttgtcaatctgcttctgcagatcacggctaagcaatgttgcattttcgccatccttaaccgatgccgttaccgagatcatgtttgaaaggttttcacgttttaacgttgtcaggctcttcgcctctttcacatccgcaaattctttcagcttatgagtctctttcttctgcttgccctgatcgtccgttactgtcgtttcaaacttataggacagtaggttgttcgtctttaattcatcacgatcatcgacaagtttgaccttgtaatcctgatcatccaccgtgatcgttgtcgcttctttatccgtggataatttaccggacagctcttggaagacctgcgctaccgtaagtccatagcgcatcgccttatctttattcacactgacaacaagttcttttttgccctcttcctgcccattggtaatatcctcgtacttgtcagctttctcgagcattttcatcacatcttcgctgatcttttctagcttcgttgtgtccttgccgtaaatatcgacctgcacaccagatgccatcatactcgacatatccatatttgattcggatacagaataatcatccaacttcttcttgctcaggatcttttcgatcttagctgctatctctttattttgattagcatactcttcatccaaaatgatcattgcattaaaagacttgctggttccgccgcccgtcgaaatccccatcatggacgaattatctcccatcaatgctccaaccgtcttaacacctttgatcttacgcacttccccggcaatctcatctgacaatgcgtaatcctgctcggtcgatgttttttccggcatcgtataggaataggacatctgctcactgcccatttccggcataaatacaattcccatctgtgtcactttccaaacagaaaaaccaagtaaaaatacggcgatcaagattggaaccgctttccatttcaaacagaaccgcaaaatcttttcataagccacctgaacagcatggaagaatcgatgctttcgatttggctccttacgcaaaagtgtcgcacccattgttggtacaacagtcaacgcaacgatcaaacttgcactcaaactgtaagcgatcgtcaaacacatatcctgcatggtctgacgagtaataccatccgtaaagatgatcggcaggaatacgcagattgtcgtaagcgttgatgcaaaaatagcccctgccacttgattggctcccatcactgctgcacgtgccgctgaaactccttttcctcgtaatcgatagatattttcaatgacgacgatcgagttatcaaccagcataccaatacccaatgccaaaccggacaaagagatcatattcagcgttatgttcgtaaagtacataagcacaatggcaaacagtacgctaagcggaatgctgaaagcaacgactaccgtaggacggatatcctgtaaaaacaggaataatactacgattgctaataatgctccccacaacaagttagaaataacggagtcaacgatcattttgatataatcgccctgatccattaactttgtgaagtgcagaccatcgtatttctcttccagttccttcatgctcttggcacagtttttggacaccgtagacgttcctgctgtactcgctttggaaacaccaataatgatcgcatcgttaccatttaattttgcataagaatctgcactattgtttactactgttatatccgccacatcctgcaggcgaacatttccgatatctttcatatggcagagcagcgtctttttgagggcgtcaatgctcttatactgatctcctactttgagcaaatactgtgtcttatcttcattaatgtatcctgccggcatcgaaaagttttccgccgtcaaaatacctgccagtgtctccttcgtcaacatctgatcaagattcgcatttttgagcgcctctttcttggagttatggaaggatttcttcgcattatctaactccttttcactattttccaaagtcgactttgcggatgccatctgtgcattggcagaaccaaacgccgcggccgctgtgatcttaccggtttcaactttctcgtattgactctccgccttactgatagactttgtcacttgctttacgaccgcttgtgcggctgcgatctcagtctttaagttcgcaagctctgtatcgatctgcgggatacgagtttctacaatatcgtacagggatttcagactcttctttgtcatcgacttggcaatcttactctgtccctgtgttttgagcatgtttttgtaagccgtcaatttggacgtattgtcgatcgcgtccttgacactggttggcaatgcagctttctgcttcgctgcctgtgttgccgtcgcactttctgcctgtgttttggctgcttcttttagagtatctgcagcattaccaagctgtttcaaatacgtgtctacattgctgtccgtcactgtcacattaagaccggtctgtttcagcgtttcctgtaccattgtatttaagatctgcttgtaaatcgtcgtatacatcgcctgataagcagttccacccttggcaaaactattctgaattgtcgcaaatcctttgttcatctgctcatacgaggatactactttatttgtcgtataggctttcttctcaccatttaacgctgactgactcgcctttaagcttgcaagctgggattcgtacgcaacttttgtcgcaattgcctgattcatcatcttgctgaactttgcaagctgtgcagattgttttccctgttgctgcgacagtttcttctgctgagactctaactgttttttcccctcttgaagctttttgctgccatcatcaattttctttttggcatctgcgagtgccttgtctgtcttttccaacacacgggcattgacgtcatcaatcttatcctggtttaatacaacctcaattgattcctcaaccataccatttgtcgaaacacttgccacaccatcaccgcgctccagcgccggcaaaatattatcatccacaaacttggcaagttccacacggtctttgccctcataatcgacacttgccataaccgttgacatcatgtccatcgagatttccatgatcatcggctgtcccgctgtatccggaagttccaactgattgaccgccgaagacacttttaccatggcagcatccatattcgtatcatcctgaaactgcagcatgaccatactggaattttctgcagaattactggttactttttttacaccattcacagtaccaactgcactttccatcggttctgtaatgtccttttctaccttttccggggcagcccccacataggtcgtaatcaccatcatatatggcatattcatgtttggcagaaggtccgttgtcattttagaatagctgacacctccaagtaccaatacaataataacaccgaccaagatcaaaaatggtcttttcacactaaatttaggcatatctccgcctttctgttactgtaagattaaaatttatactgaatatccaacgcaccatctgcgaccgtcacgctcgctttgccaccactaatgatcggcagcatcggcggtaaatgtccgatatcgacatccataacgatcggcacttcatattgacgaagcatagaaactacagcttcatactgatccataccaaaagcctcttccccaaaggataacggtctcccgatcaaaaatccttttacgtgccggaaccagccggcatgcgataattgccacaatgttcgacgtatgctcataacattcagatcacatgcttccataaaccagatcaatccgtcctcttgatatctgtccgcaaattcttttaccttatcgtacttggtaccgactaaatttcctaagcagtctaaacatccaccgatcaaacgcccttccatacggatcggctgctctgcaggttcacagtgcaatacgaccggttccgtaacatgatacggctccagcggattatcctccgtctttaaggattccttttcccacaatggataactatgtatttcctgcttgttgccacgtaacagatcatacgcatcctgtattgccggatgccatgttctcataccaaacgccggtgcacaaggtccgtaaatcgcggcagtatcacaaagcgttggaagcaaaaatgtaagattcgtattgtccgaatatcccatgtaccacttaggcggcaatgcagcgatccgttcaaagtcaatataatccaacacttcacacattaattcgccaccaccacaggaaagcagcacatctacttcctgctttgcaaaaaatgtattgatctcctctccacattttggcggtgtattgctaatcccaattccactgccttcgtagcagttcgggcctagtatcatggtatgccccaatgccgcaaacgttttctgcgcagcatcaaacccactccggtaaggttccatattacagccaaaggccggtgcaacaaaaccaatcgtcccggacgcttccaaaaatttcggtattctcatttgttctctccctttttcggaacttcatgaaacgcttctttgcttaatttatcataacaacgatacatcgtctgtacagaattttccaaaatataataatgtctgatataagggatcagcagcacaagcaggagacactccagtccaaaaaatggcacagaaggggccactgcgcatatgccaaaggtcactaccgccaatagcgcaaaagtgaccgtgacgatcaaatggatcaggcgttcatgctgaaaaaatccaatctgcacaagcacctgctcacatatttttttccgttcttcatcatcgtattctttgatgtaaatacctttcagataagagacatattgtataattcgctgttccatcgcaaagcctccctgctttaatcctgatattctttcaccagtactgttgcattatgcccaccaaaacctaatgaattgctgattgcaatatgcaccggcgtatgaatgccttcaccctttgtataatccagatcgcactccgggtcatcctcgagcagaccgaccgtcggatgaatatatccttcattgatcgatttgacacaggtgatcaattctacggcaccaccgcctgcaaacatatgaccgatcatggatttcgtggaattgatgtgtactttatatgcactatctccaaaagcgagcttaattgctctcgtctcgaataagtcattgtattttgtgcttgttccatgtgcattaatataatccacttcttccggagccacaccggcatcctgcatcgccagcgtcattgcacgtgcggctgcagagccatcctccagcggagtcgtaacatgatgcgcatcgcaagttgccccgtatccaccaatctctgcataaatatgtgcgcctcttgctttggcatgctctaattcttctaatacaaaaataccggcaccttctccggtaacaaatccattacgacgcttgtcaaacggaatggatgcagctgtcggatcttcggaatcggtcaatgcagtgagtgcctgaaatgctgcaacaccaaaacgacttaccgaactatcaacgcctcccgctaggatcacgtctgcctctccatgctgtatagagcgaaatgcctctccgatcgagttggttccggttgcacaggcagtcactacatcaatgcattttccctgaaagccatgatacatagcgacactggctgctgccatatttcccaagaccaatggggctgtaagcggatgtatccttcccggtcccttggctaacatcttatcgtattcacgttcaattcccatgagacttcccacgccggatccaacacaaacgcccagtctgtaggagtcttcttcctctatgttaagaccactatcctgcatcgcctcaatggaagctgtcactgccatctgactaaaacgatccattcgtttggcagcttttggttcaatatacgcttttggatcaaaatctattacttctgccgataactttgctttatactgtgtcgtatcaaagttttggatcggtcctataccaacctttccttccaaaacagactcccaaaatttctctactgtaattccgattggcgtcacagcacccatacctgttacaactactcgcttcatttcataaccaacccttcctatatttatttcacaaaaaggcaaagcaggcgctttgctttacaagaattgctaaagcaattcttggtgatatcacactacataacagcagtttcttattcatgtacaaaaatccactataacaagaaccttactcattatagtggatttattctttgaaatgcaacgcatttcacgttaattttatagaatcttaataactcaaacttatcgtcatctctcatgttcctacacgaactatgatataatgagcctcagagaaaaacaagcggctgcgaagcagacatttgtttttctgggctcattaacgagcaaataagcttgtgtaacaagcgaataagctctgaaggagcggatttgcgagtttaataaccttcaatccacaatatacaggcagatccacgatgctacaaattggaagtcataacaaaaggaagaagacctaccctttcgggtagtttacgaatggatagaatctccatatgatagatgtgaaaagagtattgtttattgcggagatgaacgaaatcgtaaaaagtttcaaacatatggattgaatataaatgcaaaataagtacgtggtttgactcggccaatcagtaataaggaagtaattcggactctttgcgtcagtttgggtgtagagtttccgtcagaacaggaacagctgaagaaagcagatgttcgaaaacacattttatttattgatgataatccacagtttgctgcgatacccgtggtgttcttgtctagtatagccaagaaagaacatatcaaggaaatactgcagctacagccggcgggatatattttgaaaccggctgacaaagagcggattttgaatatgatcacacaaacattaggaaaataagaaacagagagtcttaaaaagtggggtcttcttatgatgggtatttctctgtccggcagaaatcgctatgatatttgatcaaacacgggcagactttccatcacctcaataattggcgaatacacggtattctttgaatcgtcctcttcaaaatgataagcacgattcttcgtttttttagcttgttccctcgtatccggaagtctgctgtagtggctgtcctgacgatattctttggccgtctcctgtaatcctgccagcatatattctctgtccggatctttatcactgactgcactcatttccattgcgatcacatcgtttgcttcctctttggaacgacaatgttccaaacgtgtctgcaaacgttccttagcattctgaacccgcaatgccttttgatacatcgttggattatgaatctgcaaataattcatctctgccgaagacaagcgtttcccctgttttagcttttgaaaaatcttctgctcgtattgtgccctctcttcatcgctcatctgagatgttggatccatcaattccgacactgcctttttacatatatcctgaatgcgttcccgcaatgccgtcttctcatcctgcgacaaaatttctttactattcgtaatcatcggaaaaatcctccccatcaaaaaataaccgataccaataccgcgtgatcttccacgcaatattaatatcggctatttccgcctattccttaagaacaggtatcatcacattaaaaattactgctttataaactcctctaaaaaccactgatgaatgcggtggtctccacccagttccggatgaaaggctactgcaagctgcttgccatagcgaacaccgacaatgcggccatccacctcagcgagcacctctactccatcactaacactctccacatatggtgcacgaataaattccatcggaaaggttccgattccgacaaactcgccttccgcataatgaaagcttccaagctgtcttccatatgcatttctcttcaccgtcaccggtaatgttccaaaatgaacggtatcgtctccagcgatatgttctgccaaaaggatcagaccggcacaggttgccaataccggaagtcctgctgcgatctttgcgcgcagcggctcatacatatctaactcccgtaaaagtttaccctgaacggtactctcaccgcccggaagcaccaatgcatcaaacgaatcctctaagtcttttgcctgacgtaattggatcgtctgcgccccaagctcctgcaacactttttcatgttcctcaaacgcaccctgtactgccaacactgcaactttcatactaatcttacattcctttctctgcactaacagtgagtatataacccaaacctcccataccgaaaaatatgatcaaactacatattacttataatgagaagtttgagtcaagtatattatttgcctcgctcagccattaataattcaatctcgtcttcattaataccaaccatagcttctccaagatcctcagaaagttctgcgatcatcttcgcatcggtataatttgtaactgcttttacgatcgcatttgcacgcttctccggattaccggacttaaagataccggatcctacaaagacgccttctgcaccaagctgcatcatcaatgcggcatctgcaggagttgcaacaccacctgctgcaaagtttacaaccggcagtctcttgtgctcatgtacatactgaaccagctcatatggtacacgaagttgtttggcttcatcaaacagttcatcctcacgcatagcggaaatcttagcaattgcactgttcatcatacgcatatgacgcactgcctgaacaacatcaccggttcccggctcacccttggtacggatcatggaagctccctcgttgatacggcgaagtgcctctcctaaatccttagcgccacatacaaacggaacgcggaactttgtcttgtcaatatggtaaacatcatctgccggagaaagtacctcactctcatcaatgtaatcaatttcaattgcctctaataactgcgcctctacaaaatgaccgatacggcattttgccataaccggaatagatactgcttcctgaataccacggatcattttcggatcactcatacgtgatacacctccggctgcacgaatatctgccgggattctctccaatgccataacagcacacgcacctgctgcctcagcaatctttgcctgctccggagtcgtaacatccatgatcacgccaccttttaacatctgtgccaattctttgtttaattcatactgtctgctcatactatcctcatttctgcacacattttcaaacgtttcaatattgtatcaagtgtgcacagacacaatattctcataacaccattttctttactcaagcctcagacagcagctccggctgtgcgaagtttgatttctttacacaaggcatcccgacaaaacttatcggaattatttgcaaatgtaactgaagtaaagtatactataatctgactatgtgaaaatatccaatttaaccatagtcagtatagtcagtttggaggatataataccaatgcttacatattcatttactaatatagggtcagatagcctgtaccatcatctgtaccaatgtatccgcgaggatattttatgcggtaatctgaccgccgagacaaagctgccatcaaagcgtagttttgccaaaaatctaggggttagcaatattaccgtagaaaatgcctacgcccagcttcaagccgaaggatacatttactccattcccaagaaagggttttatgtcagaaatttatctgaccttactctctccatatcgcaaacaacatcttccacttcgaacagtctacgtatgcccgataaatataaggtggatcttgccagcaaccaaatgaatccggagcaatttccattttctgtctggtctaaactgatccgcgagactcttctcaaccgtcacgtggaactgatgcagacacctccttggggtggcgtatgggatcttcgtcacgccatctgctcacagctcaaagattttcgaggtatggacgtgacaccggagcagatcattatcggtgccggaaccgagtatctatacggtcttctgattcaattattcggtcaggacaaagtctacgcagttgagaatcccggctaccataagattgcgaaaatatatgaaaatagccgtgtcaaatatcgctatataccgatcagtgctaagggtatcgatgcactggaattagaatcttccggagcacaaattgtacatctgtcaccgtcccaccattttccgaccggcatcgtcactccgatcgggacccgctatgaactgttggcttgggcaaccaggcagccgggccggtatatcattgaagatgattatgattcagaatttcgattatccggcaagcctatcccaacgctgcaaagtatcgaccaatcagaacgtgtcatttatatgaacacctttaccaaaagcctttcttcaaccatacgaatcagctatatggtattgcctaaacatttgctggaacagtttgcaaaacgcctgtccttttactcttgtaccgtatccaactttgagcagtatacgttggcacgttttattgaagaccgttatttcgaaaaacatattaaccgtatgcgtacttattatcgcaaaatacgtgacgaactgctggatgccattgctaatagcgcacttgccgcacattgcaatatcgcagaagaagattcaggacttcactttctgctgcatattgatacctcactcccagatgatgctttgtctgcaaaagcaaaagaatatggtcttcacctatcttttttgtccgaatattatgaaaaaggaagccctaatattccggcacatacactgatcattaattattccggcctgaccagcgaaaaaatccctcaagtgatcacactgctatccaagtgtattctcacttaagggatctgaaaagatggtttgctattttgccgccattttactctggcagcaaatgcggattgacgttcaccacaccttgcttactccgacagcaaatgcggattgacgtgcaccataacatgctttacctttgggaaattgcgttctatcgcgtcatgtacatgttctgcgatctcatgtgcctcaaataacgtttttctgccatctgcactgatctcaatatcaacatagatcttatttccaaacacacgagtacgcataatatcaacatgaagcacaccttcttctctacaggcacactcccgaagctcattctccaatacatcatcacaggcatgatcaaccattttgtccgttgcgtccataaaaatatcatacgctgcctttacaataaacaaacagattactacactggcaatagaatcaagaaccggaaatcctaaacgtgctccaacaataccaatcaaagcaccaacagaagaaaatgcatccgatcgatgatgccaggcatccgccatcagtgctccggaatccacacgtttcgcatgatatttagtatactgaaacattgcttctttcgaaataatagacaatattgccgctgctgctgcaagcagtcccggcgtctgcaaatgtgcataatctcccgctataatatttttgacagctccatagccaattccaataccggtaaggcacaaaatatttgcaagcagaagtgccgcaatgcactccaaccgttcatgtccatatggatgctccttatcagaagcctgtgcagacaacttcactccaacgatcacaataatactgctaaacacatccgatgcagaatgaaccgcatcactgaccatcgctccggaatgagcgatcacaccggctagcaatttgatcaatgacaatattgtattgccaaaaatacttacaatgcacacccgcattgctactgtttccatattgtctttgttgttttgattgctcataataacctctccaataaaaaataaaaaagcaaagccagcgctttgctttgcaagaattgctaaagcaattcttggtggcaccacgctacataacagcaatttcctattaactaaaaaacatccgcgaagaaccagtaatactactgtcccgcggataaaacaattcattccactgtcacgttgtgacccggccccagataagatatccggcctgttcagtttgtactgtagctaaatgcagtgcaaagagttttcgtagccactccataattgaagttctatatattatatgtacgttatcattaaaagtcaacactaatctttcttatacaaaacaaatctttcttatataaaacaaacccctctcgtctcgccaaaatgttctttgacgaaacgagagaagttagtatgattgcgattatttagacagcctgctttttccggttgcgtagtcgatcgtaacgcccggctgcacattataaacgaatacatggaaacatattcccttacctttatcttccacagaataagcttccatctcgactccttctgccactagattatcacccttaaaaacaggggtaacacgatacaaaacatggtgatctgtatctttgacataatctgccacttcatcctcaaaaggaagcattccatctacatttaaatatctagtccccgtgatcagattttttttgtttgcattttcacctgccaattgaaatccgatcaaatgacagcggttatacaaatatttgccatccacgacatcgtatttaacagtgttccatccactaggctttaccataccgatcgcaccacgtttctccgtcggcataagctctttgcatatattggcataagctgtgccacaacgtcccaatgcatccagacgatgataattctcaaatgctttggtgttgttttttcacgggtggtgaaattcggaacattatcattcagttccacatagggttccccgttgtacgccgcatgatcttttaaattatctaaagactgcgttgcactgtcggaacctttcccatccgcatcttttgccgaggaactttctccttctgagcgatctttctgtggcgcggttgtctttaacacctctttcgccgcatatttagcaaccttaacaacctctgtagaggagcaaccgcaaagtgctgtcatcagtcccaaaatacatccaagacgaatcacccactgcattcttttgtttgttctattttccatatccgtaacctcgtccgtaagactttacaaccacttataaatctcttaaatacctaataactcttctgcgtgtttcacctcttcctgggtcggtggattaacgcctttcagcggataatcaattccaagctgttcccatttaaatacacccagtgtatgatacggcaaaatttctacgcgctctaccgtctttaatgtttggataaattcccgcatttcaatcagatatttatcctgactgttatcccccgggatgagcacatgacggatccacattggctgccccatatccgacatctctcttgccatctctttgatattttccccggtttgtccggtaagtgtctgatgtaccttctcatcaatgtgcttaatatccagcataacaagatctgttacttccatcaattttttccacttagaataaaacggctcttctctggtaaacggatttccacttgtatcaagcgtcgtatgaatccccttttctttcgccaaagtaaatatctctgtcagaaagtcgatctgcaaaagcggttctccgccactaatggtgatccccccgtctttgccccaataattgcgatagcgccaagccttgtcaattaattctttggcagtatatagcgttcccttttgcatatcccacgtatccggattatggcaaaactgacaacgcattgcgcagccactcaaaaaaataatatatcgcacaccgggaccatctgcagatccaaaactctctaatgaatgtacataaccttttgtttgttccatcgttttctttcctttctaagtccacttctgtagcagaaaaggagcagccctttatagaaaagactgccccatatttctttggtttatacagatcatacatgccgaaaacattcacaaagatgaatatttcatcgcatatgccgtcgcattctcaagtcattttgaaaatgtgcttcgctgtaacttacagagactcatgacatgttctggcaattacatcgagctgctgctctcttgtcaagtcgataaacttaactgcataaccggacacgcggatcgtgaagtttgcatactcttctttctccggatgctccatagcgtcgatcagcttctctttgccaaacacattgacattcagatgatgtgcaccctgatcgaagtatccatccataacctgaacaagattctttatacgctcatccggattgtgtcccaatgcatccgggttaatcgtctgcgtattagaaataccatctaatgcttcctcatatggcaattttgctacagagttcaaggatgccagcaaaccattctgctcagcaccatatgcagggttagcacctggtgaaagtggctctcctgcttttcttccatccggaagggaaccggttgccttaccatatacaacgttagaagtaattgtaaggattgatgtggtaggctcagagtcacggtaagtgtggcagttacgaagctttctcatgaactcacgaagcagccatactgcaatctcgtctgcacgctcatcatcgttaccatatctagggaaatccccatcgatctcataatctacggctaatccatcctcatcacggatcacttttaccttagcatacttgatagctgacagagaatctacaacgtgtgagaaacctgcaataccggtagcaaatgttcttcttacatcggtatcgataagtgccatctgagatgcctcgtagtaatatttatcatgcatataatggatcatgttcaatgtctctacataagtctgtgcgagccatgtcatcatctcatcatatttttccataacttcatcgtaatcaagatactcggatgtgatcggacgatacttcggtccaacctgctccttggtcttctcatcaacaccaccgttgatcgcataaagcaagcacttagcaaggtttgctctagcaccgaagaactggatctctttacctgtctctgttgcagatacacagcagcatacagaataatcatcgccccataccggacgcataacatcgtcattctcgtactgtacggaacttgttgcaatagaaatatgagctgcatatttcttgaatgcttccggcaagttagaggaatacaatactgttaagttaggctctggagaaggtcccatgttctctaacgtatgcaggaaacggaaacatgtcttcgtaacctgagaacgtccatccataccaataccagctacatctacagtagcccatacaggatctccggagaacaactggttataagactcaatacgagcgaacttaaccatacggaatttcatcgtaatatgatctactaattcctgtgcctctttctctgtcaatacaccgtttgccatatctctctcaatataaatatccaagaaagtagatacacgacctacggacattgctgcaccgttctgcgtcttgatcgctgcaagatatgcaaaatataaccactgaaatgcttcttttgcattcttagccggtcttgaaatatcaaaaccataaatctcaccaagagctttcatatcttttaagcatttgatctgctcagccagctcttcgcggatacgataatctttactacgcattgcacgacgctctgtaccggcaaaatctttctgcttctcttcaatcaggtaatccataccgtaaagggcaacacgacgataatcgccaacgatacgtccacgaccatacgtatccggaagacccgttaagatcttgttatgacgcatacgcttcatctccggtgtatatacctcaaagacagcgtcactgtgcgttttatgatattttgtaaagatctcatgcagtttcgggcttggctcataaccatacatctgacaggactgctctgccatacgaataccaccataaggcatgaacgcacgt

SEQ ID NO: 1062 - DNA, 33064 bp, unidentified
  source 1..33064: mol_type = unassigned DNA
cgacaatcaccggcgcagtcattgacagcagacaggtgaaggagggctatctttttatcccgataaagggagaaagggtggacggacacaaattcattccgactgtgtttgagcagggggcggcaattgtgctctctgagcatgagcttaaggatccggcaggcccatatgtgcttgttgaatcaaccaccgatgccatgaaaaagctcgcggcattttacagaaaaagccttgatatcaaggtggtgggtatcaccggaagtgtcggcaagaccagcaccaaggagatgatatcatcagttcttgagcagaaatacagcgtccacaagaccgcaggcaatttcaacaacgagataggcctgccactcaccattttcggaatcagggaaagccatcaggtagcggtgctcgagatgggcatatctgattttggcgagatgcacagactttctactatgtcttgcccggatgtcatggtcatcaccaatatcggctactgccatctggagtttttgggcgacagggatggtgtgcttaaagcaaagacagagtgctttgagcatatgatgccggatgcggtcgcagtgctgaatgcagatgacgataagctggccacagtgcagacggtaaatggaaagcctgccatatactatggcaaggaatcagcttcaggcgttcataaatcagtatataccacaaatattgaaaacctgggctttgacggcatgaaggctcattttgtcactccggagggtgagttcgatgcacacatccacatccctggagagcacaatgtatacaatgccatggcggcagcggctgtcggattgcagcttggtctcacaatagctgagattaaatcaggaatcgagaaagcagagacaatcgcagggcgtaccaatttcatcaaaatgcatggcatgacagtgatagatgactgctacaatgcaaatcctgtatccatgaaatcctctatcgaggtgctttcacatgcaaagggcaggacaatagcagtgcttggcgacatgggcgagcttggaagcgatgagaaaaagctgcaccatgaggtaggcgaagcagttggagagaatcatatccatacactttttgccgcaggagagcttgcaaaggaatatgcagccggagccacagagaaatcgtccgatgtggacatccactatttcgaggatagggagaccatgacacaggagcttctttcatatgtgaaggagggcgacaccatactggtgaaggcatcgcacttcatggagtttccgaaggttgtcgaggcactgagtaagtaaaatcaggtaaaatcaatcgggtagaaaataattcgatatttaattattgcgaggaatggatattctccaagcctcataatattataaaagaaagagagaaaaataatggcacagaatccaatcgtaacaatcacaatggaaaacggcgatgtaatcaaggcggagctttatccggaaatcgcaccaaacacagtaaacaactttatcagcttaatcaatcacaatttctatgacggagtatgcttccaccgtgtaatcaagggcttcatgctccagggcggagatccggacggaaacggcacaggcggcccaggctatgaaatcaagggcgagttcacacacaacggcttcaaaaatgacttgaagcacacagccggtgtactttcaatggcacgtaccatgatacctgattcagcaggcagccagttcttcatcatgcatcaggatgcaccacatctcgacggcgagtatgcggcattcggtaaggtaatcgagggcatggatgtggtaaacaagatcgcagaggtgcgcacagactacatggacaaaccacttgaggctcaggtcatgaagacagttacagttgagaccttcggagtggactatccggagccggagacagtttaatgatagtaattattgatgaggcaagcgcaaaacttgcctctttttactatcatggagatagcttcaagccacagtggagaaatgtggcaggcaaggcacctatgtcagaagagctgcaagaaaaactgtatgttgcgctaccggctgatgaatcaattaatgacttccaaaaaacaacgatacaagaatctgcagataacaccgcgaaagctaatacgggaaatctaagaataccgaaagctcccgccaactacatctggatagtatcaaacaggcagcagaagcaaatagctgactcactcggcatagcatcagtaggagaaccgcagtgcggcacgcgctatgcagtcgggagccttgcagagattgatattgagtatctggagcgggtgcgcaggcggtataatcacatcccgtgggacatcggcgagacagacagatgtctgatacgtgagctgtccctgtcagaccttcctgcgctctatgagctctatgacaagcccggcatgaccgactttgtggaaccgctttacgactacgagacagagcttgaataccagaaagcatatatagagaacatgtatggcttttacgagtatggtatgtggcttgtattttccaaggaaacagggaagctgataggcagggcagggcttgagcatgatgaactgggctatatgatagcgccggaattatggaaccaaggctatgctacggaggtatgccgcttcatcatagactacgcgcgcgaaaacacagactttgaagagctttactgccggatagacgagagaaatacagcatcggtgcgccttgccaaaaagcttggatttacaaatagcgggcatatggatgatgatataaacgcttctatatatagaaaaaacataaaaaacaatgaaaaacattgaaaaatatgcaattaggcaataaaatataaacatagtttaacgatttggaggacgaaaaaatgaagaaatatgcatatggagtagatataggtggaacaactgtaaagatgggctttttcgagacaacaggaaagcttgtcgatacatgggagattcctacacgcacagagaattccggcgagcttatcctgcctgatatcgcagcatcaatcaaggagaataacgagaagcatggcatagagatgggtgacatcgagggtgtaggcatgggagttccgggacctataaaggatgacggaacagtattgaagtgtgtcaacctcggctggggcgtgttcaacgtggcacagtcactctcagtactgtgcggcggcatcaaggtaaaggccggaaacgatgccaacgtagctgcactcggtgagatgtggcagggtggcggaaagggccatcaggatgtagtcatgatcacactcggcacaggcgtaggcggaggaatcatccgcgagggcagaatcgtagccggaataaacggagcaggcggagagataggacatatgcctatggtagatgatgagtcagagtgctgtggctgcggcaagaagggctgcttagagcagtatgcatcagcaaacggtctcgtaagagtggcagagagatacattgcagcacacagggatgtggcaacaaagcttgatttaaatgcaggtttcacagccaaggatgtatgcgatgcggcaaaggcaggagatgcagcgggcattgcggcagtagagcagtctatgaagcttctcggcaaggcaatggcagcagtagcatgcgtcatggaccctgaggtatttgttgtcggcggaggcctttcaaaggcaggcagcatcatcatcgatacagcagcaaagtactataaagagtatgctttccatgcaagccgcgagacagagatcaagcttgccacactcggcaactcagcaggcatgtatggcggagtaaagatggttatcggctaacaacataagattgcaatttttaaagaaataaaatataatggctactaaagatacactacaatcgaggtgagactattggcagattactcaacagaagaattagaaaaaatagcggacaaatttcgctcagataccagcggtataaggggaacaaaggattttacgagccctgaggagctttatgatgagctgaaaaaggaaatcaaaaagtatcatccgtcggatgacacgagccttgtggacaaagcctacagggtagcttatgatgcccataaggggcaggtacgtaagtcgggagagccttatatcatacatccgctttgtgttgccatagtactcgccgagctcgagctggataaggaaaccattgcagcaggactgctccatgatgtgctggaggataccatcatgaccatggatgagatgcgtgcggagtttggagacgatgtcgcacatctggtggatggtgtcacgaagttaaagcacctgcatctgacagacagcaccaaggatccgaaggacaagaatgcggacaggcttgagatgcaggctgagaatctgcgcaagatgtttctcgccatggcaaaggatatcagagtcatcctcataaagctggcagacagactgcacaatatgcgtacgctcaagtaccagtcaaaggaggcacagcagcgtatcgccagagagacacaggatatctactgtcctatcgcgcagcgacttggtatcagcaagataaagatagagctcgaggacctttgtatgaagtacctctatccggatgcatattacgatctggtagagaaggtagcactcagaaagacagagcgcgacacttacatccagggtctggtaaacgatgtcaagaagtatgtttcggatgccggtatcaaggcagagatatacggcagggcaaagcatttcttcagtatatataagaagatggtcaatcaggacaagacgatagaccagatatatgacctctttgccatcaggattcttgtggataccataccggattgctacgcggtgcttggtatcatacatgagaagtataagcctataccgggccgtttcaaggactatattgccatgccgaagcagaacatgtaccagtcgcttcacacgacactcataggtccgagcggacagccgtttgagatacagatacgtacctatgagatgcatcgtacagctgagtacggtatcgcagcgcactggaagtacaaggaagcaaacaacggcaatgccactaccaccactgtcacagaggaggagaagctcagctggctgcgccagatactcgagtggcagcaggatatgtcggataataaggagtttatgactttattaaagagcgatttaaatttattctccgacaatgtatttgcattcacaccgtccggcgatgtaaagaacctgccaaagggctccacacctatagactttgcctacagcatacactctgcggtcggcaacaagatggtcggtgccaaggtaaacggcaagctggtgccgatagactatgtcatcaaaaacggtgaccagatagagataatcacctcacagaactccaagggaccaagccgtgactggctcaaggttgtaaagagcacacaggccaagaacaagatcaaccagtggttcagaagtgagctcaaggaggagaatatacagcacggcaaggatctgatagcagcctatgccaaggcaaagggcatcaactttgctgagataaacaagcctgagtatcaggagaaaatacgccgcaaatacggcttccacgactggaactcatgccttgcaaccgtcggccacggcggactcaaggagagccagatagtcaacaggatgtacgacgagtacaagaaggatcatgtggtgccggtgacagatgcagatgtgcttggcagcattgcagaaaagcagcaggcggcagcaggcacacagcccgagcacaagtcaaagagcggcattgtggtacacggactctatgacgtggcagtacacttctcaaagtgctgcaatccggttccgggagacgaaatcgttggctttgtcacgagaggccgaggaatctccatccacaggacagactgcgtgaatattatcaatctgtccaagatagaaaaggacaggcttatagaagcagagtggcaggatacagccctcatggacaatggtgccgagtatcaggcagacctaaagatattctgtcatgacaggccgggactgctcgtagatatcacaaagatatttaccgagaaggaaatcaatatcagtggtatccagtccaagaccagcaagcagggcatcgctacaatcgaggtatttttcaatatcaaaggcagggaccagataaaggttctagtggagaagctcagacagatagaaagtgtaatagacgtagagaggaccaccggctaaatcccggtggttcttgcgtgaagcataacatataacagacaaggagtacactcatatggtaaatatgaagatagaccacttcgtagtgggaccggtgcagaccaactgctactttgtcaccaatataaagacaaaggaaatgataataatagacccgggcgcgtgtgcggatcagctcgccaaaaaggtggacgagtcaggcgcaaagccagtagcaatactgctcacacacggacactttgaccatgccactgatgcaaagccgctcgcagaccgctacggcatcaagatatatatccatgaggcagacaaagccacactcgacgacccgcagcttaatgtcagctacatgatggggcagtcaaagaccttttatgcggatgtatttttgaaggataagcaggaaattgatattgcgggctttcacatagtagtgcttcacacaccggggcatacaccgggtggctgctgctattatttcccgtatgaggacgtgatctttacaggagactcactgttttgcggctcaatcggacgtacggatttcaagggcggcagcatgtcagacctcgtgcgcacagtgaaggaaaaaatcatgacactgcctgagcatacagaggtgtacccgggccacaacgacacaacaaccatagaaaacgagaggatgtataacccttacttatgatagtagtagtatttaataaaccggattttgaatatgatgtgcactcactgctcaaagagtttttcccacaggaggacgtgcagatgtactatagctgcccacctgatgaggtggaggggaaaaacctggcctgcacacatcacgagatgacagatgatggcgtaaaggaatttgcggatgcctcacaggtatttaagatagactatgtgggcgatgaaattgcagtggagtggacggtgaatagagccggaaaaagaatctgcacaaaaatatccgtagacagtgcagaccgcaaggaaactaaaaaccgccttaagctcgccctgtattccatgatagaaaagggcacaggaaagagtcttccgtggggcacactctcaggcatcagaccgaccaagatagccatgaaatgcatagaggacggcatgagcgataaggaaacctacgactatctgaaggaaacctacctcgcaagcgatgagaaaatcgacctctcaataggcatagcaaagcgtgagaaggcactgctcgacagggtggactatgacaacggctacagcctgtacataggcataccattctgcccgagcacctgtgcatactgctcgtttacgtcatacccgctgggtgtgtggaaaaaccgcgtagacgattacctcgatgcactcgagaaggagatagactacacggcacagaaattctaccacaagaagctaaactccatctacataggaggcggcacaccgaccacactaagccctgcgcagcttgacaggcttatcagaaaaatcaaatgcagctttgatttaaaggactgcctggaatttaccgtggaggcaggcagaccggactccatcacgagagaaaagcttatggcactgaagaaaaacggcatcagccgtatatcagtaaatccgcagaccatgaagcagcagactctcgatataataggaagacaccacacggtagacgatacgataaatagcttcaagctcgcgcgtgagctgggctttgacaacataaacatggacctcatcatgggacttcccgaggagacactcgatgatgtaaggcacacaatggagctggtgaaggagatggcacctgacaacgtcaccatccattcactcgcagtaaagcgagctgcaagactcaccatcttcaaggaccgctacagtgatatgcagatggtcaacacccaggagcatatggatctctgcgcagcctactgtaagcagatggggcttgagccatactacctctacagacagaagggcatggcaggtaacatggagaatgtgggctatgcggcaaagggcaaggccggcgtatacaacatattgataatggaggaaaagcagactattgtggcgtgcggagcaggagcaagcaccaagcgtgtctggcccgtaccgaatccggatggcacacaccgcattgacagatgcgagaatgtcaaggatgtagggcagtatatcgcaaggattgatgagatgatagagaggaagcagaggctgtttgaggaaaaataagcagtatgatatataataatgtataatattggtgctgtaataccatagtgattagcgaatgtgtcaaaaattataaagaaaacctaatattcattgacatagaattaaaaatgagtgaaaataaattactgaaaaaccctgattagatacagaaaaagatacaaataaccgaataaaacaaaacaggctaaaataattcgagggaggacaaaggtacctcccccgtagtaggtataggggtagcatttcttcaatatactagtgggagatatgagccttgtgggcacaagaccaccaacactcgatgagtgggagaagtatgaaccacatcacagagccagaatgtcattcagaccgggactgaccgggttgtggcaggtgagtggcagaagcaatatcacggactttgaggattatttttaagactgttgtaagtattatgcaaagtgatggggcaatatagaaaaccatcacattgggaaatcctatccatacggatgtgtacataaaaaatcttgggatgaaggagatcagaggacatgaaagtatgtttagttggttcgtcaggaggacacctgacacatttatatatgttaaagccattttggaaggacaaagatcatttctgggtcacttttgataaggaggatgcaagaagccggctcgaaggtgaaaaaatgtatccttgttattatccgacaaaccggagtctaaaggctcttattaagaataccaagattgcatggaatgtgttacataaggaaaagccagacttgattatttcctgcggtgcagcagttgcggtcccgtttttttatattggtaaaatgatgggcgcaaagttggtttacatcgaggtttttgatcgaattgataaaccgacaatgacaggaaagatggtttaccccattgtggacaagtttgttgtgcagtgggaagagcagaaaaaggtttatccaaaggcggttaaccttggaagtatattctaagtagatgacgagaaaatgatttttgtgacggtaggaacacatgagcagccatttaatcggctgattcagaaaatagatgaattaaagaaagacggcattataaacgaagatgtaattatccagactggatttagtacatacgagccgaaatactgtcagtggagtaagttgattccatatcagcagatggtgaaaaatgtggccgacgcccgtattgtaatcactcacggtggtccggcaagttttatcatgccactacaaataggtaagactcctattgttgtgccgcgtcagcaccagttcaacgagcatgtaaataatcatcaggttgagtttgcaaggaatgtggctcagagaatgggaacgattattccagtggaggacattaatacactgggagatatcataacgaactatgatcagattgttgccgacatgggacatggtatgagtagtaataatgccaagtttaatgagaaacttgaaaaactggtagacgatttgtttggtggggaaaactgatgaaagaattactaataatggcaaagtcactaggtggcggcggatctgaagtggctttgatagaattaattaatgcacttcccgaagaactttacaatataacacttgtattgcttgattcggacaatgaatatgcttaccgtctaaaaaagaatgttaatattgttcagttgacttttaatagttcttttgcaaaatcactggtttcaatgtatgcttttccggcaaaggtattgaaaaaattatcggttaactcatttattgcatattatgattttatttcgaattgtgtgacgaacgtttttgaaaagacttatgacattgctattgacttctatggatatggttcatttgtgacagctttcttggcgacgaaaatacaagcaaagaaaaaggcaacatggcttcatgatgaaaaaccatactggatgaaaagcgttcaaaaatacttatgcgaatatgacaagatttatggcgtgtcccaggcagttgttgatgcattttgtagagagtatccgcattataaagataaggctgccgtattttataatgtaattgatattgaagaaatcaagcgaaagtctgaacaagatgagataataccgttcaaggaaagctttaatattgtaactgttggtcgattgacagaacagaaaggctatgacattgctataaaagcagcaagcattttgaagaagaggaaaatcaattttgcatggtatgctattggtggtggcagagatgaaaaaaagctaaagaaattagtagagaagtactgtctggaaaatcaatttgtgtttcttggtcgtaaaaaaaatccatacccatatatgaagcactgcgatttatatgttcaaccatctcgccacgaggggtatgtaattactttggtagaggcacgtgcattatgtttgccaattctgtcttcggacattccttcagcaagagagcagatacaagatggtatcaatggatacgttgctgaactgagtgcggaagatctggcagataaaattgagtatttatataacaatccttctcaaaggaaaaagactgttgagtatttgaaagaacatccgattgatttctctacggagttactaaagctagaaattatttgaaaagagattgtttatgagaaaatttaaagtagtaatgataacttcatactttgatagaaatggagtaacatcccaagtaataaattatgctacaaacttggacaaaaataaatttcaggtagcgattgccgctggagagccttatgacatcggctatgaaaaagcatgtcaagagaataacatagaattgtgtaagctgccacaaaaacagaaaaatgcatacatgtattataagactatttattcttttctaaaaaaaaagaaaccagatattgttcatgtacatggtagcagtacattaatcgccgtagaactttttaccgctatgttagcaggtgtacctgtacgaatttctcatagccataatacaacttgctcacatccgttgttacatgagacgctaaaaccgtttttgaaagtggtgtcaaattgttatttagcatgtggcgaacttgcaggaaagtggatgtatggcaacggagcatttaaggttataccgaatgcctttgagaccgaagcatttgctttaaattcagagactagattattaattagaaaaaaactagaggtgggcgataatttagtaattgggcatataggcaaatttaacaaccagaaaaatcaaaattatttaattcgcgcctttgagaagctttcatatgaagatgataaagcaatactgcttttggtgggaaatgggccagatttggaggagataagaaatcaggcacagcatacagcatgcgcagaccgtattatcttttggggagcaactgagaatccggaatatttatattctgctatggatgtttttgctttaccctctaggtttgaagggttacctgttgtgcttctcgaagcacaaatttcaggattgccttgtatcgtgtcggataaagtaacacgagaggtggattttggggatattatttggaaatcaatagaggatgatccacaaatatgggcagatacaattttatcaatggggcaaaggacagaagtacagagaaagcaatatcgcttgcaacatgtaaagcaaattgcacgctatgatattaaagaatccgcaaaattggttgagaatatttatgagtgtaaattactaaaaaagaaataaaagaaaaattaagaaaaaaaattaacaattaagctacatatagtttatgaaaggggattaatatgccaacatatgaaggattaaggctgaaagtattatgaaaatacttcacaagttttacattggtttagtgagtgcatggaagatgttctgtgccaaagtttgtgctcatgggaagcttcaagtaaaatgggtcaattcgattagaggagctttcaagactgaagttataggtaacggatctattacaattggacggtttttaatgtcaagaggcccattgtatctaaagtctgtaaatgatggaaaactgacgattggcgacgatgtgttttttaatcataattgctctataacctgtgcagagaaggtaacgattggaaatcattgtatgttcgccaataatattgttatcatcgaccatgaccatgtgataggtggtaatggcgtgacaggtgaacttactgcaaggccggtaattattgaagatcacgtttggtgtggagccaatgtaacgataacaaaaggtgttcatattggatctggtgctgttattggtgcgaatgctgtagtagtaaatgacattgaagcccatgcaattgttgcaggtgtcccagctaaaaaaattaaataacataaaatagtagaggaaataaaatgatacccaaaatgattcattattgctggtttggcggaaaaccactaccgaaagatgttttagattgtattaaaacatggaaaaaatattgcccggattacgaaatcaaacgatgggatgagtcaaattttgatgtgaatagccatccgtttatgaaagcagcgtatgaagcaaaagcatgggcgtttgtttcggattatgcaagattgaaagtggtatatgataacggcggaatctatttagatactgatgttgaacttctgaaaaaacctgattttctgttagaaaatcagtgttacatagggattcagcaacctgaatccctatgtaccactggacttggttttggtgcccaaaaatcaagtccagtggtacaaaagatgatggaatgctatgattcgatttcttttacagatcagaaaaaaagcacatttgcgtgtccgtggcttaatgataaggtgattcgttcatttggtaaggttagcaatgaagatattacctacctaaaagaagtaacggtatatccgccacgtttttttgatccgctttcgacgggtaatacaaagaatttactttgtgatgaaacagtgtcgattcatcattacgcagcaacatgggcgggtaacaagcagagatggaagagaaagctgattcgtttttttggggaagatagatattttaagttaaagaagttgtttcgacgagtacagtagcatttggggaaaacaagcaaaggaaacgatgaaatggaatggttgacactatttatatatatattgattattttttttaatattttttttgacaaatttattccatatgctaactatacagatgagctgatatgcttgctttttatggctatagctatcgtatatatttgtaaagataaagggaaagtggctgttaataaggaacaaaaaaatagcatattatgcattctgttagtgctttttattggaattgtgggaaatgttatgtatggatatatgccatcagtttccgtaattgggagagatataataggaacgtttaagttctttattatatatttggtcggaataagaattattgtaaaaaataatattcgattgaactcgaaaaaaataataagtacagcaaaaattataataactgttatttttgtttttggaatagttaatttgcttgtaaatactggaatagcagatgaagtaagatatggccttagaagttataagtttatttattctcattatacgtaccttgtttataatgaagtgctcttatacagtattctagcaacagaggataaaagaaatgcagtgtttaagataatgtcgctgctttcaattgcggcaactttccgaacaaagggatttattacgattgcatttatcttagcgtattacctcttgaattttgctaaaaagaaaagaatatcatttaaagatattttcaaaccggtttatattgctccaatcggaattgtatgcttttttatttcaaaaagcaaaattcagcaatatttatcatggggagcgagtcaaagcataagagttggtgtacatagcgttggattaaaaatcgcaaatgatcatttcccttttggaacaggttttgggacatttggaacgaatatctcttataaaaatcagtcacaactatataatatttataattcgttgaattattctcatctaatgaattatggatatgctacaatgtcggacgtgtactggccatcaatttatgttcaatttggttatattggaatgattgtttatgtgatactgattatacaaatttgcaaagatttgttgaataacgcaatgctgaataacaggtgtaaattttcaatattattgattctattttatatggtttctgcaagcttgagtgaagctacatttagcaatgaatctggagcgttttcggctgtggttatattaataatagttgcaatatcaagaaaaaatgcgcttataaagtgtgattgcaaggataacgaggggataaattgtggatgatttaataagcgttattgttccagtatataatgtggaagattatttggaaaaaagtttgtcttcattgttaattcaaacatacagaaagcttcaagttattataattgatgatggctcaacagacaacagtggggaaatatgtgattattatggagcaaacgatgggcggattgaggtttaccatatacaaaatgcgggggtttccaatgcgcgtaatcaggggctgaactacgcaaagggaaaatacatttatttttttgatcctgatgattcccttgagccggatgcgctttggacgctctataaacaaataaaaaatggagcggatttagtagagtgttcatattttaaggacttcacaaatgtaaaggaggaagtaattcatccggagaaaaaaatttccagtcaagaggctatcagaagtttattactgtgggatggatatctaacatcattttgctgggataaactgtataataaagaaaaaattggagatataaggtttgactcaaaattaaagattggcgaagataatctttttgtgtttgagtatttgctcaagtgcgaaagtgttatagtgctagactgcccactgtataactatctgataagagaaaattctgctattggaaatgtgtacacagaaaaaaagaaagattcagttcgtgcagcaggaacaatatatgaaatatgtagtaagcgaagtatgatgcactatgaagctaaaattcatgttgggttggcatcttttttttcatatgcgaatttattgaatacggttccttatgagaaaataaaagaatttaaaagtgattgcaaattttacattgattctatgaaagtatgttcttgtgggcttctttggaaattggttggaataaaaatgactattctttataaaacggcgcagtacattccgtttctgtataaggcatcgggcttcatacgaaggaaaagccgttaataaatcagtatcattctttttcgtcaataaagcaactgataaaaaggataatatgtaaagtatactggctagctgtttaaaaagaaaattacatagcgtagtttattaatgtcggtttatgtaaaaattgtggaaggagttgagaaaaaatgagaaatcaaagatctattggtgtcaatgcaggactcaacatgattagaacggcatttcaggtgatttttccattgattacttttccgtatgtatcacgagtccttcatgttgaaaatataggaatttacaatttttgtcagtcggttatttcgtatttttcattgctggcggctttaggaattagcacctatgctatcagagagggagcaagatatcgagataatgaagaaaagatgtcattatttgcttcggaggtcttttcaattaactttatttcgacagttttttcgtatctaattttaggagtgtgtatccttttagttccaagatttaaccaatatagttcaataatggtagcgttaagcataagcataatgtttacgctgattggaagtgaatggatatttcaaatttatgaggactataaatatatcacaattcgaggcattttgtttcagtttatttcattaatacttatgtttgtactcgttaggaatagcagtgatttgtttgcttatgtatggatcacagttatatcatgcagcggcgcaaatatacttaatgctgtttctagaagaaaatattgtaagataagacttaccattaatgcaaaagttctaacgcatttggctccaatattagttctgtttgcaacatcagtagcgacaacaatatatacgaatgcagatactacaatgcttggttttttttcaggaaataaatcagttggattgtattctgtttccaccaaaatctacactattgtaaaacaaatgctggctgcaattattattgtttcaattccgagattatctgcttatctgggagagaaaaaaatagactattttaatagaacagccaaccagattttgaatgcacttgttgttattgtcgttccggcaatggttggattgattgcattaagcaaaaacatagtttttattattgcaggacaagaatatgttgatgcaaatatatcgcttaagattctttctgttgcgttgctttttagcatttttagttggttctatacatcgtgcattctaataccttataggtgcgaaaataaggtgttgatggcaacgattgttgcggctcttgttaatataggattaaattttatccttattccaacattccagcagaatgctgcggcatttactactgttattgcggagttactgtcaatggttataacatggtggtatggaagaaaatattttagggtcagttttctaaaaaaggacattctctcagttgctataggatgcctggcaatatggactatatgttctatatcagaaaaatatattagttcagtactgatttctacagttttttcagtgactgcttcggttgttatttatatgattgttctgttaataatgaagaatcaggcggtaaaattagttttagagatacttcatatcaaaaaataattttgtttttttacacacgaaaatacagccggtggatgcttctaatcacatcatcatggactactcaatccatgatgcaatcgaggctggtacgggatgacctatcacgaagatgtcgcagccgtaaaggacagcttcaagaagatgctgaagaatggcgtgtacaaggctgatttatttgcagacttgtgatatactgggagcgttagctccctgcgctgctcgtaataatcacacacctcttcgtggtgagcagcaggcaacgatcttatggtcggctgagatgtgataaatattgaaggaaagtgatttttatgaagcaaagagtaaaacaacttgcaataactgagagatcagtgaaaatgaaaaagattgttgcagtagttattataatgtttattttttcgataataattttgggggtaggaagtaaattagtgttccaaaaaatttgtgaacgaagagaaacagcatggccagatttgggaacagcagatgatgagcaatatgagtggcttaccgaagcatataaaataaagcaaaaaaataatgaaaaaattgttatcttggcttctgatggaacaaagttggaaggtcattattatgagagaaagaagaatgctccattagtaatcttctttcatgggtttagaggtcatagttacgtggatggtgtgccgatttataaaattgcgcagaaagaaaaatggaatgttttacttgttagtatgcgtgcgcatgatgaaagtgaaggaaatatttttacattgggagtgaaggaacgttatgattgtgtagattgggctaattgggctgcaaaacattttggaagagaaacaccgatatttcttatgggaatttcaatgggtggagcagtggtcacaatgagtagtgatttggattttccagattctgtttgtggaattattgaagatagtggatttacaacatcaacaaaaatgttagagttaaattgtaagagccatttgcctaaaggaatgccagtagaggtattcaaaatttttgcagatgtgggaataaagctttggggaggatttaatttaaaagaggctgatgcttgtaagtcggtatcacagacaaaaattccgattttaattattcatggtgataaggataacttggcaccattatatatggcaaaagaaatttataatagttgtaaaagcagtaaagaaatttatatagttcatggtgcaggacatgcagagaattataaaaaagatccagagggatatgaaaagataataacgacgtttattaaagaaagagtgccataaatgtaagcgcttaatttttaggtatgatagaaaaatccccgactacttttcagtagccggagcaagcactaagcgcgtctggcccgtaccgaatccggatggcacacaccgcatcgacagatgcgagaatgtcaaggatgtagggcagtatatcgcaaggattgatgagatgatagagaggaagcagaggctgtttgaggaaaaataagcagaatgacatataaataatgtataatattgagctgataatactatacagattggcgaatgtgtcaaaaattgtaaataaaacctaatattcattgacaatgaataaaaaaagggtgaaaataggtcattggaaagtccgattagatacaacaaaagatacgctaatctgaataaatatacaaaaaaacagactaaaaatattcgggggggggtacaaaggtacctccctcggagtgggtataggggaaatagaagataccataaggagaatttagaaagaatgtacagaaagaaaggcagagaatggacaaagcatatagactttatgtttatagatatcgcatgcattgttatagcattttttatttcatatatgatacgcttcggctttaataacccatatgtggacaaggactaccgtatactgggggtagcattcattctgatagatttctgtgtggagataatggaagactcatttaagaatgccctaagacgcggatatctggatgaattcatatcgacctgcaagcacgtagtgcttgtatttatggtgacagcgctatttctgttcaccacacagatggctgatatatactcgcgattatcattttatatcatgtttccaatctatatgacaataacatatgtagcaagactggcgctcaagagcttccttaagaaaaatgactttgcagcatctatgaaatcactgtttgtcatagcacctgatgcaatacttcgtgatacactgcgcacagtggagaaaagctgtataggatatacaaagatagtagcagcttcactggatacagacatgaagggtgagactatatgcggcataccgatagttgcgaatcacgatggcatagtagactatgcgtgtgatgaatgggtggatgaggtgctcattccgccttgcagcgaggatgaatatcctgaaaaaatggcagatatattcctagagatgggaattgcagtacatacaggaatagcaaaaaacggtacagcccatggtggctacaagcagatagaaaagataggcgactacacagtagttacatcaagcgagaactatgcaaatcccagcgcacttctggtaaagaggggcatggatatagtcggaggactggtgggctgcctgttcacacttatcatcatgatatttgtgggaccggcgatatacatagcatcgcctggaccgatattcttctcacaggagagagtcggcagaaacggcagaaagttcaagatgtataaattccgcagtatgtatatggatgccgaggagcgaaagaaggagcttgcggcacagaataaagtgggcgacggaatgatgttcaagatggactttgacccgagaatcataggcaataaggtgctgccaaacggaaagaagaaaaccggaatcgggcagttcatcaggaaaacaagcctggatgaattcccacaattcttcaacatactagtgggagatatgagtctggtaggcaccagaccaccgacactcgatgagtgggagaagtatgagccacaccatagagccagaatgtcattcagaccgggactgaccgggctgtggcaggtgagcggcaggagcaatatcacggactttgaggaagtggtgaagctggatacccagtatattagggagtggagtgttaagggggatgtaaagataatttttcgaactttaacaggagtattaagaaatgatggagcaatgtaaggaaaaacttaatattgctatgtttggtcaaaaaagaattccatcaagagaaggcggagttgagatagtagttgaagaactttgtacaaggatggttgcacaagggcacaatgtgacttgctacaacagaggtggtcatcatgtgagtggttctgaatatgattcaaaacgacttaaagaatataaaggaattaggcttaaaacagtcccaacaatagagaaaaaaggtcttgcagctgtatcatcatcattttttgcagcattatgttgtgcttttggccggtatgacattgttcatattcatgctgagggaccggcatttttcgcgtggttaccaaaactatttggtaaaaaagtgattgtaacaattcatggattggattggcaacgtgaaaaatggaaaagtggatttggctcaaaatttattcatcagggtgaaaagaatgctgtgaagtatgcggatgaaattattgtgctgagtaaaggcgttcaagattattttgagaaagagtatggaagaaaaacagtgttcattccaaatggagtgaatagaccaaaaatccaagaagctgaattaattacagaaaaatatggtttggaaaaagattcttacatattgtttttaggacgattagtcccggaaaaggggattagatatttggttgaggcatttaagaatgttaagactgataagaagctagtaatagcaggtggttcaagtgatacagactcatttatgaatgaattaaaggatctagcaaaagatgatgacaggattatttttacaggatttgttcaggggcagatattgaaagaactatatagtaatgcttatgtatatacgttaccttcagatttggaaggaatgccactgagtcttttagaagctatgagctatgggaattgttgtctagtttcgaatatcccagagtgtacagaggttgtagaagacaaggcattggtatttaagaagtcagatgttaatgatttactcaccaaaattcaaaaggcatgtgattatcctgaaatgattacgaaaataaaagaacaagctactgattttattttcagaaaatacaactgggattttgtaacaaaagaaacaatgaatctatacaggagatgaggaagttagaatatgcggattttacttgtaaataaatttatatttcccaagggtggagcggaaacgtacacgttcgatgtgggaaaaatgttagaagaacatgggcacgaagtccagtactttggtcttgaaaatgaaaaaaatacagtaggaaatcgaattggttcatatgtaacgaatatggatttttctcaaggaataaaggcaaatttaaatgcaccttttcgcattatttattcaagagaagcacgcaaaaaaattcgtgcagttttagatgattttcagccagatgtagtgcatctcaacaatatacagtatcatctgactccttctattattctggaaactaacaaatggcgtaaagaaacaaaaaaagaatgtaagattgtttacacgacacatgactatcagcttgtttgccccagccatggaatgttcgatgtggatatgaagccttgtgaacggtgtttggatggtcattatattcattgtcttcaaactaaatgcttgaaaaattccagagcaaaaagtcttcttggaacactggatggatatatgtggaaatatagtaaagcatactcatatgtggatgcctatatttgctgtagttattttcttaaatcaaagttggacacgcagaaaagattccgtgataaaaccatcgggttgcataatttcaaaaaagagatgccgcacttggataatattcaaaaaaagggttatgtattagagtttgggcatctgtcgcgggacaaaggaacagatactttgcttgaagtagccaagaagatgccaaatacagaatttgtgtttattggctatggcccatcagttgataaaatgaaggatattcccaatgtgaagtatctgggatttaagactggagaagaactctatcgcattattgctgaggcagcaatcagtgtttgcccgtctgaatggtatgaaaactgcccgtactctgttatggagtcggtacttttgggtacgcctgttgttggatctaaaatgggaggtatccccgaattaattgagcctggtaaaaccggagaattgtttgaagcgggtaatgtggaagaactgatgaaggcgataaagaaagttcttcaaacacaagatgtattggaaagatatacaaagaattgtagtcaagtgaattatgaaacgacagagagctactatgtaaaactgatgaaaatttatcgaggagaaaagaatgtggaacaaatttcttcgtaacccacttcatattgtcaaagattatgagctgagaaaactgctttggcaatcgggtggtggcacagcggtttgtaaaaaatatctgaagttcagagataccgctcctgaaaagctgacgtttccagaaacccaagtagatgaacctatttggttattctggaatacagggctggataaggcacctgagatagtaaggacttgctatcaatctgtaaaaaaatatgccggcagacaagttgttttgcttacagaaaaaaatgtgcagaactatataaatatgccggattatctgaatgagaaattaaaaagcggagtccttccattagcgatttatacagatttgatgcgtgtagcattattggagcattatggcgggacatggatggatgcaacaatactgctaacagatgaaatcccacaggaaatattaaatagtgatttttttgtgtttcacaattcacttggtgaaattgataatccagtattgtatccggtctggttcatccacgccaagcaacataatagaacgatttgtgagattcgtaatgtcctatttgcttactggaaacgaaataatcatgtaccagaatatttgttttcaaatattgtaattacacaaataatgaggtcatcaccagatgttgagaaaaagatgccttatttgaatagtgactacagcgaatatctggttagagtattaggagataagtttacagagaaaaaatttaattggattaagcagcttactgggatacataaactaacctataaattagaatcatctattgacaaggaggaaacagtttaccattatctggtgcggaatctatgagccttttgaatagtagtttctgcaagataaagggagacaattaaattattatgctgaatgactactatcaaaatattggcatgaaaggctttattcaaagatatggaattgtgaatgccgtcaaacgaggggcatttatgtttatcaaattgcatcttgtcaaggattatgaggtgcggaaggtattgtggcaggagtgtgattcttcaaagataaaaccatatttaaagtataaagacacagatgtttatgggcttagctttcccaaaaatgatgtagagaatccgatctggatttattggaacaaaggtattgaacaggcgccgatcattgttcagaagtgctatgaatctgtatgtaaacattccaatcaaaaaatcattttgctgaacgatcaaaatcttgcagattacattcgattgccagattacattgaaaagaaaaaagatactggacagattccgatagcgagatatgcgaatctaatagagttcgcattactggagcattatggtggaacatggattgattccacggtgtatcttacagatcctattccagatatgattttaaatagcgacttttttgcagtacgaaattcactgctattgatagataaccctgtgctatatcctgcatggtttcttcatgcaaaaaagggaaacaaaacaattcgagaaataagaaatgttgctttcgcatattggctcaaaaacaaacatgtaattgagtatctgctaccaaatttgattataacattggtggtgaagagtaatccggaatttgagcaagaaattccatatatgaacagtgattatagcgagtatcttgttaaggctttagccgatgagtattcagaagaaaaatggaattggattaaaaaacttacaggtattcacgagttgacgtataaattggatgcagcagttaatcgaaaggatagtttttatcagcacataattgcagaaaagaataaataaaagaaagcttattaacagcttaacaaaaggaaggataaatcatgaagattattgcattttatttgccgcagtttcataacattccggagaatgatgagtggtggggaaacggctttacagagtggactaatgtgaaaaaggcaaagccactctatgaaggtcatatgcaaccacgtgttccattgggtggaaactactataatttgttagatgacaacgttaaaatatggcaggctgatttggccaaaaagtatggagtatatggcttttgctattatcactactggtttaatggaaaaatgcttttggaaaaaccgatggagcagatgttagcaaataaagaggtagatatgccgttctgtatttgctgggcaaatgaaccatggacaaaagcatgggttggagatgaaagaaaactgcttatagcacaggagtatgggaaggaagaagaatggaaacagcattttatgtatcttctgcctttctttaaggacgaacgatatattacaaaggatggaaaaccattatttgtgttttatagaccggatattgtgccttgcatgaaagaaatgattgaaacatgggataaacttgccaaagaaaatggattgagcggtatcacgtttgcatttcagagcggagattatgactggaataatagtaaggaggcaaagctattcgattatgatattgagtttcaacctccttatgcaagtcactggctttattcaaatgatggaaaaattgtatcggcattaaaaaaatgtcgaagactattagctggttgggcaggaaaaaagtttggtatcgacctataccgctatggaactgctcagtataaaaaaatgaccggacaaactgtagcaaattatgattctatgtggcagaaaattattgaggcaaaaccagtacgtagtaatagcatccctggtgcatttgtcaagtgggataatactcctcgacatggtgaacgaggacaaattaatgtgggaactccagaaaagtttgagtattatctttctaagcaaatcaagcatgcaaaagaagattatcatgaggatatgatttttatgtatgcgtggaacgaatgggcagaaggtggttacctggagccagatgaagatgacaaatatggatacttggaagcaattaagagagcgttggaagaaaataacgaatttccagagtttcaaaataaaaaagaatgagaatgacgaggtaaaatgaagacaaaaaatcagattggatggattgcaatttgtggcactttgttgttatacccgatattgccacagtatatctatatttttaaaggattaaatatcgttaatttttgtgctgtgttgacaattataagtgttatcataggtggagtgatttacaagtgtaaaataccgtatttgatttttccatacatattgtacgcaatgtactattctatatcatactatgcagagggtgcgtggttaagtgcactctcgtttgctatgatgatggtagttattcctttacttatcgtaggatttgtgaacacgaatagaagatttgaaatggcgattaatctattgattgatggtggctttatattgtcattattgggaatagtagaatcagttacaaagataaatttatttcagttattttcaaatgcgaatggtttgacattttttcatgaagttagatatgggttcttaagaataatgggaacttttggacaaccaatttcttatggattatatcaggtttttattatttcattgattatttacaggctgaaaaattatacgcagtattcacaaaagcatacgttccttaaagtagcatatttacttagcattatcaatatcctactaacggtttcaagaattcccattatagcctgcatacttttacatatcttacttttatataaaaagtcaaaaaaagagtttataaattatgtggttgccatttctatattacttttgttattgataatattaaacgatgcagtaggaatgaaaattccgttgataagtgatctattatcttcaattggaactgtcacatttgataatgaaatcaattcaggcggtgtaggagatagatttgttctttggcagtgggtggcactttctgtaggaaataagtggttacttggaaaaggagtatctacagaatttgcgtataaagtgtatgaatggcaaacaaagacatcaattgaaaatcagtatttgaatgtattctttcatacgggagtagttggagttcttcttttattatttagttatgttgctgtattagtatatgcaaaaaggaagaattcaagctgctcagaaagttgctcatttaatacaatttttttctcaatgatgttaatttacttcgtttgtgaattgggtgtccaagaaacagatttggccagaatgtattgtatatggatttcacttcttatttcttataatagaattgatcaaaataatagaatggagaaagatttatgataaagataggattgcttggatttgatttcaaagctcccaataaagggtgcgaagcactttcatatgcttttatcgaaatgctaagtgacatttcgaatgaaagcatggaaattcatgtgttttcttatggagaattaggtgatattcccagacaatatcccaaattcagttttgtatggcacaggctaaatatgaaaaatcctggttttttaattaaaatgaaacaaatatttgatgattgcgaatgtgtatttgacattacttatggagatggcttttctgatatttacgggaaggtttggaatgccaatacagatcttgcaaaacaaattgcaattatgtcaaaggcatcattagttctgatgccacagacatacgggccgttttatacgagcgtgttaaaaaaatgggcgattcatcttgttaaaaaagcagatttggctttttcgagagatacacaatctgcacaagaaatgcacgaattaggagtaggaaatcttgtggtggcaacagacttggcttttgcactgccatattataaagaaaaatacgacttaaattcaagcaaaagaaaggtgggaatcaatgtttcttcattactttgggacggtggacataatattaagttgaaagtaaattatagagagtactgtcgtcaaatcataaagaaatatagtgaggatgataaaacggagatacatattattccgcacgttattgatgaagataattacgattcgttagaaaatgacagcagagtatgcaaattgttaaaaaaagaatttccatgtgcagttttagcaccggattttaaaaatccaattgaggcaaaaagctatatcagtaatatggatgtttttatcggtgcaagaatgcattcgacaattggagcaatttccgcaggtgttgctacaataccattttcatatagtaagaaatttgaaggtttgtttggaaatttaaattatccatttgtaatatctgcaacgagaattgatactgatgaggctgttcaacaaacagtacgttatataaatgataaggatgttctgagtaaagcgtattggcgaatgatgcctgaaattaatgaaaagttggaaaatgtgaaaaaacaaataaaaggcataatgatacattaagggagaacagaaaatagatggatgcaggtgattataagaaggcaagtacatgctacttaataggtaatgtgtttaacaagggcattgtttttttgacagtaccgatttttacaagaattttatcaacgtctgattatggcgttgttacgacttataattcatggataggaattatgaccatgctgttaggatttgcattgcatatggcgataagatcctcgtttattgattaccgtgaaaaagtggatgaatatctgacatcgactttattattcactgttgctttttctgtaagtatgacagtgattgtttgctctgtgtcagttctgttaaatttatctattccttttatactcattcttctatgtatgcttcagtcaatgtctgcagctataattgaagattatagttattacttgatgatgaagtttaactataaatttagaacaatgttaatgattgttccgaatttgctgtcagtggtattatcagtactggcgatgttatacgtttttaatacaaatcgctatttgggacgagtaattccaacggctattgtaactttgctttttggtatattacttgtttcttttagcattagaagaagtggatttgttttcaacatcgaatttctaaagcacggcctcaaaatatccactccgttgattctgcatggtattgctttgaacattttatcccagtcggatcgaacaatgatcacctggttggcagacgcgtcacaaacggggatttatagtttgatttacaattttagcatgattgcaactgttattacaacgtctttagatggtgtttgggtaccgtggtttacgaaacaaatgaataataaagggtacaaggagattaataaagttgcagtagattacgttaatttgatgacttacgcaatgtgttgcctgattatggtagcacctgaggtagtgaagattcttgcaagtgagccttattgggaaggtatagtgattattcctcctgttgtcctatcaaattacattattttcgtatatacgatgtacgtaaatgtagaacattattacaagaaaacagttcgtatatctttgtatacggcagttgcggctgtgataaatttagtattgaactatatattaattccttattttggatatgtagctgctgcgtatacaacgattgtgtcgtatgttgttgcactgattttacatgcaacttatgctaaaaaattgagacctgagatatatccgattaaaactttctttgtcgctttaatgcatattagtttatttacggttgctttttatgtcttaatggaacaggcagttatgcggtgggtacttatgattgtatatttcttcgccatgttatttaaggaaagaaatagaattgtggaattctttccacatttaaaaagaaaaagataagatgaaggaaagggtcggtctatgaaggagagaaagctaaaaaggaaagagaagttctattctgaatattgctctggatgtggcttgtgtaaagcggttaaagatgttcaatatgtggattataatggtttttcttatcccatgtccatgactaaggatcaagttgaactgtgcgaaaaaatatgcccggtaaatggtattaattataacaagcgccaggataaagagttatggggacccaattatggaatttataaaggctggtccctagacgataaaataagatatgaagctgcctcgggcggagttattaccgcaatggcttgtttccttgttgaaacaggaaaatgcgatgctgtaattcaaattggtccatcaccggatgatccttgcgagttaagactttatgccaatgaaaagagagaacagattatttcatgtgcgtcttctcgctatataactggaattacatatgacactattttgaatattatcgactatgataaggaatatgtggtgatagggaaaccatgtgatatagaagctcttatcaattatacaaagattgatgagaaactgaaaaaatgcattaagtatacgatgacatttttctgtgcgggagcgccaagcaaaaatgcaacattaaaattggcagaaaatctaggagtgcaggcagatcagatagatagtgtccgctatagaggaaatgggtggcctggtaaagctacggtaacacttaaggataagtcagaaagacacatggactacattgattcatggaatcaaatattaggacgtaatataagaaaaatgtgcaagttttgcgttaatggcgtggggatgtatgcggatatatcttgtggtgatttgtggaatttagatcaaaatcaaaaaccggaatttacagagggaaaagggcaaaatataatctttgcaagaagtaaagcgggaagggatttgttaatagaagcaagtaataaaggatatctatatttggaaaattatacaaaaatgaatgacttaaaatacatccagccaaaccattataatatgcagacaacaatgagtggaaaaatagttgggatgaaaatagtgggttgcaatctgattccacaatataatattaaaaaattatttgaagcatctaaagaaatatcgaaagttaaattgatgcggacagcgatggggacaataaaaagaaaaattaaaggctcgatttgactactgcttttatactttttataaatgtctcgaattgattttttcgaataatagaaggagatgaaggtaacttcgctgttaaatgataccaaataaatgatttgctgttggaggaaaaaattttgaatattgcaaagaagagaaaagaatatcgactgataaatattttatttaaaacgatttataagaagaagtctgctaaatggagaggagattatcttcgagaaaaacatatttttcaccatataggagagaacgttcatttgtggggggggtcccatccgatccatacctgatatctatcggaaataatgttataattgctgtttcggtggagtttgtaacccatgatattttttatcatgcacttaatcaaacctatagtgaattgggaaaattctatccgcactttgatacaattactattgaggataatgtatgtattggtggtttctcgaaaattatgcccggtgtagtgattggtgaaggtgcaattgtagccggaggtagtgtggttactaaggatgtcccgaaaggcgccatcgttggaggaaacccagctaaagtaataggatggacagaggaattggcaaaaaggcggattgcagagaaccgaataaattatacggtttcaaatgatgtggaagaagttgaaaagtattattgggaaattctttcacgcaataacaatttgtgaatgtagccctagtaggtaggattgactgacagaaaaattactacaatcattgatagagcgtagcaatttaaattaatttggattgcttcggaggagaaagaatgatgaaaggcattattttagcaggaggttcaggcacacgcctgtatcctttaacaaaggtaacaagtaaacaacttttgccaatctacgataaaccgatgatttattatccgatgtccgttctgatgaacgccggcatccgtgatattttgattatttccacactgcaggatacacctcgtttcgagaacctgctgggtgatggacaccagtttggtgtgaatctgacctatgctgttcagctttctccggatggattggcacaggcctttattattggtgctgactttatcggaaatgattctgtggctatggtgttgggcgacaacatctttgcgggccatggattgaagaagagattaaatgcagcagtggaaaaggcagaaaacggcaagggtgcaacggtgtttggctattatgtagacgatccggagcgttttggtattgtggagtttgacaagaacggtaaggccatttctatcgaggaaaagccagaacatccgaagagcaactattgcgtgactggcctgtacttctatgataaccgtgtagtcgagtttgccaagaatttgaaaccgtctgcacgtggtgaattagaaattaccgatttgaaccgtatgtatctggaagatggtactctgaatgtggaattgctaggtcagggcttcacttggctggatacaggtacacatgagagcctggtggatgccaccaacttcgtaaagactgtcgagcaacatcagcatcgtaagattgcttgcctggaagaaatcgcatatctgaacggatggatcagcaaggatgagctgatggaagtctatgaggtcatgaagaagaaccagtatggtcagtatctgaaggatgtcatggacggcaagtatcaggaacatctgtattgataaaagaagaaacaacgatgaaagaaacgattgatttactagggaaaattctcacaaacatcctgactgctctctatgagccatttggattttcactcctgctttccttcctagccatgtttttctatctttatgcttatgaacctaccgaagccggcaaaggctggaagaatgccatagtgacatggtatcagaagttcaaggagagtgtgttcttccggaagttgtt

SEQ ID NO: 1063 - DNA, 44341 bp, unidentified
  source 1..44341: mol_type = unassigned DNA
atttgtatcggcagcgatcaactatcaacacgctgtgtgatgctcttcctgattattttcttcaaaccaaccgttctactattatgaatatcaatcacatacagagtatctcccaaaaagatatcactggaagtaatgatctgatctatcctttatctatagaatatgcggatgatgtaaaaaaacgttggatccgatcttcgaatccctatattaactgatcagtctcccggacgaaactttccattaactgtacaatgggttttgtctgtatattgtttctgcgtagatcccttgaataccggaagataccgttttggtttcgctgtattgtaaaacaacggatcgtagcattttccattcacgactgcccacacatgcgttcccgaaaaacgatcacttgtgtcctgcgcaataacaacacgcttatagccaagttccgaagccaaaaaagcaaatccaacggacaatgtacggcagtctccggtttgaaaacggtataacgcatctgcagatttcgatgtccatcctttcttaccatcacattttcgttcggagtaatcataatttttcacaacccacataaaacatttgtccaactttttggactgggacatcgcttttttgcgatgctgcttctgaacacattcacgaatgatcacacgcgcatgttccctggcaaccgcttccttacgctgctgttttgtcagtttcttaccagatggcgcataacaggtatgcttattccgataataagcaacactgccatccagattcataaaatactgtgttccctttttgctatagtctctgctatacatatagccatgatcaatatagtagtattttccactaatacggtagatcccgcgtttcactgccagtaagcccctggcatcaaaggaaaatcctcgcgccataccattttgcacgagttgaccattctttttagtaaagataattttgaatcgcttagatcggcataaaccaatatcatttactttaccgatacgataatatttattgccaatacggacatgccaccctgccaccgtctgtccatgacgatcggtcaaataccgtttgccatcctcttcattttgctcaatgcggtaacgctcaccatcttccgacacagtctgtgccgaaaccttcgctgtatttctaccacttaacagcatcataattgctgctgccccaaacgtgatctttattatttttttcttggctgacatatcttcctccatagcgtcatttttattgttgcgtatccatttcttttaccgtgacaatatcatccaactgataacaaaatcccggtgcagatgctttcgcattttcttgatattctttggtcagatctatcttgtcggaaggattcaacggatttacccccgtatatttgccatagaacaccttgatctgtcctttggcgaatccatcaatcgcgcgtttcacagccttcctggtcccgggcgctgcaattacttcattcaactccagcatttgtacccaattgtctgcaagtccgccccacgcatcattcttttctttttgtacatccagttcactttcaatctttttgccatccaataccgcttgaatcactgcggattcataaggctcccaattgactttacaaccgatcagagatgttgtaggtgccacgctggtcatgccttgattgtaaccgacatgatacacttcatatttgtcggtctggctcatctcctcacaggcaactgccggccctgtggtatctgagtgctgcgatatgatcacacagccatcttctatcaacgactttgcaatctccttttcatacgaataactactccaggtatttgcatagcagaccgtcataactgtctccggaacgacggaacgtgcccccagcaaaaaagccgtatatcccgatattacttccgcatatgcataagctccaacataaccaatcttagcatcttgcggtgtaatcttaccttctgagatcatttcctgcaatttcatgccagccacaattccagcaatatatcttccctgatatactgctcccatgtaggtatggtaattagaaacaatgggattctgattcgcattgtcccctgttgcctgacaaaattgtatttccggatatttcttagctacttctttcgttgtcttaccatatccataactggtcgcaaagataacatcacatttttcttttgccaattcaacaagcggttcctctactgcattttcaggtacattaaatttctctacaacctgcaccttatcaccaaactgattttcaatgcttttttgtgcccgaataaaattgtacacataaggattactttcatccccaatatagacaaaaccaacttttatcgattcctttacctgacttttttgtacaacacaatgccatacacccgctaagccaactaccaaaatacaagtgatcaatgctgccattttttgtttcttcatgcttctcccccctcgtatctcttcgacggatcgataatgccctcttctatcagcgagatcataattttaacgatattgggatcaaattgtgttccacttcccttgtgaagttctgataacacataatccatatccatcttttgccgatacacacgattcgaggtcattgcatcaaacgcatcggcaatcccaataattctcgcatttaatggaatttcctctcctttcagccccttggcatatcctttgccatcataacgttcatggtgatatctggcgccatccgccacatcctgcacaattgtgaaatcttttagtatatcaccgccgatcaacacatgactcttcatgatctcatactcctcgtccgtcaatcgtgacggcttattaagtacggcatccggtataccgatctttccaatatcatgcagcaatgcgatcttacgcaaagcttcacatcgttctttgctccagcccatccgctttgcaattagcacggaatattctgcaacgcgctccgaatgctggcttgtattctcatctctggcatcgacagtttttgcaatggcaagaatcgtctcattacccatctgcgcctgttttttggctaattcaatctcgcgattctgtcgctcgatcacgcggttgctttgcagtctcgtgatcagccatgtaaggtacataatgatcataaccgcaataataatataatatgccttaaaccaccacgtctcccaaaagcgttccggcttttcgatggaatacgaactgctttcgatctctttcgtcccggtataatccaatatggagattacaaacgtataggttccagacggcaggttcgtataaacgatcgtcccaagttcactttgtcggacaatattctttttgtgctcaaatcctttcaaataataactaatgtatggatcttctttggtgtaattcataagaatcggtgtgatctcaatcttatccgccgactctccgatcgatgtcgtttcgcttttactgatataatatttggttccatctaccgtaatgtcattgagccacatacgataaatggttttatttttattatactgttcaatatttaccacatacactccactattacaggacaaataatagttacctctatcatcgatataattccaagcgttagcagtaagtgaaccatccagtcctcttttgccatcgagcaattcatacgtgtatttttcattttggatcaaactgtcctgagtaactatgtaaatacctgcactgcctagtatccatactttaccatcgctgtttaccattgcatcgtagttgttcgagtacggaaaaccgggcaggcttctgcattccagcttatcattcatatagcataatccgttgctggtaatgatcaaatatcctttatcaagcgcaacaatgcgcaaaataacatcggaagtaagtcccgctttcatcgaaaccgtacgctgtaccttattattacgaatcacagcaataccacttccgtcacttcctgctaaaatagttccatctgaacactgcagcatacacaatatctgaggattgcctaagccgtcctcctcgccgatcgttgccactactttcccatttcgaataaaatctattcctgtattttcggatgctgccatcgtcccatctttcagctccatcactgttcgaaagcgattgctaatggttcctttattcggtccgtattctgtgatctgcagagatggtgtcacttcgagtaacccctcctctccggagatagcgatccaaagatgaccggcagaatctactgtcatgcagcggatccttcgtcctcgaagcttgcgtgtcaatttattgtcactcacacactgttgcttttcatcaatgatctgcagtccatcgtccgttccaatgtatatgcagtcctgccattttgtcactgtattaacaacacgtttctccaatgagtactgtcgaaaaagatccgtgaagcaggttttagacaacttgagaagccccaggcgagaagatgtaaaccaaagatttccctgataatccatcgtcatattgtcaatagaactgttgaacgtattcgtatcaaacgtatgaaacttctctccttgcaaatagccaataccgcttccactgcatacccaatagtttccctgatcgtccgaagcaatactgcttatctgttgaagatttcccgttgtatagcgttttattgttcgatattttccattagttttacggagacgatacatttcatttgtcgttgttccgaccagcagatccccattgtccatatacttacagcaagtataaaatgtttctgcattgccggtttttaacgtgaacgtctccttgatcatctgattgttgataatgaataattgtcctgaattattgacaacggcaacatcgccagccttgcctattgctatagaacgtgcatacatgatttcctgtaaggttttgcgcaccttcagaccattactgatcgttacgatacttaatgcatccgaagtacctatgtaataatttccctgctcatcttcggcaatacagcggattgagttggatgcaagatcattctgcaccgtcaatatgttactgattttatctcgaacatagatcgatacaccattgtcattggttccgatccataaacgaccttcttcatcctcaaacaagcaatttacatttttgacatccttcatatcggacatcgtatcaaacgtagacccatcaaaacgatacagccctgaataagttccgatccacaaatatccatctttggtttctacaatatcatttgcctcaccaccaatcaggccattctcgccattatatactgtctgtgaatacgtcgatgtatatttatcaccggctgttgctgcaacgcacttctgtccactgccaattaacgccgctgtaacgacaataccgattattaaggcacctgaagatttccgctctgcattgcactcgaaacgatcgctcgtgatgatacccaatataccaaatatgatgcataccgtaaccactttatccggaaagtccacaagaagctcggataacacagaggcgatcacgaccggaatacgataataccggaacatatcaaataaagcatccccccacaggttgccgttatacccttgaaaaaatatcaagttaaatggtgtagagacaacgactgcaacgaccgaaacaagtgcactggtcgtaaagacaccaaaccagtcacgtatcatatgtctgcgcatacagattcccataacgattgcaatcgcaacgctggtaactgcatacgcataactggtgacatttctcattccgtacagaatgttattcgttgcaccacataaagcaccaaaaaaagggccaagtaaacacgctgacatccccgtgccgatggaatccatccacaacggcaattgccaatctgctgccaatacctttcccatgtaatttatcccgatgcaaacaagcataattatgcacgtattgctgaccgatcgtattttctttgtcatattccctcccatttcgtcccatgcaaacattacagcatttgtaacactgtattcccgaataccaaacttccggcatttcgtttatgagaccacgcgtatcactataatcttgcctattatatcacgtagcctaaaacaagtaaatgctatcgcggttaatttttgtaagattatgtctccaaaatgcttagaaacaactaccgcattttcaaatctcatgttcttgttgaaatattctgcgataggcgcttggtgtcacaccatgtctttccctaaaatactgagtaaagcgactttgtgaaccaaatgcacaatgttcactgatctcgccgatagacttatcggtatacttcaaaaaatactcgcttgcttcaattttttcattgataatatattgcttcagcgaaatcccctcctgcttgcgaaaacgatcggataaataattcggtgtgacgtcaaactcttttgcaatgtctgtcacttgaagtttatccataatatgcagataaatataatttctgacctgagaagttaatacatcttcacaattttttcgctgcagatcgcgtacctcacgcgcaaagataaattctgcctctctggtcgccttctcaacttccagtggctcctgcagattatcctctacattgcgtaaaaagctatcacacatagacaaggctttttccggggtgactcctccctgaatggcgcttcgagacgcactgctgatcacccatatagctatatttttgtagtgtcttagtacatccttggaaacatttccgatctctcctccataagattcattaatactttcttccaacgcctgcagatctcctctgcgaatgctctcctgctcacggcgctcctgtcggatcggattgtgcgctttacgcctctcctgataatgcagcatatcatttgtcagatgctttgcaatactggcatccggctcctccaatacattccagaatacatttcccggcatttcctgtccggtaatggatttccaacaaagctctatgatcgcgcgaaattcatcctttccacaataagaaatgcctatggaatcattgcctaccgcataatacacgcgtatcctgcctaacacaatatattcccctacaggcgattggatgactgcgtatgccacgccctttctatccattttaatatatggtttttcttttccttttccctgaaactcccttggtgcaaccggctgacacacaccttcctcaaagctgtgtatcagattcccttcccggtcaaagacattgatgggtccatgcaataatttgtgtagtcgctctaataagtaaatatccatattgttttccccgcctttctataatgcgcttttctctcactcaacttgtcttcgaatggcttcctccactcgtttgacctcagcataaaattctcttgcagaccataatttgcagccttgcccgcggatgatcagctgctccagcccatccgaagttgccacagttacatcatgttcccgccccatgttatgagcaagtttttcgatatattgatctgctgtttccgcctccttcgtatataccacatgtatattgtgataatccagcatctgaccaataccgccttttaccttataagcatcaaatacaaggatcagtgtcatccccatataagcttgataattacataaaatatccatcaggcggtctctggctgcgtcaatattatcctttgccagctcgttcagttcgtcccatgcaaacactatattatagccatccaccagcagatacttttccgccgaacgcttgtaagcgacaggtccacgactgtctgtggacgaaacaacacgttttcgctgtctgatccaatttttcttctgattgcggtttgcgccacccgcttgtccaagaatagaacgaatctcttcttctcccatcgagtattccgtatcataccgccttctgcgcctcattgctgctgtcataggctccgcatagtcgtcttccggtgactgcttaccttccaaagaatacccattatctacgtgtacatgatctgccacttcattccaaggaacgatatagccggaaccatgtgctgtaaacacagaatccgctgttgccgcataatccagatccggatcataaccaatctgtgcaaccacttcttccgtattgtggcatggtcgatatccgcacaactgacaggacatctttcctttaccaccggtataagcagacagatccttctgataggagcgtattgtcgcaaccggtgcttctccggcaagaactgcgtattctcccgatgaatccggtgcattcagtttcgcactcattcgctccatgtccgtcattgcccgtcccaactgttcggtcggcagctccaaacggaacgaatagtacggctccagtaagatcgtttctgcctgtctaagtccctgcctgactgcacggtaggtcgcctgtctgaaatcgccgccctccgtatgcttcacatgtgctttacctgcaataacggagatccgcatatccgtgatctctgatccggtaagcactccgcgatgtttcttttcctgcaaatgagttagaatcaaacgctgccagtttttgctcagcatatcttcgctgcaattcgtgtcaaacaccagaccggattccggctcaccgggctccaacagcaaatgaacctctgcataatgtcgtaatggttcaaaatgccccataccgataaccggtgccgctatggtttctttgtaaacgatatttccctcgccaaaagtgacatgcatacgataacgatcaaataactgctgcctgatcacttcgatctgcacctcgcccatcacctgtgcatgaagttctttgagtgtttcatcccatataatatgaagctcaggttcctcctcttcaagctgcttcaagagcggaagtgcacgtcttacatcccagtccggttccaaaaagatccgatacgtcaaaaccggctctaatattggaacttcatcgtgttccataaagccaagcccctctcccggatacgtatgggacaaaccggtaaccgcacaaatttctcccgctttggcttcctttgccgtcgtatatttttctccggaatagaaccggatctgattgatcttttcgctccagatctgctcttcatcgccgtcatcagattgcagctgctttttgccttgtaataactgtctcgcctgcaggcgtccacccgtcactttcaaatgtgtcagtcgattgccctgctcatctctggatatcttgtatactctggcgccaaactcatctccatactgaccggactctgtatattgccacaatccctttagaaatgtttcaactccctgcatttttagtgcagagccaaaataacatggaaacaacttccgttgtctgatcagccggatcacatctgcatcttcaagtgttccatcctgcaaaaagcgttccaacagatcctcttcacacatggctgccgcttccatcacgctctcaggttctgccataaaatcaacacaggcatccgaaagcttttcctgtagttcctgcatgatccgaccacgatccgtatccggcatatccattttattgataaaaagaaacaccggaatatcgtagtaagcaaaaagctgccataacgtctcggtatggctttgcacgccatcagcagcactaacgactaatactgcatagtccagtacctgcaatgcgcgctccatttctgccgaaaaatctacatgtcccggtgtatctaatagcgtaaccgttccatcctgcaacgcaaagcgcgcaggcttggaaaaaatagtgatcccccggtcacgttccatatgattgttatctaaaaaagcgttttgatcgtcaacacgccctaattggcggatcgaccctgccgtatacaaaagtccctccgacagtgtcgttttacccgcatcaacgtgcgccaatattcctatggtaatatgtttcatatatattcactttctatctgcgatccttcgccggtgtaatatccccggtactctcgctaatgataaatcgtggtcgttccttggtttccatgtaaatcttaccaatgtactctccaataacgcccaaactaagcaactgcacaccgcccaaaaataaaatacagcacaaaagacttgaccatccaccaacagtcattccgcatatcttttcaatgatcgttgcaacaatagcgatcaaactgatcacacaaacaataaatcccatactggtgatcatactgatcggtttgacggaaaagctggtaatgccatcaaacgcaaacgaaagcatttttttcaatggataatggctctctccggcaattctctcagcacgttcatagtaaacgcaggaatagcgaaaacctactaacggcgccattccacgtaagaacagattaacctctttgaactgtgctaatccctccagcgcttctttactcatcaaacggtaatctgcatgattgtatacaacatctgcgcccatcgccgccataactttataaaagccctgcgccgtagcacgcttgaataccgtatctgtctttctctcggaacgcacaccatagacgatctgtgatcctcccaaatactcgtccaccatccgcgtcatcgctgtcatatcatcctgaccgtcacagtcgatcgatattgtaatatctgcatattgttttgctgtcatcagtcctgcaaaaagagcattctgatgtccacgattacgtgacaaacataaaccttcgatctgctcttcttcctctgcaaacttgctgatcaattcccaagtagcatctttgcttccatcatttacaaacatgacacggctctcttctgcaatcttcccttctgagatcatgccacgcagcgtctgcaaaaataatggttctgtttccggtaatactttttcttcattgtaacaaggaattacaatgtataaaattggtttactcgtcatgatataccccctgtattgtgtcttcgtttctttcatagataccatggatcattttcctgcatagcaacgtataagaatgtatgcctcgcttctccatgacccttggcagtattatatcaaatattgtttcaaaatggcaaccttgtctgtctgctcccaaggaaggtttaaggtgtttcttccaaaatgtccatatgccgcagtttggcgatagatcggtctgcgcagatcgagcatcttgattataccagctggacgaagatcaaagttatcacggatgatctcaaccaaacggctgtcggataatttgccggtaccaaacgtatctaccataacagaagtcggctgtgcaacgccgatcgcataggaaagctgaatctcacaacggtctgcaagacctgccgctacgatatttttggcaacgtaacgtgctgcatatgcagccgaacgatctacctttgtgcagtcttttcccgaaaaagctccgccaccgtgacgtgcatatccgccatacgtatctacgatgatcttacgaccagtcaatccgctgtcaccattcggtccgccgatcacgaatctgccggttggattgataaaatatttcgtatcttcacttactaattctgccggaaggatcggatcaatcacatacttacgaatatcttcatggatctgctcctgtgatacatcctctgcatgttgactcgaaataaccacagcactgatatgtatcggcttaccggcttcatcatactctactgtcacctgacttttgccatccggtcgaagataagaaagtgttccattcttacgcatctctgtcaaccggcgtgtcaactgatgtgccaaagaaatcgcatatggcatgcaatcctccgtctcgttggttgcatagccaaacatcattccctgatctcctgcaccgattgcttcaatctgtgcatcagacatatccatttcaccgttctttgcctcaaaagccttatcaacacccatagctatatctgcagactgctgatctaacaacacctttaccttacaggtatcacagttgaatcctttggcatcatcgtcataaccaatctcacggatcgtctcacgcgcgatcttctcataatcaaccttagctctcgtgctgatctcgcccatgatcatcacataatctgtcgtaatgactgtctcacaagcaacacggctcatcggatcctgttccatcaatgcatccaatacagcatcggaaatgttatcacatattttgtccggatgtccttccgtaaccgattccgatgtaaacaaacgtttctccataatttcctccattctgccgtaccatttctgtacggtctatctacgaatatttccaaaaagaaaaagcccacctaaaccgacgacagatggacttgatttcaacttgatctcaaaccctcttattgctcgatttctcgctgagattggcaccttcctgtcaggggttgccgtggtttcacagagccttcactctccgccactctaaataagagttgttttgtgaactattttcttataccgtgtaataacacacaacttttatattataccgttcgacgcatttcgtcaatacccaaacgagactattcgccaaaattatgaaccatttatgataatgtccaatataccacaaaggaaaatgtctcaaaacaatatccgttcagaagatccaaacatatctcctcagcagcaagcgggcatacatactaaaaaattttatagtgctacatcggtacatttggcatacatactaaaaaattttatagtgctgcatcggtacatttaataagaaatgttccattaaatcatggagtacgataacaggacccgacaaccagaaccataaattacaatataaaagacagatctgcccccgaaagttgtactgctgtccggaataatcccataccgccagatgcagataacgattcacgatcatgccgacaacaaattccaccaccgtgatcataagactgcacaaaagcatctgccccaccagtgatgcctgtccacccagtagattttgcacagcaccgactaacacaaaacaaattccaccagctagcagcattgatatatgagaataaccccgcattaatatttctaatgcgcaatataaaaatcctcctgtaaaaaacatgatcgtatatgcctgtgccggattcatatctgctattctccttcctttgccatatgttctgctattctcaaacatagtatgtattttttttaaaattttattcttgttgataatgattggtttttatcaggtattgtgctaacataacaagagaatacttaagcagaaagcgaggattttgatatatgaaccaaaccatcttaaaacgactggatgctgcgatcacatcaacattgatcggacacagtgaagatcctgactgtaatgtcggcgcatccatctgtatactccatcgcggcgaggaagtataccgcaaagaatacggcgaagcagacaaagaaaaacaccatccaatgaaaccggatacgatcttccgctgttattctatgacaaagccgatcacttctgttgctgtgatgactttggtagaaaagggtgcattagcactatccgacccggccagcaagtatttaccggggtttaaagatcaaaaagtatataccgatcagggacttgttccggcgaaccgcgaagtcactattcaagatctgttggatatgactgccggtgtggtctacccggatgcatcttttcctgccggtgctattatggacaagatccaagcagatttctatgataagatcgccaaaggcgaaccgactccttctacctatgaattggcaaatatcatcggtcaacagcctctggcattccagcccggcgagcgctggttatacggtttttgcgcagacgttctcggcgccatcgtggaagtcgtatccggcaaacgctacattacatatctcaaagaaactatttttgaaccgctcggcatgacagacactgatttctatgtcccagagcaaaagcaggaccgttttatgcagttctatcaatatatgccggaaactcaaacgttagatccatgcacctggcagcatttatgcctgtctcatatgcatctaaaacagccatcttttgaatccggtggcgcaggtttggtatctaccttgagcgattacgccaaatttgcacagatgatgttaaacaaaggaacgtatcagggtgtccgcattttgggacgcaaaacagtagaatggatgacacagaatcatcttaatgaaaaacagctgggaagctttgactgggaagcattaaaaggttatggctatggcaatctgatgcgttgtatgatccatacagaactttccgaaagcattggatctaatggcgaatttggatgggacggctggttaggcagctatgtaagtatggatccggctgaggatctggcgatcatttatgtgatcaacaaatgcggtggtaacggttaccgggatgtacaagttattcgcgacatagtatatgccgcattagaagattagcagatcactccaagaaaggttaggtgagcagtatatgaatacttcacaggcagaaggcattgatcagcttcaaagctgggtcaatgaaagtaaacgtattgtgttttttggcggcgccggagtctcaaccgaaagcggcatcccggattttcgcagtgtagatggtttgtatcatcaaaaatatgattatccaccggaaaccattctcagccatacgttttttatgcgaaatacaaaagcgttctatgacttttaccgcgataagatgatctgtctggacgccaagccaaatatcactcatctgaaattggcagaaatggaacaaaaaggcaaacttactgctgttgtgactcaaaatattgatgggcttcatcaagcagcaggcagcaaaacggtatacgaactccatggatccgtgcaccgcaattactgcaccaaatgccatacattttatgatattcactgtattaccgaaagcacaggcattccgacttgtgaatgtggtggtattatcaagccggatgttgtattatacgaagagggattaaatgatgcaacagtaaccggtgctgtcaaagcgatcagcgaatccgatctcatgatcatcggcggcacttctctcgctgtatatccggccgccggactactgcattatttccatggaaaccatttggtattgatcaataaatctgccaccccgatggatgcagatgcagatcttttgttacaatgtggacttggggaagtcttttcccggattgaagtttaatgtgcgcgaaggcaaaattgcacatagctatcagtcagatgccggtatctatacctggcagatgactggtcgctatgtgaacgctttggcataagcgttgcaaataagcttgtgaaacaagcgacaaagctctgaaagagcagatttgcgagtttgataaaaagactaattactaacaagaaagaaaggattgatgactatgcattactcttatactacaaaaggaacttgttccagtgaaattgaatttgatctggatggtgatattgttcataacgtacaatttgtcggtggctgtaacggtaacctaaaggcgatcagctctttggttgacggtctgaccgtagaacaggtcgtagataaagtcaagggcatcacgtgcggtttcaaaagcacatcctgctcggaccagcttgcaaccgcactgttggaagcactcgacacagtacaataattcaccaaactatttattcacacttgtttagaagctatgcgtttcgtttatgaatcacatattgtttctatcttttctcaaaatggtacaggcggcttacggcatctccccagagatcaccgatcaacaggccgcctttcattaatatttcaccggtatattccctttgcgtcacatcacaataataaaccgcttccggatccagtccctgtaaatgtaccttacggcttcggcggttcggttccgcgagcacctgtacaaatgtcattaaagcctctttctgatcttttgacacaaccatataagcatcatagtagtgattttctgcatacgatgcgagtctatagtaatccccatttcggatcaataattggtaggtatgatacatctctgtctgctcacggatcaacgccttctcttcctcggataactttgtcacatcaagctcataaccaaatgttcccgccaatgcgacatgtccacgagtcacaaacggagtattgcgtcctaccgtatgatttgggcaggcgctaacatgcgcccctatcgtggataatggataaattaacgctgttccctcctgaatacctaaacgctccacggcatctgtgtcatcagaacaccatatctgtgggctgtaatatagcattcccggatcaaatcgccccccgcctccggaacaattttccaacaacagatccgggaattccgtgatcagccgctcctgcatacggtatactgctaacacataccgatgaagtaattcccgcccatgctctttgctcaaatatgcacttccaagatctgacagttggcggttcatgtcccattttacgtacatgatcggtgcactgcgcaaaatacgtgccaccgattcataagcatactcctcaacttccggattcgatagatccaatactccctgcgcccggctaagagccggctcacgtcccggtatttggatcatccagtccggatgtgcgcgaaacagatccgaatccggagagatcatctccggctcaaaccatatgccaaacttcaagccgattttattaatgctgtctaccaaatattttaaaccaccggtaagttttgcttcattcacataccaatctcccaacgaagactcatcattgttacgtctgccaaaccagccatcatccatcacaaacagctctatgccacagtctttcgcggtctgcgcaatatccaataacttttccgttgtaaaatcgaaatacgttgcttcccaattgttgatcagaatcggacgctctgtgtttttgtagcggctgcggatcagatgctcccggtaaaaatcatgaagtgaacgtgtcatcttgccaaggccttccgacgagtaagtgagaactacttccggtgcctgaaagctctgtcccggtgtcagcttccatccaaattcataggagtgtattcccattgtcatacgtatcatgtcatgctgcgacacttccacctgtcccaaaaaattgccggaatagacaaaatgcattgcatacacatctccttgggtctgcgttgtacctggtgtgaccagtgcaataaacggatgttcctgatgcccggattccccacggatcgatgccgctgactgtcttccatatccaattctccggcgctgtatacgtcgttctctggcccatgcgcccggcaaagtcagcaactcataatcttcctcataatccatatccagacaggcactatatattttttcaatggtaagcgtctgctctccccgattgtgtacccgcacagaacgagtgatcacatcctccctctcaaaagctgtatacgatagcacaacttctacaccaagcactcgatcctgacaaataagctctaacgtctgtactgctgtaccggcatcttccgtatccatctgtgaagcagtaacaaaagaagccggaagaccctctagtggtgtcttgccggaatatatttgatgctctttgtaaaggatttccgttcccaggcatccatgttcatctcgaatatccaagcagctttcccgaaaatccccaatgccgccggttggcagttccatcggaaagctttccaaaaaaacgcatttttcgcgtttgttgcgctctggtgtatatggatattcctccatccgaagcaaatatccaccgtcaatgtgctgtaaacgctccccataataaatatgacccaaatatccttccggtgtaatgccgatcatgtaactggtactcttggtatttagttggaaaatatgctgtttcttatcataaataatcattctattctttacacctttcctccatggatcacgatgatttattttgcaatagttggtccagatgtgactcaatcctcacgtatctgaccatttgcaatgttttgctgtatgatcgaatctacgacttcgaacaatgtttctgatccaagacgcgtcttactctgccgtccgtatacctgctgcgccgtaacctcatgttctttccaatccgcaccaccattactgttgtttaacattaacggctgtaaattatccatagcatgtgcgaacttcgactccggcgtttcaaacgcctcaaactcatcaaacaatgcgatcagttcttccttttgttcatccggtaagagcgaaaagatccgctcctttgcagcattctctcttgctgtctgcgtcttcagattctctgcatcatacgcataagtatcccctgcatcgatctctacaatatcatggatcaagcacattaacatcacctttgcaacgtcaattttttcattcgaatattcccgaagtacatacgccataatcgccatatgccaagcatgctctgcatcattttcatttcttccatgtccggaaagatgcgtctgccgaaaaatattcttctccttatcaatctccaatgcaaatgcaagctgtttttttaatcgttcatccatcacatactactccttttcctgaaatactgcatgttcaaaacatcatatatcccaagcagttatttatccctgtaatccatccgcaggacgaatcatgatcttcaggtacgattttaagtaagtgcaaacatatccctacaaatcatcttccctgtctctgttctaaaaatcgttgtatacgcatgctgtactgcctgctgtgataatgtatcttcatacatattcaccaaaaaatctgcctcaaccaaaatctgatagtcgatcccatccatatcctcataggtatgatgatgtgcgatcaaatattgtactctggtcgatacatcctccgggaaccgcaacttggcaagcaattgttgcgccagtcccggaccttcctgttcctgtaatttacccccgcagtcgccatatttttgttcgcatatatgaatgcctatgtcatgcgttaatgctgctgtctcaagaataaacctagtcttcttatccacattctccatttctgctattaattttgcatagctgtgaactttgcaaaaatgctgtattcttttcggatcccctgcatacaacttaatcatttcggcgtgcaacttgttaatcataataatttttcatcctactttcttactctaatcccattgcttcaataatccgcttcactgtttcctcatccaactctacaaattccgctatggatgctatactttctccacgtttgtatagctttcgaataaaccgttcattggttttggctattcctgtttcttcgccttccttcaagccctcttcataacgctgccgatattcgtattctaacgtcatatatcccaacctccaactctcattttggcgggccgaacgcactgcttcctctaactgcttcgtatactcatccgacgcaccttttccatcaatataatccaaaatccgtttcatttcgggactcacatcatccatcgtccccttcgtacttaagattatcttaactgcgtcatcatctaatgtcaatgccgtattttcctgacaggtattgcaaaatgtgtaaatatgccggccttctccgaacggatcaaatgtgcaaatgaagatcacataacttttctttaatttcgtgtaatcctgacctttctgcaatatgttaaggtctatcacgccttgataataccgcatccgtttcggtagattcctattatctgacgtctgcatctccaaattaaagaccgtgttctgatcatcttccacatacacatctaaccgtattgctttggcatttgcagacagatcaatactcttctgtgactgcggatatacgacctttcgaatcttgatcttcaagatcatctccaaaaatggttttacatatttgggatcatgcatgatcaatccaaacataaagtcgtcttttagctccagttcttcgtatggttttatttctcttgccatagtgtactccccctctttcctattacgcatttgcatatattgtttcgtatgtgataatatatcatctttcgagaagaattactattggcaatattcacatatttataagattattatgtacatatctcacaatattctactttctctgtagatcacagcagcgatgccggctttattgtcttcctattgttgttgactctttaaattagcataatgctgaccacctgggtaaactccttgattgacagctttttatgttctttgttcgtcatatctctttctccctgctttgcagttagttgtcgctaactcattgttttaagaaaagccgtgcatacacacggctggttttcttatatgcatttccccatatcgaaaagaatatcaggaaattttaatagtactacctataagtccgtttttactgctgtggcatgcacaatggcttcgtctctgctacaagagaagtcttcccgcaggctgtcatccgcattgacatgttccacgtcatcaaacatctaaacgactgtattagtgaaatccgtcggcaactccagcaggctctagaaccatctaaccccgactataagctgctgaaaggcttcatgcacatgcttgttttgccaagcagtccagtattgacactaaatatgatctaaaagctcctgttgtcaaaaaaaggattgataagcttctgcatagctatcccgatctgaatgaagcctatcaggctctccaaagcttccactgcataaatgatatgaccatgcctgtattccagcgtgcccagctgaccgaatggctcaatgtctactgttcctccgaagttccccaagtgcgccatgttgctaacatggtccggcactgacgcggatacatacagaacacctggaaatacaacaaatccaacggtgtctgtgagggctacaacaaccggatcaaagtcctgaaacgaacatgctacggacttcacaacctcgaatctttccggaaacggatcctgctcacatgcggtctcacacagtttgtcaccaatccagcggtactttttcaacgcaaccgtacaaagaaagggggttcacaattatgatcaaccgtaatgaaccattcccctataagctctatgttaaagaactcgaaacagagcttgcagtggcagaaaacaccatccacaaagccgaggaatcatttcaaacccacagaaataattaccatgatcttcaggattacgtttctatccttcaagatatcctcttaaaaaacggaatctcatttccagaactttacagttaattggggatcctgcagtaataaactgcccatgtcatgatcaaaaagttaggaggcagatacttaaaaatttatactaaaaaaaggactatctcgtcctcttatgcgtatttcggagtgatctctatatatccaaatatccacttctttttgggtcatcacatggtcagtttattaaagttaccctttttctccattattcaatttaaaaaattctatccttccttatttttcaaggctttcgaggcattctgccccatatctaaatgaagagccgtatatcatgcattttattcaaatcgctcatattgttttacagttctcctttttctctgggggattggttgcttactaatgttatcttctcaccatttatcattccacttatttccttcctcataactcacaattgtaatatcatccatttgaagagtctcctttaatttctctgatccataatttattttgttcattataacgtttaataattttagctggagcccctgcaattacacaataatcaggaaacgaaccctttaccaaagaatgagcaccgaccacacaattttttccaataactgtaccatccaaaattgttgaatttatacctatccaagacccgtctccaacaataatcggcctagcttcaccgccttgttcattaattggcttgctaatatccttgtaattatgagtatttgttataaaattaatattatctgccgttactacattatctcctattattatagtttcaaagcaattaaaaatacaattttcaccaatgcaagtgttatttcctatcaataactctcccccatcaattactattttagatgatctgcagagcgttgaacttaagccaatattaatagtccctttttttcttaatataaatctaacatacttacatatagtagctttctttcctataatgcatttaatacccctgcatttgcaatagatcattaacaatttattttttatactatacaaaaaatcaatgatgcatctcttcataatcttcataaatttctgtctcccttagtctctttctactttatttcaaacagcttaacatttacgcttgtaatttaaagtaagcgtctttaattacttataggcctctgtaaagataaccgtagaaaccaaaatcagcagcgcaacaatccatgtaatcattggagtattaaatttgccaactacatactttttaaatgtatttaggaaaatatcctgatagaatttttttcttaatctcatttaaagaatatatatgtaaaaaggcctccatagtcgtattaatcacaataaacagaatatatggcaacatcaacctttttagctttctatttgcaaatcctaggatgtttggattgtcttcaaccttaagtacataacctgacaatacaaaaacataggcatatgacatgtataaattaagatcaatatgattttttgtagcatgtcatttgcgttcaccgatataatactatgtcccagaattacgctgagaatcaaaattccttttacttcatcaacccagttgtctctgcttgcttgccaaaaaattttcagatgttttatccatatagtcaactccttatatagtcagttctttttcccttaaaacaagggatttgaaaacatttaaccccatatttaagcggagagcctcattatacattcaaaaaattttcatttcccataatgtgtaaatgtttcataatataaactaggaattcccacgtcatagcttttgccggcaacatccactgcaacaagttcatccttcttcgctaaatcagcaagcgctgctgtaatatcaacctctcctccaccaccttctgtctcaaagttttctatttgtttttctaaatacataaatatttcatcggttaaaacatattgaccaaatgtagcataatatgtttccccttcttttggtctttttgttttcaaatggctttctgcatattctgtacttggtttttcaaccattttacttactttcattaaataatttctgtcttcacaaaattttcctgaaataattccatatgtagaaacctgctgcaacggaacctctttaattgcaacaaccgcttttcctccggatttattatatgcattgattgtttgcctggtacaggatatatctaaatcactttcatatataaagtctccaagcattaataaagcaggctcttgattcaaatatttccgtgcctgatagacagcatgtccaaacccctttttttctttctgttcaacaaatataagtttttgaccaatatcatgtatctgttcataatatttttttaatccacctgacagtttattataaaatacatcatctttatcataattgaaaaagtctttatatatgttttcttctccttctccaacaataataataatttcttcaatttccgcttcatctaattcttgtaaaatacacaataatactggttctactattccgtctttgttgataatgggaagaaatgctttttttataaaatgtgtttccggatacatccttgttccaaacccagcaatcggaataattgcttttcttatcttacctcctgcatttatatcaaacgcataagcatccatccctttttcatcttttaaataatttactaatttttcttgacatattttatcctttgttaaaaactgaattgtaccatctccttgagaaccaacgcccttcgttccataaatccaatgacgaatattaacatcattcattgtcttatgtaaaacaggggcatttaattgttcagggcaagccggtgctatcttttcatcaaataatttctgtgctctatccattatggcacccagttcttctgcgtttccttcttctattgcccgaactgcttcgtgaataagttgatgatttccttgtcctaatgcatactgaacatcatgatcaatcattgattgtgcaaacggataagaacgatttaaataagataatattttttttgtatccttactggcatgaagatctgcaaaaacccaatgcaatgtttttccaactttcaatctagttacattaatttcttcatccgaaaactccattattatcggatgttctccatatgcacatgcctgatccattcgaccacatctggattttgtaagccgctctccagcatatgctattttcataatcccacgattacttaaatgcaagtcataaagttcattgaacgcttttgcaacaagaacacatatagcagcgctggaggataatccctttttcataggcaaggtcacttctgtaacatccagtttcattcccccaacattataattttctctcatatatgccgcaacgccacaacaataacaaaaatagttatcttttaatgcttctttctttaattgttctctatgcatctctattttaaatttcaccctatttccctctgagtcaaaggtagagatttgtaaattgtcactcaattccgcagaagcataaatacccaaatttattcctgtaacaatagccattcctggtaaaatatctgagttttgtgctgtataccttcccgcccaatcactgtgctctccgaataaacataaacgccccggtacaaataatttttttttggacataattatgaaaccccctttttcaaaatatttattcatttactatttatgatttctttcccagcaccaaatctgttttagagtccaaaagcatctttaatttatatgtttacattgcttaaacacgcacatacaaaaaatgcaattaaaaagccaacaagcctattagaatcatccattttacatattcttcaattgtagaaccgttatctttctttatttgtcagtacattttctcttcatcaaaaccaagtacatatataataatcaactcagatttgatgccgaattaatctgttcttcagttatgtctttatgtatatacgttccatgcttataagtagctcttaacaagccgtgatttctcatatatgccgagattcgcctttcaaaatggtttccagcataatacggaaatactttttctgtcgttctgtttttttccgaaaacacatctctattatcctgaaaccattgtgcattaattaaacagcattgatcggaaaaaccatatgaaaaccaaaattcatctgatgaatagcaactttctcgctctgcgccttctatatcattattccataatggatttgctacaattacacgtttatcctcttccattaaattaatagccttatttatccatatatcaacatctgccacatctaaatacacatcttcagtcaaatacaatagccatttggttttacaagttataatagacgcaatctgagacgctgaatataacataccatcataattaaatttcatttttttactgtgtaatattccttttacatattcacgcactgttggtcttcgataaaaagattttctcttgcatcccatgtatttcttctcaatacagtctatataatcataactataataataatcatttaccaatcccctagataagagattatgtatatagctttcaacttgtgtcctatctttcacattacttatcattagtgttctgtggtctatcaaatcacaatctttcataaataaacgattagaccactcctctgaagtgattagtttataatttttttcataacaattgctcgccaacgtaatctctcttgtgttcattttttctctccattctttatagtgcatgttcaacaaaattattaattatactaactttattaaacagggttctcttttttcttggggtttctactttcttttttgtggttctctcaaaaatcccatcttttccagtagttattctcccaaatattgggttgcacaaatcctcctcattttcacagggtttcttctacacccctccaacatttcctgtagttctactttcctttctgggaacacccccggcaagccataaatttacgacttgcgaatccactgttgtcaccggttcgatgctataatggcatcatagctctacgttaaagagcttcaaacagaacttgcagtagccgaaaacactattcatgaagccaaagaatcatttcatatgctcaaaaatgatcaccggaatcttcaagaatacatttccatccctcaggatacccttgcaaaaaggtatcccatttccagagttttgagaataattcagaaagctggtagtaataaactgcccatgtcatgatcaaaaatagggaggcagatacttaaaatttctataaaaaaaccatcccatccctttatgcgtatttaggtgcgaccttgatataaccaaatatccacttctttttttgaccatcacatggtcagtttataaagttaccctttgttccaattattcagttcttaaaaagctgtatttccttattttccaatgctttcaaggcattttgctccacatctaaatcaagagccatatttatttactcgtgtctcaaaaatattgtttcaaaaatctttgaacgcacaacaagtaagtgctaaatttcaaaaaggcaagcttaactcctcttatattttgatactgttccatataatacacgccagattcggcttcagaaatcaatttaccaaagctctttcttttccctgggcggttaatatgattgtggatataaaactgattatttacaattgccatgctgtacccagcctttttaagtcgcgcagacattatattttcttcgttgtataagaaaatattttcatcgaaatatccacatttttttattgcttcgcttctgaaaaacataaagctaccgcgaatcacatcaacataagtatatagtttattagaatcatatgagtacggattttttttcatacattttcttaaaattggaaaacaccaaaacacatattccttataactcggtgttctccaagccgcctcagattctattccatttatatccttcattctacatgtcacagccccaattttaggatcagccattaacaccgtcatacagttcttgatgttattctctgcatactcgatatcgcttactataacagcaacattgtctgccttcaacacttcaaccgcatatcttaatccaacattatggcctgcaccatatccgagattttttttattttttagtactattacattagaaaaatctacattatttaatagttcatcattaaaatcccgtgaagcattatccacaagtacataatgtttaaataaacaattatccatcccatacttaagtacattaaggcatctttctaaatcgttataattcaaaactaccaaacaattattcagcatctctttctcttctctttcacaaaatttactcccattctgaaatttggactaaaaacaaagcttactaaagtaagtaagattgtcaccgtcgcagttgcaatcattttaacgacaagtcccgccacatttgacgcaacaaaatgtgaacaaataaaagaagacacaaatacaacagctattaactgtatagcattgataaactttgcgcctaaatatttaatattaaactttttctcttgaaaatagtatttagaaagggctgccgtattaagtggaatatcaatacatacaaaagcaattatcgtcgaaaggagcactccatacacgccaataaaattaaccaagacaatattggtaatcaaattaaataatgcagatccaaatgcaataaatttaactttccaccacagtccatttgcgtctatatatatattcagcatgtcctttattttgtagaagaaaaaataaaatgcaaaaagaacaactgtcttatcagaaaatagattgttgttaccaatccaaagtttcataaaatcttgacacagggtaaaatagcaagctgaaaaccatataacaacaaaggaagtgagtgaatccattataaaaaagaatttctcactattattcttggtttccttaacgatataattacccgccaccggagtaattgcctgatcaatcgcaccaagaaacagtaccaaagcactaacaatataataatatgagttataccgccctagaatctcaagattcaagaaagaagaaattactattgtatctgctgaaatcaaaataacattactgattttttgaaataccattcctccaattttaaatttcaattcagctttttcggttgaagttatgtcaccttcaggaaaatattgtggatataatttttttgaaaaatagttgcataacacgctattcaaaatagtggtaatgacccttacaacgctaaatatatagaaattatgccacacaagtaaagcaatcacttgcaaaatattaagcgtaacatccactattactccgcatgaattgtatatatcaactctttgagttgcaatcaacaatgtctgcttatacgcaaatagataatagccaacagcagaattgatcaaattaatcaaatataatgcatatatatttattccatccggcacgcttccgttaatcaatacctttataaagggcagcaacgccaacccaacaatcgttataaataatccaatgaacttataacattttttgcaaaaagataaaattcgatttacttgtactgtattattttctgccaaaggcttataaagcaaataaactattgcgcttcccagcccaagttctgagaagtttaaaacctgaagaaccgaggaaaataaagaattaagacctacataagataatcccaatgtatatatcaatactgtccttgatacaaaaggcaaaagcaatccaacaattttatttataattcctgaggctatgcctttcgttaagttcttgaaattattcatgtctgccccctaatcccaattttctcccaagttcatcacatatgttgcgccagctaaaattgtttactgcaaagttcgaaattttatccgcctgataagaatcatttatgcatgctgtttttaatttatctgcaaagtcatttatatcatcaattttagcaattaatccataactatcattggaaattaaatcatgtattggagcaactccatcagtagatacaatataacatccacttgtcattgcttccagcagaaccaaggcgaaactttcccatcgtgatggcaatgcaaatatttttgactcagcatagtaagcattcaagatatttttatctgttatttttccggtaaaagtaattctgtctgctatgccttgattgtcattttgaaattttgtcaaatactccttgaactctggctctactcctccgaccaaaaccaaattccactcaggaatttcatctgcaattgaggcaaatgcctgtaacaaaatttctgtggctttttgttctgtcccaagtcttccaactgttagaatttgtttcttcttaggtttattacattctatatctgtgtaaaataatccattgggtaaatattctatcttctgaccataaatagaatgtaattcatcatatattcttctgctttcaaccgtcaccagatcagctgaattcaaaatccgtccaagaacttttctatctctttcgctttcccttattacccttattccattcagatccatatccaactttacatatactttacctgttttatttagaaatttgtataattttacacaaattaaagtaactcgcccccaatggtacaaattcagaaaatcaattttcttggcattcatagccagatacttaatgctggataccaacttccccttgttctttacagttatatgctttaagcctttaacctccttatttagatataaaagctcatcattatcgtaagagacaatattggcgtctaaaccaaactctttcatcataaaatatggaatcaatccaacatctttcatcaaattttcattttgtgctgtcaaaaacaaagtatcccatctcatagtatcatcttccaacctttatcttctttaaaatcttataatagttttttgttccaacaatccttttgatcaatttgataagcctcaatttattttgctttttcttatcaaaccaagatccctcgcaccagtgaatagtatatgagtctttatttatctctttgatatcatcgcctatcccgtaagggcaaaagacatttttctcatataaacaaatattgtctatgatttgtgtttctccatttgccaagaatccattttcttttaatatttctgttattttacatacattagcagtcagatcgtacccattcgtagttaagaaggttctattttcataggatctaagccattcttcaatgaacttattatgtgcgatggaaaaaataactgctgaggctatcatattgacagactcaaaactaaagacgccatcatactccaaaaagcagtctaaattcttttttacttcaacatccaagtcgaagtaaattccaccaaagttataaagtgcgtataacctagcataatcagatacaaaagcatatttttttgcatcatatgcctgttttacatatgcaactgtatttacatcaaaattactttcattccattctttgatttcataatctggcaagtatttcttccaagattctatgcacttaatatgtaatgctgatttttcagattccccaaaccagcaataatgaataattttaggaatcacaattgcccctccactacacaaaatatttcactgacaattcatcgtcacagctatttacttttaattttcttatacttataacaacggcaagtatcatcgacaacggcaaacctgccagtgatgaatcccacacatgccccgcaaggaaagaatatatcattatagaccagaacattagcttaaccatgaaactggcatatttcaaattgtgcactgacttgactatatacacaatcaatagcgcagaaactaataatccaaaataaagaaatatatctatcggatccatttcaacgcggatatcgccatacctctgtattccaaacaaaacattcatcattgaattttttgcataatacttagaaaagtaaaactcagcaaatgctgttcgaccattagtcaaaaagtcaagaactgttccgccattaatttttactccgccaatatagtagtacatatatgcatcgattctcttttctacaagaggataaattacaggatacagcactacacctaatccgagtattgcaataataatagcaatcaatctaaaaggaaatttagcaggattaagcacaaaaatatacctcaaaatatatagaaccgttatcacagcaaataatgccatgcttgactttgatccatttattaccattgaaaatgttgttaaagacacataaaataaattttttaaattcctttttctataaagattttccaatgaataaataaaaatcacgacaagcattacaacaagtgcattgttctcaaaatagagtccctgatatccagacccttcatatctttcatagccgattccaagtattctagggataattatgcttaaagacacaataagcatcagattcctgagcatcttgtcaaaataagcactatctattttccctttatcaatcaagcccatgaatgctccagctgtcacatatgggcatagcaatttcaccatatttaaaatcgcatcaaataataataccccacagctcacctgatatataacaacaattagattagctgcaagaagtagcatcatccaaatcgtctgtttctttgaagtctttattacaataaaagtggataccaatagcacggtgaatcgatacacttttccaaaagaagattctccatcactaaacaaaaaaacagagtttattatttggatgatcggaatcataatacaaagggcataaagtaaggtgctagaggacaatctcaattttatatgcgtatttttcattcttttttctccatatcattttctccatagataataaaaaacaatgccgaaaggtgacattaaagatgtcagtgcatttcctctcggtattttagtaactactgattccttatatttctgtcttgccgcaatcttatagcaatcatatattattgcccctttaatgtttgccttaattccacactctttgtgcataagggcaacgcctctatacatggagccaattggagaagcaaattttgacggcttgtcattcgctgtcaacccaccggcaagatacccaccctgataaatagccttgttaatatatacagttttatatttaattcccattgaaatccaaacaacatcttcgctcataaatctttcgtcttttatttcaggaaacttatattttctcaacttgtctgtgacatacacctctgccatgtctccgggtctgttctctttaacacggcatgttggataatcacttataaattcatccttatctaattctaatattgggcttccattctcatagcatcttaaaaaggcaaatgaacacaaatcttttattttatcttcatatttatgggcatattctctgataatcctacttgcactaggcagtagcaaatcatcgctatcaacaataattactaagggcgtatcgatatgctgcatagcaaagttaatagctgtatgttttccgccattatcttttctgtaataaaaaactggaaaatcatcattctcaaagcccgaaactatgttttttgttccatcagtacttccatcatctattattagccaattaaagttattttcttcctgtgcgatcagcgaattatatagattaggaagtaaattggccctgttatatgtaggcgttaatactgtaataagtttattttcattcatcagctactcaccaaccacttcatagaatatggatgacatttcttttgcgatccgctcccaattatactggctcaaatcatattgcctcttcttagaatccacaacacgagctgaaatcttttcggcaagcatcacactattctcacattcaaaataatcatcctcgtccagatttactaaatgcgtagctggaatatcagccaccaaaacatctaagccatatttcatggcttcaagaagcaccaacggaaatccctcatttctggacgccagtacatacaatcctgcatgcgtatacaattgatgaagattgtcgccataggtatatcctgtaaatataacatcttcatctttgctgagttcttgaagttctttcatataaccactttcaaactcaacccctccggcaataacaagcttaaatccgtttttccgcgccaacttgaaagcttttattaacacatcaaatcccttctcatttgttattcttccaacactgagaatgtatttgcctttttccacacctattttctccacataatctgtattaggagatactggcaaatcgtttattccattcggcatatatacagacttttttcttatatcatctccgtatttctccatctggaatttatttacaaagataatcttatctgccgtttttaatgcgattttttcagaaaatttgagtaatgctttttcaaaccaattccacttgtcatgctcatagtttggactatgaaaggtcaaaacaaccggaatttttttaattttcactattggactgcatagcgccggaccaatattatgataatgaaccacatctgaattttttaacaaaacattaaacgaagaaataaaggaatgaaaaagaggttcaaagcctttgattttggtagacggcagatctataaacgagatatgcttgtaattaccattcgattgcacatatggcttccgcctatatacagtgatatcgatgtcatcgttcagtttgggataaagcgattcacaatgtttttctactccgccctctatcatcggaaatcctcgtagtcctatcacacttattttcatatcaattctacacctttatcttaattgtcatcaaagttatgaactcaagtcgcataggaaacttcacaatatttgcgtttttcccaatttactcaaatactcgttactatccttagtccattttcttctttgtattatttttctaataccatatctacgaacagcatttcgaaccattcgaaaataatatctaactttataaaacgctgcttccttatatttaaaatcatctattgtaacaaggtcatttataaatacatgcccaggtacaacttttatggcttgtatctcattaaagttgtcgatttcaaattttctcctataaaaatggcaatatagcattttcttttttctcaaattcgaatcaactacaaacaactccccattttgccagaggacaataaactgtttttccttgctaatcccatcaaaataaaatatatcttcacatgtgattggatctctcataacatcttttggaagccagaatttaactccatttagcaggcattttgagtacacgcccctatattcatcgaaatacattgaatcatcggttttatatacatccatataatttaacgacggataaccattttcatcgaacctatatattccgtttaacttcccgttgtttttataaatagaaagatgtcctaaggctaaaaaacgatcatatttttccaggatttcatcggtaagatattctctcatccctcccagtagcatatcgttgcaatcacaatagccccaaaagtcataattctgagttatttctttaaacgcctcaccaaatattggtttatagtcacacaatttgtatggagcattcaaggcaatttcaaaccccagcaaatcttcaaatcgcttttttaattcagatagtgtcgatttaattactgatacattgcgggctggcttataagaattgataaaatcttcatcatcaacaaacaaatagaaatcaattgtttcatttgcttctgctgttttaagccatagcttaaaaaaatcattcagtttcccaatatatggaacaatcaaacaaatcgatttcatatctctcttcctttcaaaacgtcacattcttagttgacagcccacctctccccattcgtacttggaaagtacgattcctagcttctcgggtctgctcaaacattgcctctcttaatttttcccccatcttgactccaaccaatttcctgtgttatttacaaacaaaaaaaggccgagctccgccacccaccacctgccttatcaacagtctgtagttctctcttcgcttcactcgctctttttgtccgccgttccacaacacgcgtcactcgtcatcttgcttacacggtttcatataaacatttgcagttcttctcgctgaaatgtaactttggttccagcaccaaataactctatctctactgtccattcgtcggcatctggatctgcatataagaattttcctcgtactccttcaaacacacccgagagtactttcacttgattctcaaattgcacttcgtccttttgtcgatcgatgacatcagaaatcatttgacttaattcttcttcactgaccctggcgatagttccaagccctacttcaataggagtagctcgtccaaaaatcggaacatccattttggcaattcgccgatgtcgatccactgttcgaatccatccctgtacctttttcaaaggtcccgaagtgatatatacttcatcacctatcaaaaagccttcggagtattgaacgatatgatctgcatccatcatgagtgctaagaaatcctgctcatctttacggatgggcgataccgtatcaccatcttttaacactttggtgtactgtcggattttttttagcccgataatgacagcatcaatgtcgtcagtgtctacaaatagatagcccggaaataatgttttttctacttcatgccattcctgcttgaagtgttttttcgttttatacattgggataaacatttcgcgataagcagtctgatcaatatactgctgacattgctgcttacatttttgttctaatcctgacattgtgtgaatcacataccacattatttcccacctctactcatgtagctgctttttgttgttggtactctgcaacggtgagccgtgcagggatttccaaacccactcggatctgcctgtcctgaccaaatagacgtatcatcagatttgcaatgcgcttgtggcggtcgatcttgcggacatgatccgttttgccggataacggtcctcgctcgacaaccaatttgccatctacgatataatctagcgaatatcgcacacagtcgtcagtatcaagcatttccatcaggaatgcctgctcttctgtgcgaatcggatagaatccgcctccgatctgaaccggggtgactgtaccagaaagatgctccagatacgtttctagctgatctgcgttttcactttgaataaatacataaccggggaaaagtttattgatctcaatatgccattctccctgatacttatgcatgccctcataagatggagaaaagattttgtcagcgacttccacaggtattgcctacctgcatttctcgatggcagtatcttcttgaccgttggtagtttgaaccacataccacatatgtcttcttccttctttatgatgactatgccattttgatgtattaaatattatgtcgtaaatgtaaatttgcaattttcagtgtagcacagttcattttagaatacaagggaaaaatctggcacgaaataccatgtaagcataagattggcgaaatccccgaaagcaaagggatgttgccaatcttttttgtgcagttttaaattatttttacatattataaagctgaaattttgaaaaaagcggaaataatcttcttattattttgctatctaatctaatttttctaaatttccaaaaaaacaaacctccctatttacaagggattatgtcacttcctgacataatatttattatgtcgatggtttaattatattttgcagctgacatatagtgaatactgttttaacttttcagataaaatacagaggactttttgaaatctctagcatcaaaaatccctctgtatcattttatattacttgtgatgattagttgtgacaattcattaataagctacattaacctgatatacataaattccatttctcgttgaatacagataataggtacctgcagaaggaattttgtatgttaccgtagatggtgttcctgtgatcgtagcatttcctactgtgtttccacctacgctaccggatgccagacgcaatgttctggatgcggatgttgatgtggatgctgccgtaacttttaccgtacaagctcccgttgccgtaaacttgatatatcttccggtgctgttaccaccaccattcatttgcaatactttgctgtaacttgtgccatttacagtagtgttgcgattaagcaccgctacatttttgccagaagatgccccaattgtaaaacttcctgatgtaatggcatttgtatggtttccgtaagtaagatcattggctgacagactgatgtctgtgccctttgtgtctgatgctttttctaagatccataactggcaggcaccaccccagtaagaatactgagcgatattgccgcctgcagccgtactccaattatatacatcaaggcaggaagcactggaggttactcttgtcttaatcgcataggctccatttgatatcttttgaatgtcaaataactggttgttggaacccttatagctgtattgcaaaatattagcgccatcagcggtacttttgcctgcaacatctactacctttgaatatccgctggcacctgtataaatatagtaatatcctgttgcagaatcctttaccagcttgaatttctgacgatctgtgcctgtgtacgtatactgctgcacattagcattgttagaagctgatccattagcaacgtccaaatataaaccactgaaggaactcttaatatagtatgttccctctaaagaagatgcggaactgttggagctattggaactgctagagctgttggaactgctgctctttggatatactgatgcaatggcatcaataatcttttgctgtgttactttacaggtacttctgtcaatcacgccaaaaccatatgtgcccgtataaccattatcccaaaggaccggcaccatgccatacttcttagcataagtacatacttttttcgcaaattccgctctctgtgcagcgcttgtagaatcgtatgctgacttatcaattgaaccatactcaccgatcactaccgggtaacctgctgctacgaacttgttatacaagctggaaaactgtgatttcagagcagattcatcaccccaggaagatgtctttgaactgtttgttgctgtatctccccactgtgttacattagaagattcctctccacagaaatcccatggatcatagtaatggacagaaatcataattcttggagtagaaatgctgctgtctctgtaattgtctgttggcagggaaaatccgtaattaccaactgtgtatgtaatattggtattccatcccgggatcatgagccaacgctttgcattgttgccacctgtctgacgaactgtgtctacaaagatctgattgtaagcattaatatttgcatatgccgtggatgaaggtgttccgtatgttccatcgaattcttcattcatagactcaaatactaaatgctgatcataatttttgaacttagttgcaatctgtttccacacagccttatactttgccttgatcgctgtctggttggaagatccacaaaacagccaaccgccatccaaagtagtataaccatcaccatgcatgttgatgatcgcatacaaaccattgtttacacacatatctaccacttgctgtactctgttcaaccaaccggcatcaaccgtatagttgctgtctgagccgatgtgtcccatataggataccggaatgcggatggatgtaaaccctgcgtttttcaccgctttgatcagattttccgtaatggtcggattaccccacgctgtttcactaggtactccgttatttgctgcttccaactgatttcccagattccagcctgcgcccatcgcagatacaaactggctctgattcagatcttgaaacgatccggatgctgcctctgattttgcttgctgaccgaatgacaatacgctaatagaacaaataaccattgccagtgtcaatacatgcgccaaccatttttttgtcttgttcataaaattaccttccctttctgaaactgtttattcttttgtacccattccttggaatacgcttgatttctgatccccattcagatattttccctatttgctttctcacacaaacatacttttcccaattggcgcagttccgttccgccgtttccctatttacacttttttgtttgaattgcacataatcatattgacaattatagacatattatgaattttttacaatactcattcatgtttcgttcatattttcaccataatgcacaaagaaaacattttcgaaactattataaaaatgttttctttgtgcaaaattacaaatatctatttactctcttttcaatcttttctcttttcaatctattctgtttcaatctattctctcttcaatctactttctttcaatctattttcttttcgatctatgctttttcaatctattctctcttcaatctactttcttttcaatctttcctattttccctaactgtccgcaataataaaatactcacgacaagcaataccggaaaaatgacacccgctaaaattcccattttcagattttcggatgcaatatcagagacaaaccctaccaaagtaggccctccggagcatcccgcatcccccgccagtgcaagcagtgcaaacaatgccgttccgccatttctaagagaagccgatgccttgctaaacgttcccggccacatgattccgactgacaatccacagatcgagcagccgatcagcgcgatcaatggcgatgctgacagcgatatcgtcagataagacaggatacataacgcactgctgccaatcataaattgatccagattgatcttatcgccaaatttaccataaaaggctctggcacttcccatgaggattgcaaatgccattggtcccgccaagtcgccgatcgttttggtaacgccaagacctttttccgcaaaggtcgatgcccactggctgaccgcctgctcgctggctccggcgcacagcatcataagcataaggatccaaaatattttattcctgcataattcgccaagcgtcatgcctgtttcgccttcctcgatcaaagaagcgatcggcactttgcaaaatacgagtccattgatgatcggaacggcagcccagataagtgccatcactttccaatgatcaataccgcacagcttgaaaaacagcgtggaaaaaagtacaactgccacatgtccccagcaataaaaggaatgtagtaaactcattgccttctctttgttatcactaggacagctctcaacgatcggactgatcaatacctcgatcaaacctccaccgatcgcatacacgacaaccgcaagcaatagtccgacaaaagcattcggaactatttccggcaagatcaccagcccgatcagaccggctgcagaaaagatatgcgccagcacaatggatacccgataaccgatccgatcaacgaatcctgccgataataaatccaccagtaactgaataccaaagttaaaagtgatcaacatcgtaatctgactgagtggaatatgatagcttttttcaaaggtcaaaaaaagcaacggcacaaaattattgacgatcgcctgaacgatataacctgtaaaacaggcgtacatcgtcttttgataattgtttttcataagtctaatctccttctattgatagttttgtgcctgcgcattccacatcatagcgtaaattccgtctttttctatcaattcttcgtgcgttccctgctcctgcacctgtccgtcttttaacacaataatccgttggcaaaaacgacagcttgacattctatgggatatgtataccgccattctgtcttggatcagtcgatcaaaacttgaataaatttcatattctgccatagggtctaatgcactggttggctcgtccaaaatgataaaaggcgctttcttatataaggcgcgcgcaatcgcaattttctgtgcctcaccgccggacacttcaacacctttaatcccgacattatacaatggattatggattccctgttccattttccggacacgctcccaaatgcctgctttctccaaaacctcttcaatctcccgctcatcgtactcctcactggcagcaacattttctgctactgtcatagcgaacagtttgaaatcctgaaataccacaccaaacattgccaaatattcttcataatcatattcacgaatatcggtcccatttagcaaaatacgtccgtgtgttggctcatacagtcgacacagcaacaggatcaaggtcgtttttccggcaccattcggacctaccagcgcaattttttctccatagtgaaatgtgagattaacatgctctaaactatcctttttaccaccgggatacttaaaacttacatcctcaaaggtaatcaccagatcctgtggaggtaaatcagccgtaggttttccacccgtctgtttgcgatttggcaactgcagatattcgtaataatgatgcaaatactgcatattaagcaacaccgtttcaaaatgatctaccatatattgacaagcacctccgagtgccgttagtgccgatacatacttgaccacttccgctcccgtgatcatcccattaacgcctctgactccgatcaccgtataggaaatcactaaaagcaacgcctgtacgatcaaataacggattcggatcttttcctgaatgtctagctttctatcctgaatattgcacttttcatcccacactttcgtcatatccctcaacagcaaatcctttaaggcatacagacggatctccttacctgtcgcatatttgctgaggatctcgcgataaaaataatcgtccttgcgaatcgcatccaaactttcctcataaatttcatactgctttttgttgcccttcttggatatccacataaaaaggaacatagaaaacagatttaacaagaaaataaggtatatgatccacttagaatttaagatctgcatcacaccatttccggtcaaatgctgttgctgtgtcaaaattgggacaagcacaacaaaggcataaaagatagatgcaacatcaccgatcagcacgcctaatttatccgaaaaccagtaaataccaccgctttctttttcaccttctaacgctgccgtcaaaagctgcatactatcctgcgactcaagatcttgataatctaagcttgcagctttactggatatatccgccttgattcggtaacgaatattatctcgcatcgcatttcctgctttatccaaaatatggtacaggatcgtcattgcaaaagtgatcaccaaaagttggtagaccatattcatgatatgtcccttcgcttcccgtgcaactaatgcatttaagatattgcagccgtatacaatgcccacataaggcagacccgccataattatattttttccaagattacaaggcaggatccacttgcacagccgatgattgatcccgataacatgcataaatttctttatgatcgcccctacagattctttttcattgctgatcgcatgcttactcatcgaaatcaccacccttctcattgtagtattgactttgtatttcaaacatcttggcatatgcaccattctttttcattagttcatcgtgcgtgccgtcttctttcacctgaccattttcataataaatgatgcggtcgcagaatttggtactcgccaagcgatgggaaataaaaatcgttgttttcccttccgataaccggtgatactgttcgtaaatcgctgtctctgccagaggatccagcgcactggtcggctcgtctaacaacaaaagcggtgcgtccttatataaagctctcgccagtaatatgcgctgtaattctccgcccgaaaacaacacgccatccttatccaaaaagttggtaaccgctgtcttttccttctttggcaaagataggaccttatcctcaatatctgcaagctgcattgccgttcgcagttttggttcatcaatattttcctgtttttcacaagcgatattttctgctaccgaagttgccatcaccatcatgtcttgaaatactgctccgactaatttgcgatattctgtctctgaataatcagaaatctccctgccatcgaccaaaatctgtccttcatttggatgataaaaaccgcacaacaactttactaaagtggtcttgccagctccgtttactcccaccagtgcaatattttcgcctgcctttaccttgagattcagattatgtatcacatcctgttttgcaccgggataacgaaaacatacattcttaaactcaagcgtaataccgttttccgttttgtctgtcccatttttagcacaagtgttttccgtattctctttctctactgtatgctccgaatcctttaactccataaaactgcggtaatcgttaatgccccagttgcaacggatcatttcactgttagctcgaacgaaaccgtctcccatattaccgccattcagccagccagcaaaaccggtaataattcccaaataaaaagtaaatgtggtcgcattcaattcccctgccaaaaactgatttatcaacaccgtatacgcaatgatgtcacgcacgagcgaccagaccgtgtccgacagatgcggcagaaaataatacatctccactcgtttccatactttcattcgtctctgaaccagtgttttcatgacatccacaaaccact

SEQ ID NO: 1064 - DNA, 6400 bp, unidentified
  source 1..6400: mol_type = unassigned DNA
tcaatcttcgatcaatccttttttcttccatgctccgctccgccagcgcaacatcatgccgaccgcacggctgcattcatctgctgtcagaccgatataagcacccactactgccagatgcagttgtatccccagcagatacgttcctcccgctgcacacaaaaacatgaaaatagctccgaggatcaccggaaatacagcatctccactggttttcagtgcatttccgtataccaaatttgttactcgtccggcttccagggcaatatcaataaacatcagcttctgcactagttctaccatactcttatcctgcgtgaaaaaagagatcaggaccggggcactgactgcaaacagaaattctgttcccatcgccagtaccgctccgatcgccgcagattttttagtctgcttatcacatatttcatattttcccgcacccatgtaccatccggtcataatggcattcgcctgggcaagtgcacttcccacacagaaggataaattcgtgatctgtgccgtataggagcgggcagccacattgattccttctgtatccatctggttcagaaaacggatcaccagtgtcatcgctacattataaataatattctccaaagcggaaggtaatccgatccggatgatcttccgcaaaatctctccggaatttaccctctccgaatatttttttgcagggatcagccgccgtacaaagatcactatcaatatcagattcactactttagagatcactgttgcggatgcaaccccctgcacgccgaggtggaatcgaaacagaaacacggcatttaatataaagttcaaaatattacctgtcacagttgcgatcagaggctgtttcgtatatccaaatgcacgcagatatcctgccaatatgggaatcatagcgttcagtatacttccgcctccgacgatccgcaggtattgtacggcaggctccttcaatgccggtgcaatacctaccacatacagaatcccatcggaacagaaaaacaaaaacacagacattacaacacccaggatcccattaaaccataatcccaaagtctttgcctgacaggcgatccccggtctgcccgcaccgatattctgtgtcatcacagccagcattcccatagaaactaccgaatacataataatgaatacaccgatataagtatttgctgttccgactgctccgactgcctgatctcccacagaagaaagcattaaggtatccaccattccggacaacatgtaaaagatcgtctccagacacagtggtacaaataattgaaataatgacttattctgtccttccatcgtaggttttatatcctttctgcggttcctaaaaatttgcattttcattttacaactattcagaatactattccgaatagtctcttcaatttttacatattactactttatctttcctaaaacttgcatttttaccacagaaaattgacttatttctacttttatagtaatctgaccataatatcctctgctccactccacagaaaggcctgcctatgtaccctgaattaagagaagaacgcattcacggaacaaaagaatttccttttagctgttatcacctgcatgatatgcctgctttttttcagattcctgtccactggcatccggaggtcgagatcatatatgtccgctccggctctcttaatgtcatcattgaaggggaagaatacgaagcggccggcggctccgtattctttgtgaatcccggtgagcttcattttatgggttccgcaattccgggcgtagactatcataccctgctgtttccactggaatttatttcctttcagacggacgatctgttggaaacggagtttctccttcccctgcgtaaccatgaattgcttttgcatcataatctttcccacgaaaaaagctgtcctgacatcatttctctcatccgtgagatcctgtctgtcagacagcttccaaatacattgaacgggcatttccgattacgtattttattgttgtcacttatccaaaaaattgcttcctgcggaaccattaacccaatgggctccaaaaggaacgatccgatgcagcgtgagatactgacttatctgcagtataactacacggaaccccttcgattggaaaccctggcagagcaatttcatttatccgaaaaatatttgtcccgctattttaagcagcattttcatctgactctgacgcaatacctgatgcatctgaggctgacccatgcctgccatctgttagagagcacctctctgccggttacagaggttgccctgcagtccggcttccccaacgtgagtcattttatccgctgctttcacaggacatatcagatatctccgctgcaatatcgcaaacaactgccctatcaatgatcgttttcaagagctcttctggcaagctccaggcatcccatgataccctgatcatcgtggagagatgccggcaccacataatgctccatgtctgcaagttcatccgttacgatatagccattgatgtattccttaagtttcttgcggatgagggggaataactgctcctgatgcatgacaccaccgcctaaaatgatcatttccggagataccgtcatgacatagccggtcagtgcctgagcaatgtaatctgcctccagctcccatacttccgggcaatctgccaggtccactgctttcctgccccagcgttcttcgatggcagggcctgctgccagaccttccagacaattcttatgataaggacatcttccggcataagtatctgcggtccgcttcgtgatcaacacatgtcctgtctccggatggagcattccgtgatgcaactctccattactataaataccaccgccgacacccgtaccgatggtcagatacatgacgcactttttcccttgtgcctgtccgaaagttacttcgccgaggacggaaccattcacatccgtatcaaatcccacggggcaatgaagtgcctcctgcatctgccccacaatatcgcagtccctccaggccagctttggcgtggttgtgatataaccgtatttttcggaacctctgtccagctcaatgggtccaaaacaggcaattcccaatgcatcgatccccttgtccctaaaataagcgatcatcttaggaatcgtctccttaggcgtagttgtaggaatcgatacctgttcataaattgtaccgttctcatccccaatagcgcagaccatttttgtaccgccggcttccaatgcacccagacgtaattttgccatataaactccctgcctttccagattctgtctgtcaaatatatcccgagcttttccttcggattctgctctctgtggttagtatagcaaatccttttctccctgttaatatcaatttttatagagtttctctctctttttaattttctcttttccggggaatctttcctatgatatacttgttatactgttctcagttacacacaaattgcaggaggttatatcacaatgaaaaaaatatggatcgtcggttccctcggtcacatggggcaggcgttgatcaggttgttagacatgatggaatatgaattatacgaaaccgataaggacgagctggatatcacggatgaacatgcagtttccctgttcatgcaccgcaatcgtcccgatgtcgtcatcaactgtgcaggatatcatccttccgccggtgcagcgcagtcggagacagatatggcttacaaggtaaacgccgtaggtgcgaggaatctggcgcagtctgcggagagcattcaggcaaaactcatacagatctctacggatgatgtattttccagcgcatccgacacaccctataatgagttcgatgatgtaaatcccgtaggactgtttgcaaaatccaaatacgccggagagaaattcgtcatccagctgatgacccgctatgtcattatccgcagttcctggatctatggcatcggcaaagactttttgaatgaagtactcgaagctgccgtggaccctcaggtatccacaatggaattgctaaataacgaccgtgcggtacctacctccgctgcagagcttgcacgcgtggtaaaatttttcatcgacaacgaccattacggtatctatcacgccgtatgcagcggcggttcctgcacacgcctggaattcgcgaaagagatcctgcgtcttgccggaaaagaggaccggcttaccgtcacagtaaaagacggcaccccggagaaatattccgtactggataatatgatgctgcgtcttaccggcatcgaagaacccagtggctggagagagacactggcttcctacatgaaagaaaccggaggactggaatagtggaaaaacacaaagaagaaaagaaaaaactcggtttgtccaccaaaatctttatcgcccttttaaccggtgcggtatgtggtgtgctgattcattattatatgccggaagggtactttagagatacgattctgatcaacggtattctctatgtactgggcaacggttttatccgcctgatgcagatgctggtggttcctctggtattctgctccctggtctgcggtgccatggccatcggtgacacgaaaacgttgggaactgtgggtgtgaaaacgatcctgttctatctatgcaccactgctttggcgatctgcgtggcactgggtattgccagtctgatcaatcccggcgttggcttaaatattgcgttgccggaggatgccaccgaagtcgcgaccacccaggtagattttgcggagacgttgttgaatattattccgaaaaatatttttacctctctgtccgccggagatatgctgccgatcatcttctttgctttatttgtcggcattcttctggctgccatgggcaaccgggtctccactgtggcgaactttttcagtcagttcaatgacattatgatggaaatgacgattgcagtcatgaaagcagcccctgtcggtgtcttctgcctgattgccaagaccttcgcaggtatcggcttcgacgcttttgtgcctatgctgaaatatatgggaagcgtcattctggcactggcggtacagtgtttcgtggtatatcaggtcatgctgtttgtgttcacccggttgaatccttttaagttcattaaaaagttcttcccagttatgacctttgcgttctccacttccaccagtaatgcgacgatccctctgtctatcgacactctgtataaaaaaatcggtgtctccaaacagatttcgtcctttacgattcctctgggtgccaccattaacatggacggtacttccattatgcagggcgtagcagttgttttcatagcacaggcttacagtattcctctgaccccggctgccattgctactgtcattgccaccgcgacgatcgcctccatcggtactgccggtgtccccagtgtcggtctggtcaccctgtccatggtactgacctccgtgggactgcctaccgaaggcattgcactgatcatgggtatcgaccgtatcctggatatgctgcgtaccgctgtcaatatcaccggtgatgccatatgtaccactatcgtggctaagcagcagggtgcctttaatgagaatactttccgggcagataactgatcacctgtttacagctttccagatggctgtcaccgtataaaaaaagagtgaaacattctgtcttgtgctcaagtgcaccgtcagaagtttcacttttttatagctcgcagctattctatttcagtttattgagttttgcccggttggcaataacgatcagccgcatatcctgtgtcagaggttcttccggatcgatattggtatttacattttttccttcgatgatcgccaccacgttaatggaatattttttccgcagattcagctcgatcaggttcttcccgatccactgctgtttgacttccatttccaccatagacacatcctgggacaattcgataatgtccatgaaaccggagcttaacagatttttggccaggtggatccctgactcactctcggggaatactacacggtctgctcctactttcgtaaggatcttgcagtttatctcagtggcgcatttggcgataacggtctttacgcccagttctttacacagcatggttgccataacactggcttccagatgatttgccatggtcacaatgaccacatcaatattcgcaataccgatctgtctcaacgcttccggatctgtaacatctgcacatttacagtagggaatctctgagattgccgcattgacaactgcctctctattgtctaccgccaccacctctgcgccgttctctgccaactccttcgccacacttcttccatatcttccaagtccaaatactgcataggtctgattgattcccat

SEQ ID NO: 1065 - DNA, 20072 bp, unidentified
  source 1..20072: mol_type = unassigned DNA
atgagtacccagcgctttgatatccgccacgcgcccgccccgcgggaatccttccgtctgctgtacatcagcaaaagcaaatttggcggcgattggaacagtaccacccacacccactcctgcacagagctgttctactgcctcagcggcgagggacagttctaccttgccgggcagctgttcccggtaaagccggacgatatggtcattgtgaacccgcaggtggagcataccgagcttagcctgaacgcctcgcccttggagtatatcgtgctgggcgttgccagcatggagtttttgttcagcaaggcggatacgaactacgccatcttcaattgccgggagaaccgggagcggatggtcacgttgctgcacatgctgctggccgaggccgaccgcagcttagacggctgcgagaccgtttgtcaggacctgctggaggtactgctgatctggctggtgcgctgcaccaccatttcgctgcagctggaggaggctgccccgaccgagaaccgggagtgcgccgagatcaagcggtatctggacaccaactaccgcgaggatatctcgctggacctgctggcagagcttgcccacctgaacaaatactatctggcccacaccttccagcgggagtacggaatttcccccattacttacctgaaccgccgccgcattgaggagagcaagcatatgttgggcaacaccggttacagtctggcgcagatcagcgagctgatgggcttttcctctcccagctatttctcccagtgcttccgcaaggcggagggcatgacccccaacgaataccgccgtcagacgcggcagggaaaacgccccgccccgacaaaacggcatgaagtataacgaaaacgaggaatttatgatgaaatccgttaccctttctctgctccagtctgctgcaaatgcctttgattttggcgggcctgtgctctgcgatgctcaccactatggtgaggggcatatcaacgacacctttgtggtctggcgggaagatcattccaaacgctttattttgcagcgcatcaacacagatacctttactaacccggtgggcctgatggagaatgtctgcggcgtgacccggcatctgcgggcgaaaattcttgccgagggcggcgacccagcacgggaaacgctgaatgtcatcccaactttgtcggggtcgacttgctatctggatgcagacggcggcgcatggcgtgcctacgactttgtagaagataccatctgtttgcagcaggtcggcagcgaaaccgacttccgcaccgtggccgagacactgggcaaattccagaaccagctggaggattacccggcctccaccctccacgaaaccatcgcccgcttccacgacacgcccaaccgctatgccaattttgaaaaagccctcgccgccgatgcactgggccgggcaaaaaatatcacgtcagaaatcgaatttatccatgcgagggagcaggactgccatgtcctgctggatcagctggcagctggcgaaattcctctgcgcgtcacccacaatgacaccaagatcaacaatgtcctcatcgatgctgctaccggaaaaggcatctgtgtcattgacctcgacaccgtgatgccgggactttcggcctacgacttcggcgattccatccgcaccggtgccaacgactgcgctgaggacgaacctgaccagagcaaagtccattttgacctgcatctgtacgaagtgttcgccaaagggtatctctccactgccggggcatccatgagcatggcagaaaaaaagagccttgcatggggtgcaaggctcatgacgctggaatgcggcatccgttttctgactgactatctggagggcgaccattatttccatattgctcgcccggatcacaacctcgaccgcgcccgcacccagttcacactggtgcggcagatggaagaggttttcgatcagatgctggaaatcgtctgcccggacaatcactgatttcgcaatctcctccattcggatacagcaagaagcatggacgctctccttttcgggggcgtccatgcttctttttacagcttatcgctatcgtctgtggcttttggcagggtgcgtccggggggacgcaccctgtttttttactatgcttcatcattttctgcgcgcagcatccggtatccgacaccaacatgggtctggatcagatgcggcgcatccgggtatcgttccaattttttgcgcagggatgccatgtaaactcgcaaggaagcaatgtcattttcctgcgtactgccccatactttctgcgtgagggaggtatgcgtcagcactttgcccacattatgcgccagcacacacagcagtttgtactcgatgggggtcaaatgcaattcattctcgctcagccagacgcagcctgccgagaagtcgatcttcaaaggaccattgacaaaaaccggactatttatgccgtcagaagccagcagattcaatcggcgctgcgttacacgcagtcttgccagcagctcatccacggaaaacggctttgtcagataatcgtctgcgccgttgtccagtgcctcgatcttatcagaatcttcgctccgggcactcaggacgatgatgggcaggttcgaccatgtgcggacgctgcggatgacctcgatgccgtctatatcgggcagcccaagatccagcagcataatgtccggattgtggctggtagtcatcatgatcgccgtttccccattggaagcagtcagatatttatagccgtgggttttcagggtcgttgtgatcagacaccgtacaggaacatcatcctctacgaccagaatggacggcttattcatgaatgttcacctcgctttgcggcaatgcaaaggaaaagacactgccattgggaatgttgtcacgcagggtcaatgttccgccgtgagccgtcaagatcgcacggcagaggggcaagcccagtccaaggctgcggtggctgtctgcaatgcggctctgcccggtataaaacatctcgaacacctgtgcttttgcgcgatccggaatgccgggaccgttatctgcaacgtccactacgacctgatgttctttccggtaagccgaaatctgaataaccgagcctacgggggtgtatttgatggcgttatccaccagattgacaacgacctgcatgatcagccgtgcatccacattgaccaagaggatctcgtccccatactgtgttgtgatggtatgttcgcagcttttccggttgacatgatgcagagcttcttcgatcatttcgtccatcagctgcggcgagatctgcagattcatccgcccatcctcaatgcgggtgatggaaagcagattttccaccagaccgatcagccattgcgcatcgtcaaaaatatcggtgcagatcttgttccgggtctctgtatccagcgtttctccgttggaaagcagattgctggcattgccggaaatggaggtcagcggggtgcgcaggtcatgggagatcgtgcgcagcaggtttgcccgcagctcttcattccttgcctgcaatgcagcttgctctttttccagcgcgtttctgcggttttcgatggccagcgcaccttcacccagaatggaaagcagcacgctgttttcaaaggcatccagcggtttttcggacagatcgattccgatcactccaaacacgccgcctccggtccgaagcgcaagataaagcccctttgcatccgggtagctatccgtgcctgcgccggaacgctttttgttggcaaacgtccagtttgctgcatcccgttcttccggtgcagaaaagatgttgcgcggcacttccccatcaatctcaaaaacctgttctgacccaagatctccgttttgttccgggtaaacgatcaagctccggttcagcagcttcatcaactgggacgctgtctgagagaggatttcttcctcgctttttgctctctgtaaaagctgatttgtatcaaacagtatttttgtacggaacgctgcctgcgcagacatttttgcatgatccttctgccgcgttgtcagggcgcaggtaatgattgcagaggtcagcatcagggcaaatgtaacctgataaccgggatcatacgcatggaatgtcaggtatggctcggtcatgaagaaattgtacaatgctacactggcaacggaccccagcacaccgcaggtgtagccgctggtagacaatgcggtgaacagcacccccagcatatagagcataataatattatagcgcgcaaagtccagttgcaagaaaaagaagccgatgagcgtgatgcagctcaggatgcctgcggtgatcagcagatcacggacagacggcagaagcgaacgggtgaacagcttttttcctgagccgtagccgttctctgcagaagcatccgggatgatataaatatccagattaggcgcagtcagcgtcaatttttcagtcagtgacggtccactccagaaatggcggcgatgtacgctggagcgccccagtacgatttttgtaatgccggagatgcgggcaaactctgcgatctgctgcggaatgtcatccccgtagatcgtagaaatgtcggcacctgcctgctctgccatacgaatgtgctgctgcaagcgccgacagtcttcttttcccatctgatccgagtcaggcgtccggacatacagagctgtaaaggtccctccaaacgcctttgccatcgttgctgccgtccgcacgatctttgcattggagggagaggacgacagacacgccagaatatgttcagtgggtgggtcgttctgattcataaagatcacctgccttgcccacagtatagcacaatttgatggttacgaccaccagccacgtctttttccttcctgtcgaaggatctcctgtcgtatgtgatccagcgcatctgctgcccggaaaccactcaacatgactccaagaaccatcaataacaaagcgacatccatacgatccgtcctatctttttagagccggaaacacttctggatcgatgcgtatttccccaaaaccagcatactttcatcccggcacagctgcgtatccggcgtaatgctcatatcgagctttccgtcttttttcagtgcaagaatgttgatgttatacttttttcgaatattgatctcgccgatcgtgcgattcatccattccggcggaatagtcacttccatgatggcgtggtcgtcctgcagctcgatataatcgagaatgtgttcggagctgtatcggatcgctgcccactttgccagctgcttttccgggtagaccacttcatccgcaccgttgcgcagcagaaacttggcttgtacatcccgctctgcacgcgagaccacaagctttgcgcccagctccttgagcagtgatgttgtttccaacgaactctgaaaattgccgccgatggttacgatacacacatcaaaattgccaacgccaagggaacgcagaaagtattcgctggtgctgtcaccgatctgtgcattcgtcacataggaaagcacagcgttcacacgatcctcattgctgtcgatcgccatgacctgatgacccagctcattcagttcctgcgcaatatggcggccaaaacggccaagcccaatcaaaagaatcgatttcatacttgtctcctttatccgattgcgattttctcctgcggcagacgagagtgggcagggctgctgccaaatgccgcgtagatcaacgtcaatccgccaacacgtcctaaaaacatcagtgcaatcagcaccccctgcgaaaggatgcccaactgcggcgtgatgcccaatgtcagacctaccgttgccacagccgaagcggtctcatacagacagaccgacatcggcagctgctctgccgtagcaatgacaaaggctccgaggaagaacagcgtcaaatacatccctgcaatcgtggcagcattcttgaccgcagaactatctatgcgccgcccgaaaaattccgcatcttctctgcggcggaaggtcgcccacatattggccagcagaacggcaaatgttgtggttttcatgccgcctgccgtggagccgggcgaaccgcccaacagcatcagaaccaccatcaatgcctgtgacgtgctgcccatcgcagcaagatcggcggtgttaaaaccggcagtacggggtgtgacggattggaacatcgacaataaaatgcgctgccgggcagagcctgccgtgaactcgaagcaataaaagtacagcgtcggcagtaccagaagaaacgccgttgtgacaaggatcaccttgctctgcatccgatagcggtgaaagtcaaggcggtatgtacaaatgtcctcccatgtcagaaagccaaggccgccaaagacgatcagggccgcgatcactgtggtaagcaatgggtttcctgcataccgtgtcagcgaaacaaattttgcatcctctgttcccagcaggtcaaagccggcattgcagaacgccgaaatggaatgaaacagtgcataccagatcccgcgcaaaccataatcggcgcaaaatgtcggcagcagcagtgcagcaccagccaattcaaacagagcggtgatccgcagaataaagcctgtcagccgcacgatgccgcccatctgcggggcagccgtagcttcctgcatcgtgctgcgctgcttgagggagatctttcgcccggaaagcagcgcaaaggcagcacccactgtaatgacgcccagtcctccgatctggatcagaagaaggatcacactctgcccgaatgccgaccagtagctgccggtatcctgtaccaccagtccggtcacacaaagggcagaggtagaagtaaacagcgcctcatggaacggtgtaacgcaccgctgctgtgcagcaatcggaagcatcagaagcaacgcgccaaccagatcaactgccgcaaaccctgcaataatgacctgaaaagaagaaaaacggtgctgcctgtaacgaggatattgaatcataaaagctcctttacctatccgtgtgcataaagattagcatggaatagataaaagagtcgtaaagaaaattgtagaagtataaagattccattaaaattgatcgggcaacaccaaataacaaatgctggacatcaccagttaaaaaaaacagtaatatccagcattcattcagatttctaacccatggctcccggccgcattcttcaaatattcttccggctcgctatccagaatcaaattcgcgtagcccagcggatcattgtagatgaggtagtctaactccgacctctgcgccatggtcacgtccagtgcatcctcgaccccggtgcagtcgatggaaatttttctcccatcccggagcagcagctccacgcagccggtgtccatgttgaaatgacaaactcttgcatcgtagcctagaattcttcccgcatggaagaaccctagggctatcttttttgttataaaagtgtttggaacaaacgcgccgcctgcatcggcacgatgcagaacaaatggggtttgggcacagcccaacaagcattttgcaaagcaaaatagcatttgtatagacgaatgccctgcttgctacaaccgcataccgcttatctcgctggaacacctcttgattttaacacaatcggatgttatcctattcttatagaaatctccgaagggcaggtgttttcatgtacaatcatcagctggaaaccttcatccgtgtggcggatgcaggcagcttcaacaaggcggcagaggaaagctacatcacgccaacagccatcatcaagcagatcaacctattggaagattcccttggtgtcaagctgttcgagcgtactcgccggggactaacactgaccaaagcaggccgttccatgtatcaggatgccaagtacatcattcaatactgccatgattctgtcattcgtgcccggaacgcaatgcaggaggattccaacgtcatccgcattggttcctctcccatgacacctgcccagctgctcatggaactgtggtcgaaagtgcagaccatctgcccggacatcaaattccagattgtgccttttgaaaacaccccggaaaatgcacgggaaattctggcggacctcggcacgaacattgatgtagtaggcggcatctttgatgaaacgatgctgcatctgcgcaaatgtgccggtctggaactggttcgcaggccgttttactgcgcggtttccatccatcataaacttgcggcaaaagaccgcttgcagatcacagacctgtacggcgaaaatctactgctgatgcaccgtggatggagccactatgtagatgaactgcgggatgatttatggcagcaccatccacaagtaaatatcgtggattttgaattttacagcatggacatcttcaaccgctgcgaaaacaccaacgatgtgctgctggcaattccgggctgggccaatgtccacccattgctgaaagtgattccagtagattgggattacggcatcccctatggtatcctgcactccccgaatccaacgcctgccgttcagcgttttctggatgcggctaaaatagccagcaaggaattgtatcgctgatacgccactgcaacgagaagctgctgcatgagaaatcatgcagtggctttttctttttacaaaagatgcacttgacctaaagctgactctaagtgttacaatcagggtgtcaagcgggttgtttgaacctttgagttcaaacaagtgaacaaaatggagattccgggaaatgcagacttgcgctatactggaaccagaaaaagagagtacctcaaaggaggaacgaccaatgaagaaagtcttgattttgtccggcagtccccgcaaggacggcaactccgacctgctgtgcagtgagtttatgcgcggtgcgcaggagagcggcaacgaagtgcaaaagatcttcgtgcgcagcaagaagattgtgccctgcaatgcctgctattactgccgcgaccacggcggcaagtgtgccctgaacgatgacatgagcgaaattctggacgcaatgcaggcggcagatgttatcgtgatggcaagcccggtgtacttctactccattgatgcacagatgaagatcatcatcgaccgcagccttgcccggtggacgaacattccgaacaaggagttctatttcatcatgacctgcgcggacgataaccgtgctgccatggcctgcaccttggagtgtttccggggctttaccgcctgcctgaatggtgccaaggaaaagggggtcatctacggcaccggcgtatatcggcccggcgaggtgatgtcctccccggccatgaaggaagcctacgagatgggcaaaaacgtctgatttcccagttttatataaaggagtgtaacggctatgaacaattttctgtttgaaaacaagaccaaggtttatttcggcaagggtggcgtgaaggaatatctgggctgtctgctggagcactacggcgataccgtgatgctggcctacggcggcggttctatcaagcacaatggtgtctatgatgaaatcgtcggtattctgaacgccgagggtaagcgcatcgtggagtttcccggcatcatgcccaatcccacctacgccaaggtgcaggagggtgcaaagctggcccgtgagaaccatgtggatttgatccttgccgtgggcggcggttccgtgtccgactgctgcaaggtggtgtctgcacaggccaaggtagacgaagatttgtgggagctggaaaacaccaagcatactcgtcccactgcgttcatcccgctgggcaccatcgtcacggtgttcggtaccggctccgagatgaacaacggcgcagtcatcacccatgaggaaaagaagattaagggggccctgtggggtgcacaggccgactttgctttcctcgaccccacctacacgttgtccgttcccatgaagcaggtcatttccggtgcgttcgacaccctgagccacgcgatggaaacttacttcggcaagccggacgagaacaacctctccgatgacatcaacgaagccgtcatgcgcagcgtcatccgcaacatccgcgtcctgttgaccgacaaggacaactacgaggcccgcagcgagctgacatgggcttcggctatggccgaaaacggcatcctgaaaatcggcaaggtcaccgacttccagtgtcacatgatcgagcatcagctgggtgcctacaccaactgcaaccacggtgctggtctggcggtcattcacccggtgctgtaccgtcacctgctcccggccaacaccgcacggttcgcccgctttgcacagaacgtctggggcatcgacccggcgggcaaatccgagctgaaactggcacaggctggcgtggaggctctggcggccttcatcaaggagatcgggatgcccaccacctttgcagaactgggcgtccctgccgacaccgacctcaaggctgtggccgattccaccgtgctgaccggcggctgctgcaagaagctgagccgcgaagaactgctggacatcctcaacgagtgcaagtaatcaaggaacgaaaaatacaaaaggagctatttattatggaattcattactctgaacaatggcgtcaagatgccggcagagggcatcggcaccttcctgctgaccccggacaaagctgaaactgccgtgctgagtgcgctgaaagacggtgcacggcttatcgacaccgccaacgcctactgcaacgaaaaagccgtgggccgcgctatgaagaagtccggtctgctgcgggaggaaattttcctcgaaaccaagctgtggccgaccttctacaccgatgccgatgctgtggacaagacgctggcacgtctggacaccgactacatcgacctgctgctcattcaccagcctgccggtgattacgttgccggttatcgcctgatggaaaaggcttacaaggagggcaaagtccgtgccatcggtctgtccaacttcaacgaggagcagatcaaagaaattctgagcatctgcgaagtcaagcccaccatcctccagaccgaagttcacccctacgcccagcagaaagaactgaaagccttcctcgccgagaatggcatggtgattcaggcatggtatccgctgggccacgctgacaagggcctgctggaagagccgttgttcacacgccttgcagcaaagtacggcaagagcaacgtgcaaattattctgcgctggcacattcaggcaggcaatgtggtcattcccggctccaagaacccggcccacatccacgacaacttcgatgtgttcgattttgcgctgaccgatgcagaaatgcaggagatcaccacgctgaacaaggataaacggtattatgaggtcacggaggataagctggcggcattcgccaccatgtttcctcccgtggaagatcagaagtaaatttcaagcagtttgtagctgggtgcggagagtttttttgcggaaaatgaaccagatgaaagggtaaatgaagatgaataagatcacgcgcaaaagttttctgaaagttcttgccgccaccatggtgggtggtgcagccgcttccgcgctgacgggtgcagcggctcctgtttccattgacgagacaaacggcaaggtaagccgctgggtaaagaacaacctgaacccggacggcccgctgacgattgccaagcaaggaatgttctcctccggcggcacggtcacggcaccggtggcaggcacttatgatgccaccaccaactggctggacactacccgtgcaggcaacaccgctcatgtggatcacgctaatgttctgtatcaaatcccggcagacagcaacggttggccgatggtttatctgcacggctatggacagtcccgcatgggctggataaccaccccggacggccgtcagggctgggccgatctgtttctgcgcaacggctactctgcgttcttggtagaccagccccgccgtggtgaggctggcagtaccgcccagatgagcacggacggtttcctcgatacttggtctgccaactccaaggactacaagcccggcgatcaggcatggtacacccacttccgcattggccgcgttgccccggaacggtacgaaggctcccagttcccggagggcgatgctgcacagaatcagttcttccgccagatgacccccaacaccggcgacttcgatcaggcagttgctgccgccgcactgggcgaggtgatgaaggacgtgcagaccctgaccggccacaagtccattttcgtcacccactcgcagggcggtgcagtcggctgggatgtgcccgccgacaacattgccgccattgttgccattgagccgggcggaacccctgccatcggctcggagcagtacacgaaactgctgagcgcaggtattccaatcgctatctactttggcgattacatcgacaacggcccggaagatatcatgtccaccagcttctggcggcgggtacgggacggcgcactggcctttgccgcccagtacaatgccgatggcggtgactgcactgtggtcgatctgccgaaaatcggcatcaccggcaactcccacttcatgttccaagagctgaacaacaaagagatcgctgattacatttatcagtggctggagagccgcgcactggcatgagcggttctctgagattcccggcattttacatagatagaggcgtgtttcgtatgaagaataaaatttcccgccgccagtttttgcaggttgctggcgcatctgctgccgccctgctgctggcttcctgctccggcaattccgctagcagtgtgagcagttcttctgtggcttccagtgaagccgcatccagcgcggctgcttcttcggaagctaccagcacggtaacgactacgggcaaaacactggtggtgtatttctccgccaccggcactacacagggcgtagcgcagaccatcgccgacaccgtgggtgctgacctgtttgaagtcgttccgtctgacccctatacctccgatgatctgaactggacgaacaatgacagccgcgtttcccgtgaacacaacgacgagggccttcgtgctgtggctttggaaagcaccgatgtggacggctgggacgattacgacaccgtgttcatcggctaccccatctggtggggcattgccgcatggcccatgagcagctttgttgccgtcaatgacttcaccggcaaaaatgttgttccgttctgcacgtccctttcctccggcatcgggcagagcggcaagctgctggcagaattagcggacgccggcacttggctggacggccagcggttcagccacagcagcagtgaagccgacattgcaagctgggtaaatggcctgaacctgtaagcagagcttttgtgtgaggagaattttctcttgcggtaatttttgaaatagagggtaaatcaaaaggagaatgtttgtatgaaagcattgctcatcaacggcagtccgcggcccaacggctgcacctttacggccctgaccgaactggcaaatacgctggaagccgagggcattgaaaccgagatcgtccatgtgggcaacaaggacatccggggctgcatcgcctgccgccgctgccacagcaccggctccaacaagtgcgtctttgatgatattgtcaacgaagtagcccccaagttggctgaagccgatgcctttgtcattggcgcaccggtgtactttggttccccggcaggcggcgcgatctcctttatggaccgcctgttcttcagtaccctgaacatcgacaagaccatgaaagtgggtgcttcggtcgtgacctgtcggcgcggcggcaacacagcttcctacgatgtgctgaacaaatattttaccatgtgtgggatgccagtggccagcagccagtattggaacatggtctacggcggctctgccgaggaggtcaagaaagatgccgagggcttgcagaccatgcgcacccttggccgcaacatggcctttttgatgaagagtatccagataggcaagcaacagatcggcctgcccgaaaaagaacctgctgtcttcacaaacttccatcattgaggaagtgttccatattcctccttctttgttgcagggaaagccgggacggaaacgtcccggctttcccattttcctgatttttgcgaggtgattttatgcgcagcgtgattttcgcggtttccaccgctttgaccgttttattatccgcctgcaccggggcggcatcctctgtgccagtcaatacggtttcttcggtttcggccagcacatccatcacgacctcgtccgaagtggattcggctgtttcggagagtgcttcttcggaaaccggaaacatccagactgggcttgtccgggagcagacattggacagcactgaggagctcatccattacagctactacctgccggaggattacgaccccacccggaagtaccccatgatggtggtcatgcccggctataacatgatgtggttcggggaatcttcctccggcagcaatctggactggacggggtttaccagctggacgaaccttggacaggatatgatcgtagtgtctgcccagctcaccgactggggcgacacttcggcgcggcaggccatcgctctgacggagtatttcatcaatcactttgccgtagataccgcccgcatttacgccgcaggctactcggctggcggcgaaaccatgtcgcgggcagttgccatgcggcctgacctgtatgcagcttatctgcatggagcatcccagtgggacggcggttttgcgcccattgcagaaaacggcgtggcggtctacatctacatggcgcagggcgatgaatactacggtgtgcagaaagcacgggatgcctacaacggtctgcacgatgcttacgccgccgcaggctggacggatgaacaaatcgacaccgtgctgcaaatgcagaccccggacaacgcctttttcgatgcgcaggggcttcacgtctaccatgctgccgcaaatgttgtctttgatgatgccgatattctgaactggatcgtttccaaacacaagtgataggagagaaattttgaaccgacggcaattcacaaaacttctggcgggtgtagggctgcttctggcaggctgccgggcaggtgctgcacccagttcctccaccccggaaagaaaggattccatgcaaacgaccacccaaacttatacccgcaccacgcccatcgaaaccgtacggaatgacccggttttcggtgattatgggcggctgatcttcccagtggaacgctcttattacagcggcgacacgctggagcagctgcatcttacctactataacaacatcgacccggacgaaacagtggacatctgcaacaccctgcgccagcgtgcagcggacgggcagaccatcttttacgatatttacaccgaggacgaacaagccgctgacccggacaaagctgacaccggcttattctacttcaagggtaatcccggcgcaaaattttccatctgcaacgcaggcggtgcgtttgcgtatgtgggggccatgcaggacagctttcctcatgcactggaactttcccgcaaggagtacaacgcttttgcgctcatctaccgccccggcgcacagaccgcctgcaaagatctggcacgggccattgcctttgtctttacccatgcggaggaactggaagtagacaccagcggctactccctctggggcggttctgccggggcacggatggcggcgtggctgggcagctacggcacggcatccttcggtgaacaggcgtatccgcagccgggagccgtcatcatgcagtacaccgggctgggggaagtctacggcaacgagccgcccacttatgcctgtgtgggtgaccgggactacatcgcagacgaacgcgtgatgcgctggcgcattgaaaccatccgctctcagggcacccctgccgagatcgaagtttttccgggccttgcccacggttttggcttgggcaccggcacctctgccgaaggctggctcgatcatgccgtagcgttctgggaagaaaacatctgaaaccgtgaggaaactgttatgacgaaaaaatggactgcactgcttctcgcggcagtacttgctgtcggtctttcggcctgcgacaccagccgcgcagaagcccccagcagcaatttggaaagcggagtttccgccatcgaggatgctatgacgaaacgaaatgaaaccgaaagcagctcgttcccggcaggcagcgacctgcgcatcggcacttctgccgacaccgttgcaacgccgaatgatttcccggcagcatacaactacggcactggaaaaattgaggattattcccgtaccgccatgctgcaaaagatgccggaaccagtggacaatgcgaccgtgctgaacacctcggcagaccctaaccatattcaggcgttgtacctgtgggaagaaggcaacgttccggctaaaacgcagttcaccgctgcaatgaccggttattttgacaactgggatttccgcccctatgtgacggcaattcccgtccgcaccggagtacaaccgaaaggtgctgtggtgttgatggcaggcggtgcgtatcagttccgtggaaactataccgattctctgcccacggcagcggctctacgggagctgggcttccagaccttcatcgtagattaccgtctgtcgccctacacgcaggaggaaggcgcgctggatgtagcgcgggctgtccgctttgtgcggcagaatgcggatgtttacggcattgaccctgacgatattgcagttatgggcttttccgcaggcggcattcaggcgggcgaatttctgatgcactacgatgaagatgtcaacggcactgctctggatgaaagctatgtacccgatgcgctggatgctgttccggctcacgcttcggcggcgggcatgatctattcgttctatgggcggctcagcgtgggcaacatggacccggactggctggccgagggtgatctgccgccaacattctacgtttacggcacggaggaccccttctaccgccaattccagcagcagtatgatgtgattcggaatatgggcatttccgccggacgcatcgtgctgaatagctggccccacggctttggctcggatggcggctgggtgaacgattacgccgcatggctggaaagtgtttttgcaaataaggaggaatcttaacatggaatatcgtactttgggcaatgacctgaccgtttcggctgtgggtctgggctgtatgggcatgagccatgcctacggcgcacctgccaacaagaaggaaatgaccgaactgctggcgcaggccgtgggtatgggctatacgttctttgacaccgccgaagtctacggcacaccggataatccccacgacaacgaggaactggtgggtgctgccctgaagccctaccgagataaaatcgttctggcgaccaagttcggcatccattttgacatgaccagtacggcagtcaacaagccgctggtgccggattcccgcccggaagttatccgtgcatcggtagatgcctccctcaagcggctgggcactgaccatattgacctgtattatcagcatcggcttgaccccaaggtacccattggggaagtggccggtgtaatggctgacctgattcgggagggcaagatcactcactggggcctttcggaagccaccgaggagaccatccgccgagcacacgcagtctgcccggtaacggccatccagaaccgttactccatgatggcccgctggtacgaaagcctgttcccggttctggaagaactgcacattggttatgtggcattctcgccgctggcaaacggttttctctccggcaaatacgataagacttccaagtttgaagcaggcacggactaccgcagcgtcatgccgcagttccagccagacagcattgaccagaaccacgccctgctggaactgttacaccgtcttgccgccgagaaaaatgcgccacctgcccagatctcactggcgtggatgctgtgcaaaaagccttatatcgtaccaatccccggcacccggaaactcaaccgtttacaggaaaacgccggtgcagcggatattgtgctgtctgccgtagaagtggctctgattgacgaagcactggcgcacatggaaatgtcgcatgtgtttggcgggagccgcattgagaaagagtaagacagcagctttgacgatgagcttcaatagatcatgcggaggtaattgtttttgatatgtgcggcttttcaacgagggtgatcctatcaatttctatgccgtcttatgtcttactccgcaagagttgtatgacacgctggaaaatgatctcgcggttgaaaaagaggtgcagaatccgcaaagagattgatttcggctaaattattgtgtaattcatttgcttttcatttgtttttatggagcagtctgatacaatattgcgtattcagacaaaagaacgccagaaaggtccgtaacgtcctcgctggcggttcaggtgtttttgttctgctccgaaaattctgtcaaatggattgcaagcgatcttgttgcttccagcagtgttttccgcatttctggtggacaagcaagatagattgcatcccattctcggcactcactttccaattctgacagatttggattgatgattgaatccaaggaaaggggtaggacatggaggattgcactcaaaatgtcaaaagaaggattttgctttccgttttcaatattggcgatatacttcaccgaaacatggctttttagtgccagctgatcttgtgtcattcccattgcttttcggacagcctttatctgctttcctaaagcaatcgcatccgcattcggcatcatcatcacctcaatagtattgtatcgttcttgcggaaagaacggtataacatcatcattccagtgattttgtcctatcgtgccgatgtgttatattgcgccagcttcccgccatgggaggctggcgtttttgcgcttttggagccaaagtgccgcagtccaccgtttctcctatgatacagcagcaaactttatatttgggagggaaagtcatgctcgatcataagaaggaagcgattacggaacactggcagttttgccccaagtgcaatataaagctctatcgaatgaccgccgactgcactggattcatccatataaaatgctggcgttgccgggaaatgttatggctcaacctttccattcgggccaagtaagcattgatttcataaaaatcgggtgcaacgcactctgaatatggactgttcgcaccgagcaacgggccgtcacctccgggtgatgtatgaaacgtagcaccaaatggccgggcagcagcttgactgaaagctctccaatctttcggtcggctgttgtccggctatttttatagcttcagatcgcctgcttccgaaaaggagcaggttttatgtttgccctcttttcatggctgccccagatggcgaaatatccgtagtgtttccaaattttcggcatttcacgttttatcgaaaatttggaggttacacatgggctttaattatggtttggaaaagaagaactttgaccgtcagtgggctatcatgcgcaagcagtatgaggacgctggcatgagcattgaagtgattcaggcaatgtatgagtatgactggtctgttttcaatgctgcgcgttcttaccagaaccacacgcaggagatcaccgctccgtcctttgaacagggcgaagaatcctactcgccccttatgaacaagtatcaggaagcaatttctgttaccgaacactaccgcgaaaccaagagccgcttcacatggattggcgaaattgagaacgaacggctgttgtctgctcttgaaaatttgtcggacgcagacctcaaccttgtcaccatgtatgcctatgaggggtacaccgtcactgaaatttctaaagttttaggtgtcgcgcagcctactattagtatcaaaatcaagagaatcactaaatttttgaaaaacttcaatttcaatgctatggattga

SEQ ID NO: 1066 - DNA, 24453 bp, unidentified
  source 1..24453: mol_type = unassigned DNA
ttatacaaccgtcacaacacctatttcaacttgattattgattctggggatgaatacggggttgctcagacctgcgcagacaatcatttttgtgccgtcaaggtcaaattcgcctttgtcatatttcggaaaaagaccctgattcggagcgattactccgccgatgaacggcaattgaatctgtcctccgtgggtgtgaccgcagacgattaagtctatgtcggttttctttgcgtcctcggcaatgtattcgggctggtggtgcagaagaattgtgaaattgttctttgctttttcggcaaattcttcccacagcgttcttgacggaacatcgtcatcgggagtgtagaactcataataagggtagtcgctcattccgccgataagcacactcttgccgtttttggtgaattttatgtattcattatcgagcaatacagcgcctgttgaatttgtttcgcttttaaaatccgttccgaatttggcggcattgtcacgctcatggttgccgagacagcagtatgtgggtgcaatttttgaaagcttttcaagcacatctttcatcttcgttgtgtcgggatcgccacggttgaccatatctccgcaaactgcaataaaatcgggattttgttcctttacaagctctgcaaggtctgcgttcttttctccgtattccttgttgtgcaaatccgtgatgacaacaaatttcagctttgcatcgttcttagtattgtttacacagtaatttgtgattgcaattgtgttgtcacagtaaacgccccatattacgagagtcacaaacagcacaagtattattgctccgaggattatcgaaaattttttcattcaattcaccgctcatattaagtatggtattattttaggctcgttttgtgcggttgtcaacaaatgtgtgtcgaacaagtctgattattactgttccttgtgctttgattgtcggattttaagttgatttaggaattgctttgtttgacattccttttgcactgttgtataataaatcataattgtatttatatgttactcgggaaatttacacaaagttaaacagaagaggtatgggttatgaagaagattaatttgcgtaagatgtttctggctctcgcagatgtgtttattatcgttgtcagcggtattcttgcaaattatattctctcacttgtcggttacataggtactgcttcaagcaaaggcttgttgagctatattgttattgatcttgtcatgtgtctgtttacgctttatataagcggaacatattcaaaattgtggcgatactttaacgcaaaggactatattgtgtgcggaactgccgtcttttctgggtttacgctcggctttgtaatctcgttgtttttgcagattccgcagagaaagattttttgtatagtacatttcgcaatagcccttgtcggaattcttgcattccgttttgttttcagaagggcttttcttgaccttaccgaggcaggaagggcagagggcggagagcgcacccttattgtgggcgcaggcaatgccggcagaatgattgttcgtgaaattcacaatgcgaaagagcagggtgatgttaataatccttcaaaaagcatcattccggtatgctttgtcgatgatgatttgaaaaagctgaatcagaaaatcgaaggaatccccgttgtcggaacctgtcccgaaattgttaaaatatgtgatgaataccgcatagacaatattattgttgcagttccgtcatgtgaggaagatgagaagaggaagattcttgactactgttccgcaacagagtgcaaaatcaagattatcccttatctcggtgagcttttgtttgatgacgggcatacacagcttatttcacaggcaaaggaaatcaagattgaggatcttctcggcagaaaacccattgagtttgaccgaaaggagattcatgaccttatcaacggaaaggtttgtcttgttacaggcggcggcggttcaatcggcagtgagcttgtaagacagattgcaaagaatgatccgaaacaaatcatcattgttgatatctacgaaaacaacgcatatgacattcagcaggagcttgtgcttgaatacggcacaaagcttaaccttgtaacgcttatttcatcggttcgtgattacgacaaaatggagcttatcttcaagacatatcgccccgaactcgtattccacgctgccgctcacaagcatgttccgcttatggaaaccgttcccgaggaggctgtaaagaacaacatcttcggcacattcaatgttgcaacccttgcagaaaagtacaaggcaaagaagtttgttatgatttcaaccgacaaggctgttaatccgacaaatgttatgggcgcaacaaagcgtgcgtgcgagatgattattcagtacaaggcgcagcacagcaccgataccgaatttgtaacaacaagattcggtaatgttctcggctcaaacggctcggttattccgctgtttcgccgtgagattgaaaacggtgcgcccgttaccgtaacacatcccgatattatcagatattttatgactattcccgaggctgtttcgcttgttcttgaggcaggtgcaatggcaaagggcggtgagatttttgttcttgatatgggtgctcccgtcaagattacaacccttgccgagaaccttatcagaatgtacggtaaggttccgtacaaagatgttccgattattttcacgggacttcgtccgggtgaaaagctttttgaggagcttcttatggacgaagaaggtcttaagtcaacacagaacaagaaaattttcataggaaatcaaattaaaatagacgaaacagatatgctgtcaaagcttgaggttctcaaaaagaccgcagaaaacaatgacagtgaaaagacagttgaacttttggcagaacttgtacctactttttgccacaaggtcaatgattaaccgaaaaggagaaattttatgtgcggtattgtaggttatgtaggacctaaggattgcagtgaggtgcttgttaatgctctcacaaagcttgaatacagaggctatgactcggcaggtattgcggtttttgataacggagaaatcaagaccgtaaagaccaagggtaagcttcaggacttaaaggataagcttgcagaggtcggcactccgaaaggtcatgtcggcataggtcacacccgttgggcaacccacggcgagccttcggatgtaaactcacatccacacagcggtacaagggttacaatcgttcacaacggtattattgaaaactatatggagcttaaagacttcctcatctcaaagggaagaacttttttaagcgacacagatacagaggttgttgctcagctcctcgactataaatacaacggaaatcctcttgaaacaattgacagtgtaatggctgagcttaagggttcgtttgcactcggaattatgttcaaggatttccccgacagagtttttgcggttcgccgtgaaagtcctcttatcgtaggcgttgcagaaggcgagtgctttattgcgtccgatgttcctgcaattcttcagtacacaagggattattatcttcttgaccatgatgaaatcgtaacactttcatctgacggtgtttcgttcgttgacgaacaccttgatccgattgaaaaggaacttcaaacagccgactgggatatggaggctgccgaaaagggcggttatccgcactttatgattaaggaaatcaacgaacagcccgaggctatcagaacaacgattatgccgagaatcaaagagggacttccgtttcttgaggagtgcggcatcacaacggaaacaatcaagaatttcaaaaatatcacaatcgttgcctgcggtactgctatgcatgcaggtatggtcggcaagtatgttattgaggatctcgcaagagttcccgtaaatgttgacattgcgtccgagttccgttacagaaatccgattgtaggcgagggcgaccttgtaatcatcatttcacagtcgggcgaaacagccgacagccttgccgcaatgcgtcttgcaaagcagaagggtgcaaaaactcttgcaatcgtaaacgcaaagggcagttcaattgcccgtgaggcggatatgctcatctacacactcgcaggtcccgaaatttccgttccgtcaacaaaggcatacatcacacagctttccgttatgtatctctttgcctttgagcttgctcttgcaaaggaaacaatcagcacagccgagtgcaagcgacttgtttcggctcttacaaaaatgcctgaggcagttcagtatgtaatcgacaactgcgaggatatctgcaagttcgttgccacaaagcttgttgcaaccgacagcttgctttacataggcagaggtcttgactatgccctttcaatggagggttcactcaagctcaaagaggtttcgtacattcactcagaaagctacgccgcaggcgagttaaagcacggcacaatttcgcttattgacgaggatgttcccgttatagccgttgcaactcagacaggtattatccccaagacaatcagcaatgttgttgaggttaagtcaagaggtgcaaaggttattcttgtttgcacagacgcctgtgcaagagaactcaaggacggtgttgcggattatgttatcgaaattccgcatacagacgagcttcttatgccgattacagcggttgttccgctccagattcttgcttattacacatcaatcaacagaggtattgatcccgataagccaaagaaccttgctaagtcggttactgtagaataaacggcggtcttgtatttaattgaaaatggaaaattgaaaatgtaaaattatggtcgggaaggcaatttgcaagatgcaaatcattgtcacccgaccattttttatttatatgaaagtatatgcttaattgtgggagcgtccaatgaacgctcctacataacttactcttgttttcaaatttaaacggtaaaaaccttgtatttttttgacagattatgtataattaattagatatacattctaaaaagcagtattgatgaatctaatttagtttcgggggaatatacggacatgatgaaaactgtttttaaaagagctgtaacgcttgcaatttgtgccgtaatggtattttgcggtatttttgcctgttcaggcgcaacaaaagattacgagattccgcagattgacgatatgacgctttcaatgcctgacggtatgagcgctgttacaagggacagtaaaagcacagataaatatttttctgttttcggtcttgattatgacacaacaatgaaaacctttcagaacggaaatatctatcttcagggtatggataatatgtcatcggttattctgaccgtgacaatgacaaaaaatgagagcagcgagaatgtcggcaactatgctcagctttcttcaagcgagcttgcaaatatacgcaacaattttcttaattcagacgagtatcggagctgtactcccgaccaaaaagaaaaagttgtgtggcttgtgtttgacgcaactgctcagagcagtaagggcgatgtgaaaacctttgttgccaacacggtttatgacggtatgaacattaatatcacaatgcagagaacagagggtgatgttacaaccgttgactacgatactttttccaaagttgtatcttcggtaaaattcagcgacctgccgttttcaaagggatttattccgtacataatcatcggcggcggtgttgttatccttattttgattgttctcatcataatttttgccgtgagaatcagaaagcataaaaaggctaagaagaataacgctattcttgaggagcttgcagtcaagtataaactcggtgaaaagggtacggactacgacattgacaattttgacgattctcccgaaaagcccgataaacgctcaaagaaaaagcagaaatatgcggaagaggttgaagaagaaccggcttcgccgggcagaagatatgctcccgagccgataatcgaaaatatggaagaaccggaagaaattacaagtgagtattcaaactttggttatgacacggatgacgccaaggaaaaagaaattgacgagataatcaactccgcaaaggcttacaagagtgagcttgagcgtgaggcatataaaaacaactacggttacgaggaaaacagcacggaggacgaaaaaaaaaaggagcctaccgcagcagatacctcagagactgaacccgaaaaaattgacgaaaacgaaaaagataacgcagaaacacctgaaaaacacgaggacataagctcttcgtcaggtcctacactcgttatccccgaacccgaacacgatctttttgaaacaagcgagcctgacgatatcgaccgtgaggacgatgccgatgttgaagaaaccgaggaggtttccgaacaaaagcatccgcttgaaaaaaaggttgacaagtacgcaaacatcattttcggcagtgacgatcccgaggagaaaaccggggaagaggttgatgatgaggagcttgtaagggcaaaggctaagaaaaacaagtttgacagcggttatgacttttttgacgaagctcccaaaaagtcaatgggggttatcaaaagctcagacctcagagatgccgaggactttgatgttatcggcgaggttgaaagaaaagcagaaaccgtaaagcagaacgctcttgaaaaagagaataataaagaaaccgagggtgaaccgaccgataaacggtcaacggaagaggttcttgccaatgtaggcaaaaacatcggtaacgctctcaggggctttgcaggcggagttaagaattttggcattcactgcggatatttctgcaagaatgtttcaataatgataaagcgtaagcgtgcaattgccaaacgcaaaaaggcagaggaagagagaagagagagagaaagacaaaaggcagagcgtgcaagaatgcgtgccgaaagaggcgaaagtgacggacttgttcaggttcacagcagaaccgaccgccgcccacagcagaatcaccgccctgcaaacagaaacaagagaagatgatttcttttcttaacggaggaaaaacatggaaatgctaattaaaaacgcagtggttgtttcccctgccgacaagcttaacgaaaaaacagatattctcataaaggacggtgtgattgccgaaatcggcagcggcattacatcagacggagagattattgatgcagacggtctttgtgccgttccgggatttgttgatatgcatgtgcatcttcgtgatcccggtcagactcacaaagaggatattatcacgggatgcaaggcggctgccgcaggcggtgttacaagcctgcttgcaatgccgaacaccaacccgacaaccgacagctccgaaattgtaaagtatattcttgacaaggctaaagatgccgacagccgtgtttatgttgcggcaagcgttaccaaggggcttaaaagcgaagaacccacagacattgacgctgtgaaaagtgcaggtgcaatagcacttaccgatgacggcagacctgttgaaaacacaaagtatttgagtgacgcaatgaaaaaagctccaaagctcggcatgacaattgtcgcacattgcgaggacttgtttcttgccgacggcggtaaaattaacgagggcgaggtttcgaaaaagctcggtatcaagggaatccctgccggtgccgaggactgcggaactgcaagagaaattgcacttgctgccgctcttaacgagcctattcatatctgccatgtcagcaccaaaacaagcgttgcacttatccgtgatgccaaaaagagaggtgttaaggtgaccgccgaaaccgctcctcattatgtttcgctcacggacagggagcttttaagaggtgacgctgattacagaatgaatccgcctctcagaactcaggctgatgttgacgagattatcaacgggctttgtgacggcacacttgatgccatagcaaccgaccacgcaccgcacacacccgaggaaaaggctgattttgtaaaagcccccaacggttcaatcggcatggaaacctcgtttgcggtctgcaacacatacctggttaagacaggcaaaatgacgctttcacagcttgttgagaagatgagtgttaatcctgcaaggattttgaaaatcaacgcaggcacactttcagtcggtgcaaatgccgatgttgttcttataaatcccgatgaagaatggacagttgatgctggtaaacttcacggcaaaagcaaaaacaccccgtttaagggcagaaccctcacaggtaaagtcaaaaagacaattctcggcggtaaggtagtttttgaagattgagcaaataaaacccgtaggggcggatattatccgcccgcaagtaatagtgcgaaattgttgttaaaacaaattatataaatgaaacaaagataatgatatactgtagcggcgaaccgtgtttgccaatcggttaaaatggcagttaatgactgtcggtaaataaacagaaaatttatttaacataaaggagtaaaattatggcacagaaaggtgacctcctgtcggtaagacaggatatcagagtagtagacgcaacaatccgtgacggcggtctttgtaacgatttcagatttgacgacaaatttatcaaggctctttacaatgcaaatgttaaagccggtgttgattatatggaattcggctacaaggcatcaaaggaaatctttaacgaagaagatttcggtaagtggaaattctgtaacgatgcagatatcagaaaaattgtaggcgacaacaagactcctcttaaaatcgctgttatggctgatgtcggcagaacagatttcaagaaggatattatcgcaaagaaggacagcccgattgacctcatcagaattgcaacatacatcaacgcaattcctgcggctgttgaaatgattgaggacgctgcaaagaagggctacgaaacaacaatcaatattatggctgtttcaaaggcaagaaccgaggatattacagcggctcttgaaactctcggcaaaactccagtaaacgctttctacattgttgacagctacggcgcactctatcccgaggagtcaagacgacttgcagacctttactgctcaattgccgacaagtacggcaagtcggtcggtattcacgctcacaacaaccagcagcttgcttttgccaacacaattgaggctatgactcagggcgtcagctaccttgacgcaaccgttgacggcatgggcagaggtgcaggcaactgtgcgcttgaacttcttctcggtttcctcaagaacccgaagtatcaggttgctcctattctcaaaatcattgaggagtacacccacaagtttaaggctgagggcgttaagtggggttacgatattccgtaccttctcacaggtcagtacaacacacatccccgtcctgcaattcagttcgtaaaagaggacagacaggattattacaagttctcaaatgaactttatgatattatcaatagctaattaaatttgtagcggcgttcattgaacgccaatcgaaccgattgcaaaatcggttcgaccatacaaacgatttgaattaaagtaattaaccacgatataacaatacatttgttgtttattcgttttggtttcacaaccaaaacgattggcggtcattgaccgccgctacggttaagcaatgacattgtttaaatcaaaatatgaacgaacaaattgtttttacattacaaaaaatgaggagaatcactatggcatttgacagacttatcgaaaatattgtaaaaatgcagaatcctacggttgcaggtcttgacccaaagcttgactatgttcccgaatcaatcaaaacaaaatgctttgaaaagtatggcaagacgcttgagggtgcggctgctgcactttttgaattcaacaaggcgcttattgacgcactttatgatattgttcctgccgtaaagccacaggctgcatattatgaaatgtacggctggcagggtgttaaggctctttgcgacacaatcgcttatgcaaagtcaaagggtatgttcgttatcacagacggcaagcgtaacgatatcggcacaactatggaggcatatgctacggcacacctcggccatacagatgttgcaggcgaaagtattgacgcattcggtgcagacgcactcactgtaaacggttacctcggaacagacggtatcaagccgcttgcaaaaatttgcgattcggacgacaagggcatttttgttcttgtaaaaacttcaaacccaagctcgggcgaacttcaggatatgaagcttgaaacaaatgagagcgtttatgagcatatgggcaagatgtgcgaaggctggggcgaagaccttatgggtaagcacggctattcggcagtaggcgcagttgtgggtgcaacatatcccgaacagctcggtgaaatgagagcaaaacttccgcacacatttttccttgttcccggttacggtgctcagggcggcggtgccgatgatgttaaaaacgcatttgacgaaaacggtctcggtgcaattatcaactcaagccgcggcattatgtgtgcatggaaaaagcaggggcttacagaagacgactttgccgttgccgctcgtaaagaggctgagcgtatgagggatgaaatcgttggctgtatcggcaaaattaagcttggctgattcatttgcacaacagaatcacgaaatttttcgttttttatgctttagtgctatgaatttattgactttagcgtgctaaaagcgtataattaaaacgtatttatttttacaactatatttttaaattttttttaaaaagggagatatcagaaatggcaagagtatataatttttcggcaggtccttcaatgctgcctgagtctgtgcttaaaaaagcagcggcagaaatgctcgattatgagggcagcggtcagagcgttatggaaatgtcacaccgctcaaaaatttacggtacaatcattgagggtgccgaggctcttttgagagaggttatgaacattcctgacaactacaaggttcttttccttcagggcggtgcgtcaacacagtttgcggctatccctatgaaccttatgacaaagagcggtaaggctgattatgttattacaggtcagtgggctaaaaaggctcatgcagaggctgcccgttacggtcaggctaatgttgttgcttcatcggctgacaagaccttcacatacattccaaagcttgatccttcaacattcacaaaggacgctgactatttctacatttgcatgaacaacacaatttacggtactgtttatcatgagcttcccgacacaggtgatgttccgctcgttgcagatatttcttcctgtattctttcaagaccgattgatgtttcaaaattcggcgttctctatgcaggcgcacagaagaacatggctccggcaggtcttacggttgttatcgttcgtgaggatcttatcggtcacgctatggatatcactcctacaatgcttaactggaaaactcacgctgacaacggttcaatgttcaacacaccgccttgctacacaatctacattgcaaagcttgttcttgagtggattaagaacgaggttggcggtcttgataagatgtatgaaatcaacaagaagaaggctgaccttctctacggtttcctcgattcttcagagcttttcaagggtactgttgttcccgaggatcgttcgcttatgaatgttccgttcgttacaggtgacgctgaccttgacgctaaattcgttaaagaggctactgaaaacggtcttgttaatatcaagggtcatcgcacagtcggcggtatgagagcttcaatttacaacgctatgccttatgagggcgttgaaaaactcgttgagtttatgaagaagttcgaggctgaaaacaagtaattattgaatattataattattgaatattatgatataacgggcgaacgctgttcgcctgttattgtaaattcttaaaataaaaaattaaaaaggattgattttgatgtataacattcttacattaaacaaaatcgccgctatcggcacaagccgtctcggtgataactataaatacggtgacgatgttcagaaccctgacgcagttcttgtaagaagtgccgcaatgcacgatatggaatttgccgataaccttcttgcaattgcaagagcaggcgcaggcacaaacaatattccgaaggataagtgcagcgagcagggcattgttgttttcaatactccgggtgctaacgcaaacgctgttaaggagcttgttatcgcaggacttcttctttcaaatcgtaaggttattgagggttatgaatgggcaaagactctcaagggcaacggtgcagctgtcggtaagatggttgaaaagggcaagagtcagttcgtcggtcccgaaatcaagggcaagaccctcggtgttatcggtcttggagcaatcggtattcttgttgcaaatgccgctgttgctctcggtatgaatgtaatcggctttgacccgtttatgtctgtgggcaacgctctcaagcttgctcctactgttaagctcatgaagagcgcagaagatgttatggtaaattgtgactacctcacaatccatgttccgcttactgacgacacaagagatatggttgatgccgatatgattgccaagatgaaagacggtgttcgtattctcaatttcagccgtgacggtcttgttaattcaacagcagttcttgaggctgttaagagcggcaaggttgccaagtatgttacagacttcggaacagacgatatcctcggtgaagagaatattatttgcctcccacacctcggtgcatcaactcccgaaagtgaagaaaattgtgctgttatggcttgtgatcaggttaaggagtacctcgagaacggtaacatcatcaactctgtaaactatcctgcaatttcacttgcaagaacaaatgctgacgatacccgtttctgcgttgctcacaagaatgttcccgagcttctcaagaaggttctcacacagatcagcggcaatgttgaaaatatgctttcaaagagccgtggcgactatgcttacacaattattgatgttgcaggcgccggtgcagatgaccttgcaaaaatcgcagcagttgacggcgtaatcagagttcgtgcaatctgatttcgattaaaatttaatcgttgaaaatttaatctatgaaaaaagtccgaacacgcaaaatgttcggactttttgtttgtgtgaatctaaatatgtagcggcgttcagtgaacgccaatcgaaacgattgcaaaatcggttcgaccgtatttcaaaatattggtgtatggttgatttggctttgcagccaaatcaaatggcgatcactgatcgccgctacgtatcgctatatattaaacttttaccagatggtatttttttgcattggcaattataaatgttacggaaattgcaacggcacacaattctgcaacgggcaatgccgaccatacaccgtttatgcctataaacatcggcaaaatcagcattgcggcacactcgaaaacaagtgttcttgcaactgaaatcacggctgaaatcttgccgttgttgagagcggtgaaaagtcccgatgcgaaaatattcattccgcacaacagataatttattgcaaaaattctgaatccgctgagtgcaatctgctgaattttttcgtcgcctgccgagaaaattccgacaagcggttctgcaaaaaattcagatgccgtaatcattgcaaccgaaattatcagcgtgatttttatgcataatttgaacagcttttgcagtttttcgtgattttgtgcgccgtagttaaagctgatgacgggtgaaactcccgaagtgaatccaaacgaaaccgcagtgaaaataaagtgaatgtacaaaatagcacttatagccgcaacgccttttgcgcctgcaaagtgcatcatttgaatgttgaacagcgctgttgtcacggctgttgaaagatttgtcacagcctctgacgagccgtttgccattgcaaagaggatttcacttaccttgaattcaggcttgccaaagtgcagagtttgctttttgttgaaaaagagcaaaagcggaattgcacccacagccattccgataatggtgccgaggcctgcaccgattattccaaaatcccacactgccataaaaagaatgtcaagcacaatgtttgtgcaacccgacagtatcgagaaaacaagcatgatatgtggcttgtccgctgttacaaggtacgattggttgagcatctgccagcacattacaaagccgtacggaatcataacgctgccgtagtcaatgcagtaggggagaatcttttcgtttgagccgaacatcatgtacataggttcggcaaaaattgtgaacagcacagcaatgataacagaaatgaccgttgccgtgattgcaacaccggacataagtcggtttgcctcctcctgtttgccttctcccattttctttgcgattatagcatttgagcctgttgaaaacattaagcccacagccataaatacgagcgtgaacggatatacaatattgattgcagacaatgcgtcacttccgacacagtttgcaacaacgattccgtcaacaaccgtgtaaagtgacataaaaaccatcataagaacggttggcaaagtgaatttcagaatcgtttttgctttgataggttttgcataaattgatgttgccataaaacttccttaccctcaaatttatatttttcacagaccactcaaatgattgtatcataactttgtcgcaattacaaccgatttgtctttttttgtaaaatatgctattatatacagacttaaaagcgaaaaaaggggcggttttatgtttaagggcgcagtttttgatatggacgggcttatgattgacagcgaaaggcttgtttattcaatctggcaggaaatgcttgatgaggacggcaaagagtttaatctcgacattttcaaaaagacaatcggacttcgcagtgaggattcctacgaatattacaagtcggtttacggcgatgattttgactatcctgcttacaaggcggagtcgagaatccgctattttaagcgtatcgaaaagaacggtgtgcctgtaaaaaaaggcttgtacgaaatttttgattatttaaaatcagtcggttgtaaaatttcgcttgcaacttcaacctcgtcacaaacggctttgaagattatgaagaaaatcaatctctatgataaatttgacgcattcgtgtgcggcgatgatgttaaaaatgggaagcccgatcccgaggtttttttgattgccgcaaagaagctcggacttgagccggtggactgcgttgcgtttgaggacagcattaacggcataaaatctgcacatgccgcaggtatgaccacagttatggtacccgatttgctcgaacccacagacgaaattaaaccgatgatagattttttgtgtacggatttaagcgaagcgatagaacgaatttcaaattgaaaatggaaaattgaaaattaatgtcgggcagacagtttgtaatgtaaaaaacatattatgcccgagcgtagtattgcaattgttcgcacaaatctataggggcagatattatccgccacaggcggcggtcgcaaggctaccctacgagtttatggttcttgcatattgttggctcaattatccgagaaaattacaaataattacaaatggttacaatttacaaaaatacaattgagcagggctgattattatacacattttccacatagttttcaacaattgttgaaaaagaacggcaatgcctgttgagcgttgctacggttactgcggaaaaggggaaaatgaaaaataattattgaataacagcacgataatatgttatactttggtaaacaacaatctttacggaggacaaaatgaagaaaattataaataaaaaatcactcaagggtacgcttgctgttatgttgtgtgccgttatggcgttttctgtctgcgcctgtgactttgactctgacacagaaccaaccaaaacggatgcacaaattcagtttgataaatattgtgacgatttgttttcggaagaacttgaggatgacgctcttaccgcacattttgacatttcaaatccgtcggactacggtctgaaatatgacgaggaggactataccctcggtcatgtgtccgatgaagatacaaaagaatcatttgatgaactgaaagaggcaaaaacggatttggaggagtttgaccgttcgggacttacttcttctcaaaagcagacatatgacacccttgaaagctactttgaaattcagctttcatatgatggtacaacagaattgcagagtatatttgcaccgcagtcgggaattgttgcaaacctctttaccaccctgtccgagtttactttctatgaaaaggatgataccgacctttaccttgctgttttgaaggacacaaaacgctatatggacgagtgcattgagttcacaaggaaacaggctgaggacggttactttatggctgaagatatcgcacagcagtcaattgacgagtgcgaaaagcatattaagaatgacaagtccgtgcttgttgacgagtttgagtcgagaataaagtcactcggtcttagcgattccgagaaaaagactgttgtcgaaaccaacaaaaagtattttgaagaatactacattcctgctttgaaatcagcaaattcagcacttgaaagtctcaaaaaatcaggcaaaaacgaagaaggtctttgcggttacggcaaaatcggcaaaaagtattattcggcaattgtcaaagacaaaacaagcagcagcatgactcccgaggagcttaagtcatatcttacaaacagctttacaaaggttggaatgagcatgagcaatgtttcacaggatgacttgagcaaatttcaggactacaaacctgactttaaggacgccgatgaggtgcttgaatttttgattgagaatatcgaggaggactttccgactcccgttacaacctcttacacggcagattatatgagcgattccgcaaagagcgacaatgtggtagcgtactatgttcagggacgaattgacgatacaagcgttaatatcatcaaaatcaaccccgactttgcaaataagggtatgactcagatgtacactactcttgcccatgaaggctatcccggtcatctttatcagtttaccgcatcaaatgcaaacaaggatatcccgaatgtacgcaagattttaagctttatcggtgcaaccgagggttgggcgcagtatgcctcgaaatgtacgcttgattaccttgatacaagcgagggcattaagaagcttatctacgcaaatgatattctcggctacattctctactccatggtcgatgtcggtgtgaactacaacggctgggattatgaaaaagtcaaggagtatatgtcaacggcactcggttcagctgacagcgagagcgttacagccgcaacaaaagaggcgtatgaccttgcccgttcaaatccgggttattttctcccatataccgtaggctacctcaagatgattgatatgcgtgaaacagccgaaagcgagcttggctcaagctttgacgcaaaggagtatcacacattcattatgaatctcggaatcacaagcattgatgtatatgaaaaagcccttgatatgtggcttgaaagcaaaaagtaaatttttggtgataatcttgaatattttttacaggtatgatatacttaactcattgatatgataaatctaaattggtatggatttttctaagatgtgattcttattttcgccatacactcattatgggtgtatggcgatttttattttacgcaaggggtgttaatatgggcgttaaaacggaaaacaaaatggcttatgaacctgtcaacaaacttataattcaaatgtcggcaccgccgctgatttcaatgttttttcagtattcatacaaccttgttgacagtatgtttgttgcggggataaatgaacaggcacttgcggcagtatcgcttgcattcccgattacaacgcttatgaatgcgttgtccgtgtggataggtgtgggtgttaatgttttgattgcaggttatttgggacagaaaaatcagcaaaaggcaaattctgcagcggctctcggagtggtaatttcggtagttgtcggagtgctgataaatttcctttcgcttttcataataaatccctattattcggcttttacgcaaaacaaagagatttttgaatacggaattgcgtatatgagcgtctgcgtttttatgcagataccaaatatggtgcatattgtaattcaaaaaatacttcaggcaacaggcaatatgattgctccgatgtggtttcaaattgcaggtgttgtattcaattttgtgtttgaccctttgctcattttcggcataggtccgtttccgaaaatgggtgtgatcggagctgcagttgccacggttttaggctatgttgtttcaacaatcattgcgttgatacagctgtttcttacaaaacaaaaggttaagccggtgtttaaaaactgccttgaaccgcagatgataaagctgatattttcctacggattgccctcgtttgttatgaatgcgttgggagcattcaccgtgaattttgcaaatatgtttttggtgcgatattcggacacggcggttgcatttttcggagcatatttcaaggttcagcagttgatttttatgacggtgaacggactaattcaaggctgtttgcctataatgcggtttaattacagagcaaaagagtacggtcgccttaaacaagcaaataagagcggaacaattatcgcgactgttatgatgattgtcggtatgctcttggtgctgattttcccgaaagagatattgtttttgttttcggcatcggaagaaatgtgtgcttttggagtgctggcaatgagaattatgtcactcggatttgtgttcagcggcttttctgcaatgattgcaacctatgaacaggcaacagacagtattatgcccggcgttgtagttcaactgttgcgacagggcgtgctgttagtccccgtaatttggcttttaaacagcgctgttcaaatgacaggcatatggcttgcgttcccaattacagaatttgtcacatttcttgttgctgttgtatttgcaaaaattaaaaatcattgaataaataaaaataacaaccgtcaaaacccgatataatggattttggcggttgtttgttatttaaaatatgtttaattttaaattgtttttgcaaaaacattatcagatgattttgctctgaaaattgtttttacgagcaagaatgttatataaacataaagtgaggtgtagatgattgccgtaaatttaaggtctataagctcgtaggagaacagatagtagcaatagcctctcaggcttataagcgttgacacaatcggaatccacaaatgctttgcacttactgccgcatagacaattaaaataatgtcaagcagataaccgtagcgttcgtgcattgacgaaaggaacatgatacaggtgaacacagtccacgctgttgtcagaagaaaagtttcaaggtttttcaaatcaacctttttatagatgataatgcacatcataattccgagtacggcaattgtcagaaagaccgaaaactgcttgaacagataataatatgtcatatcgtttccgtcacatatgagtgcataaaagttcggacagttcatctgaataagctttccgtagtcggtctgttccgcatatattgtgatgatatcgataaacggtctacccataataattgcaggcaggcacattatcacatcaaccgcagggattataaagaaatgcagaatcgaaattttctttgtcgaaatccagtaataaagcagaacaggaatgatgaatacggtttgcagcttgaatgcaaacgcaatgccgatgaacacaaacgatgcaatcggcttgtctttgtgcaaaaacaggattgcaaggattataaacgaggtgtaaattgaatcgcactgcgcccaaaacgatgagttaaaaatcaccgttgccgaaagaagtacggctgagtaggtgagtatcgctttgagccgtcggttattctttgcaaacgaataagcaagcattgcggttgaaattgcaagtacaaaatcgaatattattgatacgattttgtacgcatacagagcatttagcggcaaaagagtcataagatagattatgacttgatacggaatgttgtagttacccacctgagttgcaagccccgtaaaatcattcagcttgattatgctccaccacgaatttaaaaagctgttgaaatcatcgctttgaaaatccattccgcaggctctgaggaaaattgcaataatcgttaccgcaacgagtaaaaataaaagaatgtgtttttttataaagtcaatgactttgctttctgcttttgtcatagagaaaattcctgttcgggtttaaataaaaccgattttcttcataaccttgcccattgtgcggctgctgattttaagggcaatttcatcggcttttctgtaacagctttcaagatatgccttgtctgcaacaagcttttcgtagcgttcacgaatcggacgaagttcttcaacaactgcctcgcctacagctgtcttgaagtcgccgtagcccttgccggcaaaatccttttcaatctgctcgtatgaaagacctgtaactgcgctgtaaattgccataaggttatttacgccgtctttgccctcagcatagcgaacctttgcctcgctgtccgtaacggctctcttgaacttcttcattataacctcgggtgcatcaagaagatgtacacagccgttgacattttcatcggacttgctcatctttcttgtcgggtcctgaagactcataacccttgcaccgttctttggaatgaaaccgtccggaatcttgaacacattgccgtaaataccgttaaaacgctctgcaatgtttcttgtaatttcaatgtgctgtttctggtctgcaccgacaggcactttgtcagcctgatagagaagaatgtcggcagccatgagtacgggatatgtgaaaagacctgcgttgatgttgtcggcatgctttgcagacttgtccttgaactgcgtcattcttgaaagctcgccgaattgtgtgtaacagctgagcgcccatgcaagctctgcgtgagtgtgaacatgactctgaatgaagaaaagacttttttcaacatcaataccgcaagccataattgaagcataagcgtcaattatattcttacgcataacggcaggagtctgtcttaccgtgattgtgtgcaaatctgcaagagcgtaaatgcagttgtattcgttctgcattgtaacccagttgcgaaccgcaccgagatagtttccgagtgtaattgttccgctgggctgtattgcgctgaatacaacctctttttttgtctgattttccattattcccctccgtgattaaagactgtttgcatactcgccgaggatttttattcctctttcaagctgttcgtcagtcggtgttgaaaagtttattctgaaactgtgacaggtttcgttttcgtcagttaaaaatgcgttgcccggaactacgcaaacctttttgagaacgagttctttgcagaaattcggcatatcaatatcctcgggcaagtcacaccagatgaaaagaccaccgtcaattttatgatatgtgattttcggtgcgcagtatttgtcaagaagctccatgcagaagttcgctttctttgtgtagatttcacgaagctttgcaaggtgagcgttaaagtcatactttgtgatgaattcatcgcatacatattgtgaccagatgtttgtatgtacatcgttgccctgtttgcacacaacaagcttttgaaaaatcggctttggtgcaattgtgtaagcaacacgcatacccggtgaaattacctttgagaatgaaccggcatagattacaattccgtccgtatcaaagctttttatgttcggaacatattcaccgctgtaacgcaggtcgccgtacgggttgtcctcaatgatgagaacaccgtattttttggcaagctcataaactttcttacgcttttcaaggctcattgtaacacccgaaggattttgaaaattcggaattgtgtaaatgagctttgcgttcggattggcttttaaagcctcttcaagcttttctgtgctcataccgtcaggctcaacgggaacacctgcaagctttgcgttgtagcttctgaatgtgttgagcgagccgatgaatgacggtgcctcgcagattacaacatcgccctcgtttacaagagcctttgagcataaatccataatctgctgtgcgcctgttgtgatgagaatgtcgtcattgtcagagcctgtgttatgctcctttttcatatattccgtaaggtgctttctcagcggagtgtaaccctccgaaacgctgtactgtaaaaccgaaatcggatcttctgcaaaaacctttgccgagatttccgcaatctcctttgagggaaatgcatcgggtgacgggtttcctgccgaaagcgacacaacgctcggatcggcggcatatttaaaaatttctctgatagcactcggcttcaggcttgaaaccctgtcggaaaacctgtattccataaaaatatctccttttaagatgataaggattttttaaaattccataccctgtaattctatcacgaattgcatatatgttcaagaaatttgactgtttttactgcgattttattcaaaaaatgtgtaatttattattttgcatttgtaaatgttaattcacggaaattgtattttttgtgctttttgtattgtttttgatgagtttctgttgtataatctaaatgataatgtccttacggtcagagcaaggcttgctttgattcaaacaggagtacactgcgcgtaattaatacacttatataattcattgaattcaaattgaatttaaaaatcttcggtttgggagagtaacactatgagcagaagaaacgattacgattattttgatcttgataatttcgatgacagcattgattcccgtgaatatcgtcgcagacagcaacagcgccgttctgcaagctatgccgcaagaccgtcatcacagcgtccagtcagaagacctgtaaaaagaagaaacaaaagaagaaccagaaacagaattattatcgttgtgagcgcattggtaattctgtttgttattatttttattataacttcaatttttaagggttgttcaaaggaagatgcccttgcaagcgttcccacgggaacagtgggcacaacggcgtctcccgacgaaaccgcaaaatcttcgaccgctaacaaagcagacgagctttctcctacatactttatgacaccgggcataaaggacgacaatacaaacggaactctttcgtacggcatttatgtgtggaacaaaataggctacgaattgttcagcagtgatgacgcaagagcgcagaactatgctcagacaatcaatggctttgcagacaagttcggcagttccgtaaaggtttatgatatgattgttcctaaccataccgaaatgggacttccgcaaagactcaaagacagcgacgctccgtcaacctcacaggctgacaacatcaaggcggcttatgcggctctttccgacaaggtaactccgattaactgctacaaccgtcttgcggaacataatacagattacatctattttaagagcgaccaccattggacaggcctcggcgcttactatgcttacacagcatttgccgatacaaacgatttgcccgttctttcgcttgatgattgcaaggaacagaagattgacggctttacaggctcgtttaccaactcggcagacggtcttgacagcgatacggtaagttattggaagttcccttataatgtaacaatgaatattacacaggcagacggttcttccgcaagctatgacagtccctactatgaagccgcagagggcggttcaaacacctacggtgtgtttattatgggtgataatgccctcacggttctgaaatcagcttcgaaaaatgcggcggcaggcaagaagattgccgttgtaaaggaaagctacggcaacgcttttgttccgtatcttaccaataactacgaagaagttcatgttatcgatttcagatatttcaaacagaatcttgttgattactgcaaaactaacggaattgacgaggtgctttttatgaacggtgtaatgagtgccaacactcaggttcagcttgacagtatgagcggactttttaactga

SEQ ID NO: 1067 - DNA, 23856 bp, unidentified
  source 1..23856: mol_type = unassigned DNA
tcgacttcagcgggctttacgagagtagtgctcatatctatttcctcctgataagctttttgtacgtttcaggcacccttttggggcgcgagtgtcagtatacaacacaaaaacgcgcctgtcaacatgatttttggattttttcggcggaaatttttgaacctctcaaaatcgcttgttttctctcaaatcctcccgatttctaaattccgatttttgtaaaagttttttgcccgccccggcatatttttgccatttgcccgctacaaatcccgctgcggttgtggtatactataaaggatatgggcggtgcaccgccgcccttgccaacacaaggagaatacatccatgccaaatgagatcgaccgcacttcttcggcgcagcgtcgcagttccaggctgctgacggcgatggccattttcatctgtctgggcatcgcagcctacatggtgctcaccctgctggtgaaccggcagacccccgcgacacccgacacccactataccggcacgaacggcatctctgtctactacgacagcagcgtgtggagcgtgtgccgcatgaccgaggacgcaaccctcggcaccgtgctggagcttgccaccgccgacacggcagacagcgaggattatcaggccgtgctgttgcagcggggcaccgccgacagctacgaaagctttatcgaggactcggaagccgacctcaagcaggcctacggcgtcatcaaaccccgcaaggtcaacctgaccgtggagggcgcagcagtggaagcggtgcgctgtgatatccgcacctactacgccgtgctggccaccatcacctatgacagcggcgatgtggtctatgtctcggcgctgacaaagctggcgtccatcagcgatgtggtcaatctggtagaaagcgtgagcctgtcatgagtgatcttcgtgcaatgcagcggctttgcggtttaatgcgcaaggccgtacaggactatgaaatgatcgcccccggcgaccgggtgatggtgggcgtttccggcggcaaggacagcgtggcgctgaccatcggtctttccatgctgcgcaagtacatcggctttgactacgaggtagtagcggtcacgctggacccgcagttcgatcatcagcccatggactactccgcgctggcagagctgttccggcagcacggcatcccctacgaggtgcgccgcaccgagatcggccctgtggtgttcgagtaccgcaaggagaagaacccctgcgccctgtgtgccaagctgcggcggggcgcgctgcacaccgccgcgcaggagctgggctgcaacaaggtggcgctggggcatcatctggacgatgccgtggagaccttttatatgaatctctggcgggagggacgcatcggctgcttctcgccggtgacctacctttcccagcgggatctcaccctcatccgtcccatgctgctggcaaccgagtacgaggtgcagtgcgccgtgcgggaggcggacttgcccatcgtgaagagccgctgccccgccgacggcgttaccgtgcgggaacagaccaaggaatttgtgcaggagcgctgccgcaccgaccacgccttccgccaaaagactctccatgccttgcaggagagcggcattgacggctggcgtcccgtccacacgggccggggcagctttatcgtaccaaaaaaggaaacagatcatgcagaaacaaccgtttgaaaaacacgtctgggccgagatcgacctcgaggcccttcggtataatttccgggaggtaaaggcccgggcaggggcgctgcccctgtgcgcagtggtcaaggccgacagctacggccacggcgcggtacagtgcgcccgggtgttcgccgaggagggcgccgcatggctggcggtcagctgcctgaccgaggctgtgcagctgcgcaaggcggggcagactttgcccatcctcattctggggcatgtgcagcccgcctacgccgccgccctgatccagaacgacattactgtggcctgctactcccttgcgcaggcacgcgccctgagcgaagccgccgtggcggcaggtggcagggtacacatccacctcaaggccgacaccggtatggggcgcatcggctttgccctgcgcaccgattttgacgccgccatccgggagatgctggaagcctgtgcgctgcccgggctggaaatgaccggcctgttccagcatttttccgtggccgatgacaccgccccggagaatgtggcctacaccgccgagcagcacgcactgttcgtgaaagccttccacgcactgaaggccgccgggcgggagcctgcccttgtgcactgtgacaactctgccggggtcatgctgcacccggactggccggagggactgccccgggagcgctgcatggcgcgccccggcatcatcctgtacggctacgaccccagcgacgaggtgcgctttgggcgctttaagccggtaatgacccttaagaccgtggtgagcatgatcaaagagatgcagcccggccagtgcgccagctacggccgccgctttaccgccgaaaagcccaccaaggtagccaccctttgcaccggctatgccgacggctatccccggcttttgagctgcggcaagggcgtggtggagatccacggcaaagcctgcccggtactgggccgggtgtgcatggatcagatgatggtggacgtgaccgatgtaccggaagtgcgcgaggacgatgaagccatcctgtggggcggcaccgtgagcgacaccgcagagaccattgcccgcaagaccgataccatcccctacgaagtgctgtgcggcgtttcccgccgcgtgccccgcgtctaccgcgaccacggacagatcgtggccgtggaggactggatcttagaagcataaagctgcccggaggaactacatggcaagagacaacatccgcaacttctgcatcattgcacatatcgaccacggcaaatccaccctgtccgaccgcattctggagctgaccaagagcgtggacgagcgcaccatggaggatcagatcctggacaacatggatatcgagcgcgagcgcggcattaccatcaaggcgcgtgccgtgaccatgaactatactgcaaaggacggcaagacctacgagttcaacctgatcgacaccccgggtcatgtggactttgcctacgaggtcagccgcagtctggccgcctgcgagggcgccattctggtggtggacgccacgcagggcgtggaagcgcagacgctggccaacacctatatggcactggagcacgatctggagctggtacccatcctgaacaagatcgacctgcccagcgcccacccggacgaggtggcgcaggaggtggaggacgtgatcggcctgccctgcatggacgcgccccgcgtctccgccaagactggcctgaacgtcgatcaggtgctggagcgtgtggtgagcgatatccccgcccccaccggcgacccggacgcccccttaaaggcgctgattttcgacagcatctacgacagctacaagggcgtcatcgtctacatccgcgtgttcgagggctctgtgaagcccggcgacaccatccgcatgatggccaccggcgcagagttcacgctggtggaggtgggtcacatgggtgccacctccctgaccccctgcgcccagctgcaggccggtgaggtaggctacctgaccgccagcatcaagacggtgcaggacacccgtgtgggcgataccgttacactggcagagcgccccaccgcagaggcactgcccggctaccgtcaggtcaagcccatggtgttctgcggcatctaccctgccgatggtgccaagtaccccgacctgaaggacgcgctggaaaagctgcagctgaacgacgcctccctgacctttgagctggagaccagcgccgcgctgggcttcggcttccgctgcggtttcctgggtctgctgcatatggagatcatcaccgagcgattggagcgggagtttgatctggacatcatcaccaccacccccagcgtgcgctaccgcctgaccttgaccgacggcactgtggagatgatcgacaacccctccagctacccggaccccagcaacatcgtcaagcaggaggagccctttgtggatgtgcatctgtacacccccaacgactatgtgggcggtctgatggatctttgccagagcaagcgcggcgtgctgatcgatatgaagtatctggacgatgtgcgggtggacctgcactatgctttgccgctgggcgagatcgtatacgacttctttgacgccatcaagagccgcagccggggctacgccagctacgactatgagttcaaggagtaccgcgagagcgatctggtcaagctggactttttgctcaacggcgaccccgtggacgccttgtccatgatcgtgttccgggacaacgcctacgccaagggacgccgcatctgcgaaaagctgcgggacaacatcccgcgcaacctgttcgaaatcccggtgcaggcagccatcggcggcaagatcattgcccgcgagacggtcaaggccatgcgcaaggatgtgctggccaagtgctacggcggcgatatctcccgtaaaaagaagctgctggaaaagcagaaggaaggcaaaaagaagatgcgtcagctgggcagcgtttccctgcccagcgaggcctttaccgccgtgctcaagctggacagcgatgacgattgatctgcaaatatacaaaagggatgctgcgtgcgcggcatcccttttttgatgggaactcccaaatgtgaaatccgcccatggcagagatgcactctttgcttttcctactaaatatgttataatttatttatatatcagtttttgtatccgtttttggaaagatgggctgcggccttgtgctgcgcccttctctatgcaacgttccccggcagaaaggatgtggcctttatcaaagcaaaacacggaaaaggcgcagcacaaagcggcagacacacacacagcggcagctgcgcacagagggcaacgcccctctggaagcaggtgctgctgacgctgctgatctttattgctctgctcgctctgctgggcggggcgctgtggcagaatatctgctataaccgcacccactatacggcagagttctatcagatccattcccgcaagctgacccagagctgccgggtcgtttttctgaccgatctgcatctgcgggagtacggagcagataactgtgagctggtgcaggatgtccgcagccttgccccggatctgattttgctgggcggcgactttgtgacctacggcgaaggcaccaattatgataatatgctctccctgttccgtcagttgagcgagattgccccggtatgcggagtgctgggcaaccacgaggacgagctgtattttctggacaacgaccgggaactggtggaaaagttcaccgccgccggggtgaccgtcctgcgcaatcaggaggcgcgctataccatccacgacaatgttatcagcattctgggcgtggagggcagcccggcggatttttccaactacggtgccagcacctttatggacagcgtggagccgcagacagactacgacctgcgcatctgtctggcacacgttcccacctactttcccgagcatctggaaaattattcctttgagctgggactggccgggcacacccacggcggcatcgtgcgtctgccgaagatcggtccgctttataccgccgaggagggctttctgcccgactatgccggaggcagctatacgcttgccaacaacgccaccctcattgtaagccggggactgggcgattccagccgggcgccccgcatcaacaatgtgccggagctttcggtcattgacatcgactaagcggcctgcgctgcgcgtgcaggccgctgcaaaagggtagaatgccatggatgacatcaaagaaaaaatcaaacaggcgctgcgtcatatctggacaaataaataccgcctgtttctctgcctgctgaccttgtgctgtctgttcgggctggttcactatttcaaaagtgcggacagcgccactgccagcatctccttcaattactccgaggcggcgcttggcatgaaccccaacaagacccgcttcaacgcctacgagatcgtgtcggacgaggtgatggaacgcgccatccggcgggtgggcttgcaggacagcctgactgcctcccagctggcccagtgcctttacctgagcccggaaggcaccggcagcgccaacggcagcgagtatatcagcaccaactactatctctccatcaacacccgcaagctgaacctgggcaaccgcaagcccacagatcttttgcagagcgtgtgcgaatcctaccgggagatctttctgagcaactactgcgataaccagagcatcctcaaggaaaaactggaagtgaccaccgcgtgcgaaccttacctgcgactgaacgagctggaggtgcgcgccgctgcgctgaaccgctatctgaacgcccgtctgggggaaaacaaaagctttacggacgatacaaaccccgacccttccaccaacaactttaccacactgggcaaaatgatcaacaatctggtggattacgacctgcccaacgccatggcctttgtcatcgagggcggcgttgcccgcgacccggccatgctgaccagcattctggaatacaagaacaaaatcgacgatattgacatgcgcacccagcaggcttactatgacgccgacaaaaagggcatttccatctacgaaaaatccatgacctccatcatgatgatccccaccgtggatgaagcgagcgagtactatatgtcccgcaccaagaccgccatggatgcgctggcgcgggcggcagacgcttctctggccgatgccaccgactaccagtccgagatcgtgagcacgaattatgtgatccagaagatccgggatctggatgccggccagccgcgtctggccgaggcgcaggccatggtgaacaagctggagaccgccatcaacgagatctcggagcagttgtttgtactggacaaggcgtatatcaagtacaaatcccagaactatatcacctttacctacggctcggcctccttcctgcagcgcctgagcctgaaaaagaccctgatggagtccgttgccgtgatgctgggcagcgcatggctgctccacgaacgtaaacgcagaaaggcaaggcaccgcagatgaaaaagtttgagatcctgcgctatctgaagcgtttcagcctgctgatctttctggtgtcgctggcaggtgcggccgccatctacctgtatgcagacggtaggcagaagtacactgcatcggtcattatccgctataccaacgacggcatctcggacggctacaccccggacggcagcgagctggacgtcaacgagatctactcctccaccgtcatctcgcaggccatggatgcactgggtgcttccgggcggctgagcaccatccgttccaacatctcggtgaccccggtgatctcggaagatcagcagaccatcaacgaggcactgctgcaaaagggcgaagaggtgacctatttcccggatacctacaaggtgagccttgtggtggatggagagcagggcgcgggttatgcccgcaatatgctggatgccatcatccagagctactgcacctattatacggaaaaatatgtggagcagaaactctcgctcaacccctcgtccggtctgctggacaatggctacgattactacgagtgcatccgcattctggaaaacgataccaacgagatgcaggactatctgctgagcaagcgggagcactacccgaattttcgctcctcccgcaccggctacacctatgcagacctgtgcgatatctattccgacttcaaaaaatacaccatcccggcgctgtacgcctatgtgctcaacggcccgcaggtgcgggacggcacggtgctgcaggaatatctggccaacaccatcgaaactgcaaagcagaacgaacagatcaccaccgagcagcgggacagtctgtggagcctgaccgaccagtatgtgtacaagaacgccgatctgctgcaaaactactttactgaccggggcgaggtggtgtcctcggactatatcctgaataacatcgagctggaaggtgctggcgataaggcacagaccacctacgacggtctggtgctgaaactggtatcgctggaacagcaggtcgcatccagccagatcgaccggcagtttcaggaggagatcctgcaaagcttccgcaacgtggattttggcggtacaggcgagcagcacgccaagatggaaagcatgatcaacgactacgaggcgcagctgaaaagctactacgagatcatcaataccagcagcaaggagctgaacctgtacatcagcgcggattatctgaagatgatcagctcggtgcaggtggctgccgccatcaatgtcaagctgtatctgatgctggcgctggtgctgttctttgtcatcggctgctgcggtgcaattctgctgggccgcatctcggatgcggtggattatctgctgtatgtggacaaaaagaccggtatgcccaaccgcgaaaagctcaacgtgtatattaccggcatggccgaccgcatcctgccggaggactatacctgctttgctttgcagctggacaacctgaccgagatgagccgccgcttcggctaccatgtgggtgacggcatcctgaaggatttttccggtcttttgcagctgatgggcgataccgacggcacggtgggctacaacggcgcgggcaagttccttgccttctttgatgaatgcagcacccggaaggcagaggtcatgatccgcatcctgcaaagtcaggtggacgagtacaataagctcaacccggagtaccccatcctgttcaccgccgcatgggccaccacctcggaggaggagctctaccatgtgcgcgaccttgtgcgctgcgcacagaaaaagatgtccctgatcgcaggagagggcggcgctgtccttgccggaacggagcgtggtgaagcatgatccagaaccgacgcgcttatcagctgatccactgccgcacccgcagccgtctgctggcgggcgctgccgccgtgtgcggcgcagcctgcggccatgcagaccttgggctgtaccatctgctgcaccggggcggtgccccgctgccggacagcacacaggccgaccgcgccgcgctggcagccctgtgcccgaaacctgcagcagaagagacctgcccgctgctgccgccgcaggacccggcggtgaccctttcggtcattgtgccggtgtacaacggcgaagctaccatcggcccctgtctggacagcattttgcagcaggagaccagctgcaccgtgcagctgatcgtggtggacagcgattccaccgacggcacagccgccgtgctggaacgctaccgggcactgcccggggtgttgctgtgcaattgcagtgcgccccgcagcgccgccgcccgcaacgagggactgcgccacgccgtgggccgctggctgatgttcgtggacagcgacgatctgttattgcccggtgccatccgcaccctgctggaggccgcacagcgccttgacgccgatgtggtgcagggcggctggcagtacctgtacaccgacggcacccacggcccggtgcagcgctacccggcggcagtctacgccggtgccgccgcgccggagcggttcgagctgcccgggatgccatggggcaaggtgtaccggcgggaactgtttgcacaggtgcgctttccggcttactatacctgctttgaggatgccatcatccattttctggtattccggctggcaaagactgtggcctctgtgccggagatggtctatctgtggcgcaaaaaccccaaggggcttaccgccacaagtcagcaccgccctgccgccgtgcagagctactggatcatggagcagctggcagtgcaggatgctgcgctgggcctgccccacgatgcgctgtaccgctgcaccctgacgctgcagctttcggctttctgctatgccaccgtatccggcctgccgccggaaacgcagcaggctgttttccggctgtgctgtgctttgtacgcaaaggcgctgccgcaagagggcgcactgccccgccgtgcccgctggggtgcccgggcgctgcggcagcaggactttgggctgtggtgccgctacggcagaagatttcagttgttataatataaggagtacccatgatacgagtgctgcattcggtcagcaatatggaccgcggcgggatcgagaccatgctgatgaactactaccggcatatcgaccgcgaaaaggtccagtttgattttatcgtcaacaagcaaaagcccggcgattacgacgacgagatccgccgtctgggcggacatatctaccagagtccgggattaaacccgctgcactacccggcgtatctgcgctttgtgcagcagaccgtggccgcagacccccgcatccgcatcctgcacgcccacaacgaggcgatggggctttatgccctgaagggtgcggagaaggccgggctgcaagtgcgcattgcccacgcccataatatctggatcgtccgggactacaagtggccgctgaagatgttctgtaagcagctgctgcccggcaccgccacccacctgtgggcctgcggccgggatgcgggcatctactactttggcaaagcggactgggagcgccggggacagatcattcccaacgccatcgagccggagagcttccgcttctcccccgccgtccgcgccgaaatgcgggcgcactacgggctggaagaccgggtggtgctgggtcatgtaggccgctttgatgtccgcaagaaccacgagcgtctattggagatctttgccgcctttttgcagctggagccccgggcgatgctggtgctcattggtaccggcaagctggagcaggctgtccgtgcacaggcgcagacactgggcatcacagaccatatcctgtttgccgggctgcaaagcaatgtggccgactggtaccagatgatggatctcttcgtcatgccctcccgctttgagggtctgccggtggtggggatcgaggcgcaagccgctgggctggggtgcgtattttcggacgcagtgccggcggaggtgctgctttcttcccatgccatccagatcccgctttccgccagcaatgcagactgggcagcaggcttgcagcggatgctccaccagccctgcgaccgctctgctggtgcagaactgatccgacaggctggctacgatatcaacatcgccgccgcccgcttacagcagcagtacctgcaactgggagggcaggcgtagccccccggcggctgcgggaacacccacaataaaaggagagcccttttcatgcgcacattggatcagatcctgaccaaaaaggattacagccggaaaactccggcctctttgttttataaggacagcccgctgtggcaaaaactgctgaccatcggttgcgtggtctttttggccggtgccgggctgggagagtggaaaccaatcaacagcgcagtgggcggccttcccaaagccatctctctgggggtgatcgggctggcaatgctgtacaccctgttttacccggacgaaaagcgtctccgggagttatggaagcctaccctgctttatatgtccctgatggcggcgctgtttttctggtcgatggtcatctggatcgaaagctttgccgcagtgtcttccatgatccgaagctgctccaagatcgtgttccagagtattgccatcctcactgctgtggcgctggtcaatctgttccgggaaaaagccatcgagctgtttaccatcagcatctgcattgccaacacggccatcatgctgctgagcattcctggctacggttttgcagccagcatccagtctctcgttacctgtctgatcaccttcggtgatgcggatggctatgcgctgcagctggagattcacgacctgacctttgtgttcgggcagatgatcttgtactacgccgtttttgctcctcgtactacccggcaagaaaagcgcaagcgctggctgtatctgctgctctgctgctggttttttctggtcggcatgaagcgcatcgccatcccggcggtggttctgttcgtcctgatcgctctgcttctccgcaagcgcaaaatccccggctggttttacccggcagtgggcgtctgctgtatcctgttttttctggcattcctctactgtgtgcgctacggtgttatttcaaggttgctgaacagttttggcattgacatgatgggacgggactacctgtggagcatggcgaacccctactatgaattttctatcacctatatcggccgcggttttgaatatgtggacaccatcatcgcccagtggtataatgacggactcatcaaccagccttaccccttccacaacgacatcctgaaggtctttgtagaggtaggctttccgggttttctgctctggtccagcatccagtatgttctgactccgctgttctggcagcgctatgcagaccaagagaccacgttgctgtatctgtccgagctaggctatatgacggtgacctacctgaccgataataccgccttttatttctggagtacgatggcgctgcgtctggtgacgcttgcctacgccatggagcgcaaaaagcccccggaacctaaggtgtggatgccggacagtcggcaggagatgcgggaccgcatccatattctgatgcagaaagtgtgacggcaaggagtgaaaacaatgccctgtatctcgtttatagtgcctgtttataatatggagcgcctgctgccccgggcgctgcgctcactgcgggcgcagactttgaccgactttgaggccatcctcatcaacgatggctccaaggacggcagcgccgcgctgtgcgcacaggctgctgccgaggatgcgcggtttcgctttattgaccagcccaacggcggtgtagccgctgcccgcaacgcgggtctggatgcagcccggggagagtatatcttctttctggatccggatgactgggtagagccgaatgcggcagaagtgctgtatcatgccgcccggaatgctgatgcggactgcgtggagtttgggctgtatctggacagctatgatgaaaacgaccggctgctgcacacgcagaccagcggcagcaccctctccggcgtgtaccggggcgagcccttcaaggagcatttcgacaagatggcgtcctcgtatctggctgcaaacaaaatgtaccgcagagcgtttctggaacagcaccatctgcgctttccctgccatcagctgggtgaggatggaatgtttttcgtagccttctatcgccagaaccccggctgtctggtggtgctggaaaagccgctgtaccactacacgatcgcccggcggggcagtctgaccaacagctaccacccggaacggctggaggataacttttatctcagtgacgccgtgtgggacaccgttgctgcgtggggcttgcagaacagccccatgcaccgcgcaaaggcgaactactgcaccgtccgcgatctgatgatgggtgtcaagaaccttggcagcagtccgctttcccttgcagagcagaccgcatggctgcgcagcaccctgcaaaagccccgcgtgcacacagcagtgcgcagcaccccgctgcacgtcatgcaaagccggaacgaccaggtaaagctgttgctgctcaagctgcggctatgccgcgcggtgctgctgctctcgggcgcaaatcagcgtaagaatacctgaagagaaacgcaaaaatccccccgctgccaactggcagcggggggatttgttaccgatttaaatgaaaatcagcgcttagttctgcttcatgcgagcgaagcagtcagagcagtagaccggacggtcctcacggggctggaagggaaccttgcaggccttgccgcaagctgcgcagacagcgtcgaacatctgacgctcgccgctgttgctgcgtgcgccgccgttcttgcgggcgtcacggcagggcttgcagcgctggggctggttctcgaagccgcgagaagcgtagaactcctgctcaccggcagtccaaacaaattccttaccgcagtccttgcagaccagagtcttgtcttcaaacatagtagtatctcctctttagttagttcttgcccacggaaggattgtaaccatacctttggttttgggaccatcgcgctgatcagtaagcttaccaggggcttgaatagataaacgccctcggattgaggactttcctattgtaccgttatttttgagatttgtcaaccaaaaaacaaccgttcgcccttttatttgtacacatggcacaaaccgacagcatatatttgggtaaaatcaccgccttaagatggaaaagcggcgcgccgcacaggttatgcgcagcggcagataatttatgatttgcggttcagaaacacctgcgggtgtttccgaaccactttttcacacaagcaaaaaggggctgccgcacactctgtgcagcagcccctgcaaagccctttgggaaaagcttacttctcgatgacttccttggtgtcgcgggcgatcatcagctcctcgtcggtagcaatgaccagcgtgcgcacctttgcgccccaagcggtgatctcgcacacatcgccaacagggtgcttgttcttctcggtgtcgatgcggatgcccagccaatccatgtggtggcagatctttgcacgggcaatggcatcgtgctcgccgatgccgccggtaaagacgatggcatccacgccgcccatagctgcaatgtagctgccgatggtctttttgatctggtagttcagcatatcggaagccagctgtgcgcgcttgttgccggccgcggcagcctcttccacgtcacgcttatcgctggaaacaccggagatgcccagcagaccggacttcttgttcaggatctcgtccagctcgtggccggtgatgttcagggtgtacttcaggtagttgaccacagaggggtccaggtcgccacagcgggtgcccatcatcaggccggccagcggggtcatgcccatggaggtatccaccaccttgccctgatcgactgcggcaatggaagaaccgttgcccagatggcaggtgatcagcttcaggcgctcaatgggctcctccagatactcggctgccttgtgggcaacgtacttgtggctggtgccgtggaagccgtagcggcgcacgccgtacttctcgtagtactcgtaggggatggcgtacatataagccttcggcggcatggtgctgtggaaggcggtgtcgaacacagccaccatgggaatgttgccgaacaccttgcgggcggcctcgatacccagaataccggcggggttgtgcaggggagccagcgggctcagctcacgcagcgtgttgatgacctcatcggtgatcaggcagctgctcttgaacttctcgccgccatgcacgacgcggtggccgatggcgtcgatctcgctcacgtcattgatgcacttgcctgcaccggtggtcatcttcttcacgacctcggcaaaagcctcggtgtgggtggggaagattgccggggtggtggccttggtgccgttggcctcgtgagtaatcatgctgctctccatgccaatgcgctcgcacaggcctttgcacagcaccttttcgccgtccatatcgatcagctgatacttcagggaagaagaaccgcagttaataaccagaatcttcatctgtgttgcctcctgaaaatttttgtaccgtccgcatcctgaaaaaaactgcggacagaattttacagattcctatgtttattatataataggcgtgacggcttttcaaggcgcaacccgggcaaagcggtaaaacttgtgtacaaggtttttgtatatcctgcccacaaatcccggaaacggcaggatttttctgtatatccgatataattttaacaatcttttggcgaaaaggagcagttccatgaagtttgcaggcatcattgcggagtacgaccccttccacaacggccacgcatggcagctggcacaggcgcgggcgctgggggcgcagcgggtggccgtggccatgagctgcgggcttacccagcggggcgcgctgccgctgctgccggaggcggtgcgggtgcaggcggcgctggcctgcggagcagaccttgtgtttgccctgcccgcgccctgcgcctgcgccggtgccgaggcttttgcccgggcgggggtgcgcattctggccgctgccgggtgcgatgcgctggtctttggggcagagaacccggacaccgccctgctgcaaaaagctgcccgggtgctgtgcagcgaagcataccgcaccgcgctcaggcagcagcttgccgctggggcgcgcagctttgccgccgcccggcaggcggcggtgcaggcgctgtgcccgggggcagacatcgccgcactgctggacaagcccaacaataatcttgccgtagagtattgtaaagccatcatagaacagaatgtagaaatgcagcccatcgccctgccccggcagggcgcagaccacgggcaggcgctgaccgaaagtgctcatgcagcctttgccagcgccagtgccctgcgggcactctgggcggagggcggcgcggcggcactggcaccttatgtgccggaaaaggcgctaaaactgtataaacaagaagaatatgacggaaagtatacagattttgtggtcatggggcactgcgagctggcactgctgcgggcagcctgcgcagggcaagctccctttgccgcagtgcgcggggtatccgaaggcttggagcaccggctggaaaacgccgtgcgggagaccgcaagcctgcccgccctgctggacgctctgaccaccgtgcgctacccccgggcgcggatgcggcggctggcaatggatgcggcgctgggctacaccgcccagaccccggcgctgccgccctatctgcacctgctgggcgcacgcaaggaagcgctgtccctgcccggggagacggcgctgccgctgtcccactcgctggcgcggctggcacgggaaaacgagacctgcgcccagatggctgctgcccagagcagagccagtgaccttggtgcgctgtgccgggcaaaaccggagccgatgggcggaatatatcgtcaaaaaattatctttttgacgaattgacaaaaaataacacgaaaaattttatattgtaccctcttgtatccggcgcagttcgggtgtatgattaaagcaatgcaatgttggatacaacgaacctgcaaaaacgactgtccccgcaggggaaacacaaggaggaacccatggcacttcatgttctggacgaagccaaccgctgcctcggctgcaaaaagccgatgtgtcaggagggctgccccatccacaccaatatcccggaggtcatccgtctgctcaaggcaaaccagatggacgatgcgggccggatgctgtttgaaaacaaccctctgaccaccgtgtgcagtctggtgtgcaaccacgaaaagcagtgcgagggccactgcatccgcaaccggatgcccagtcacgacccggtgcacttttccatcatcgaggactatatctccaccacctatgccaacaagatgaccgcaggccctgccccgaaaaacggcatgaaggccgctgtggtgggctccggcccggcaggcctgaccatcgcagtgctgctggcacgctggggctacgatgtgaccatctttgacgcccgggataagatcggcggcgtgatgcgctacggcatccccaactaccgcctgccggacagtgtgctggacgatttccagtatcgtcatctggaactgaagggcatcaaggtgcgccccaataccaccatcggtaagaccatcaccatcgacgatttgttccgcgacggctacaagagcgtgttcatcggcgccggtctgtggaaggccaacgccatgcacatcaagggcgagagccttggcaacgtggcctttggcatcgactatctggcaaactccaaggctttccgtctgggcgatgacgtggccgtcatcggcgtgggcaactctgccatggactgcgcccgcaccgccatccgcaacggtgcccgccacgttacctgctacgcccgccgggacgaaagctgcatcagcgcttccgagtacgaggtgagctacgctaagctggaaggcgtgggcttccgcttctgcaaggcaccggtggagatccgggaaaacggtctgatctgccgcgacaccgtcaagggtgaggacggcaagttcacgcaggtagagggcagcgagactttttacccccacaccggcgtcatcgtgtcggtcagtcagggctctgagagcaacctcgtcaagaccacgaccggcatcgagactaaccagaagggtctgctgagcgtcagcgaggacggccgcaccacccgcgagggcgtatttgccggcggcgacgccgtcatgggcgcacgcaccgtggtagaggctgtggctgttgccaagaaggtggctgtcgccatggacgaatatatgaagagcctgcccgccgacaccgctgccgacccctatgccgacattccggtgttccagacccctacctctgacgtgctggcaaagcagcagttgtaatagaacgattttgaatggtactcgggacaccggagcgtctgcggacgctccggtgtcccattttcacagccgcagcggctgcaccgcgcaccctttcggcagagtgttcaacggcggggcggcccccttgtgcagaacctccaaaaatcgcgcagaagcttgtatttttcctgcggagcgtgtacaataagcacagaatatgtttgcgcagagcaggagagcgacagacagagcagatagctttgtttggtgcgctcttttttgttttgcgctcaagcttcagagcaaggagagaagatcatgagccagaccaaatatatcctctcactggatcagggcactaccagcagccgggcgatcctgtttgacaacgagcagaacattgtctgcgtgcagcagcgggaatttgagcagatctacccccatcagggctgggtggagcacaaccccatggagatctggtccagccagtacggcgtgatgaacgaggtaatcgcccaaagcggcgtagaccccaaggacattgcgggcattggcatcaccaaccagcgcgagaccaccatcctgtgggacaagagcaccggacgcccggtgtataacgccatcgtctggcagtgccgccgcaccgcgccccttgtggacgagctgctcaagacccccggcatggcggactatatccgggaaaacactggccttgtgccggacgcctatttctctgccaccaagatcaagtggatcctggaaaacgtccccggtgcgcgggaaaaggccgaggccggggagcttttgttcggcacggtggacacttggctggtctggaagctgaccggcggcaaggtgcacgttaccgaccgcaccaacgccagccgcaccatgctgtacaatatccgcacgctggactgggacgacaccctgctcaaggcgctggacatcccccgctgcatcctgcccagcgtgaaggactccagcgaggtgtacggctacaccaacattcagggcgtggacgtgccggtggccggtattgcaggcgaccagcaggccgcgctgttcgggcagggctgctttaagcccggcgacgtgaaaaatacctatggcaccggctgtttcctgttgatgaacaccggcaacaagatctaccagagcaagaacggtctggtcaccaccattgccatcagccttgacggcgaggtagaatatgcgctggaaggctccgtctttgtgggcggcgcggtcatccagtggatccgggacgggatgcacctgatccaggacagctgcgattccgagtactacgcccagaaggtgccggacaacggcggtgtgtacatcgtgcccgcctttaccggtctgggcgcaccttattgggatatgtacgcccggggtgccattctgggcatcacccgcggcaccacccagaaccacatcatccgcgcagcagaggaatccatcgcctaccagagcgccgacctgatgtgggccatggagaaggacaccgacatcaccatcagcaccctgaaggtggacggcggcgccagccgcgaccacttcctgatgcagttccagtccgacatcctgaacaaggaggtgctgcgcccggccatccgggagactaccgcccttggcgcggcgtatctggccggccttgccaccggcgtgtggaagagccgggaggagatcagccacctgtggagctgcaaccagctgtttgagcccaaaatggacgctgcccagcgggaaaagctggtcaggggctggcacaaggccgtgggccgcagtcaggactgggctgagcacgaggtgtaaggcaagaaagcttttgacagcataatattataatacccccggcaggctgccaccgtaatggtgattgcctgccaggggggttctgtaccgttcacagcagtcgaagttgaatttattccagatactgcggcagattccaagcacctcgcagcacacggctggctgttttagggtaaaagccagacagataccgggcgatatcgttcaagtcctgcacagcaaggggcagatatttgatcttatacgtcatactgcttgctcagcgtctcccatacgctttcgtggtcttcccactgcgtgtcggggtcagccgcctgctgtgttgccttggcaagtgcctcggcaacatatcgctggtgcaaaaactcctcgtacttggcgtagtcctcaatgttgatgagtacggattctccacggccatgattcgtgatgatcacatggttgtggtctttgagcatctccgaaagctcagcgtaatggttgcgcagatcccgggaagggcgaacgaatgtctgcatcatacgggacacctcctgtcagagtcattgtatcacaaaatgactacatgcgcaaggcggatgctcttgctggggcgtgcggagccccaaaccctgcagggaacgagtacggcaacctgaaatcaatccgtttcttttagcctttcgaacagtctgcgttcaattttataaattccttgataaggttgttcaagatagtacttccccctgtcctcatacgcaaagatagtaattgttcctgtctcatgccggaagtcaatcctgatataactttccgcttgcgggacatcttgaacgctttccttcttagtcggtttagaactagaaatatcggcgattatttcactcatccaagttttatctgaatgacttactgtgttttcttcaatcgttatatcaatagatgtaatcttatcggcttgaggtagcgtaatgggcgctgctttttttccacacgcagctaaagtcagtatacaggtaagacacaaaaacaaagaaagaaattttttcataagtattgttacctccataacttccaatttactgggctaagccgagtatatcatacactgttaaaaatagcaaaaggcaggataccactaccatagtgataccctgcctttacttgttccggttctcgttctgtaccgtccaccacatccccagaccgaatggtctggggatgtggtggagcattgtccacagcactcgaacccaacacttcctcacgggtgaccgttttggcatcatccgtgaagttgaaattgagtacgacccggtcatcaaagacgtagaccgagttgacaaaggtatcaatgatctgccgctggtgttccgtgctgcccacgtcacccttgcggaatttttcaagccagaaccgaatccactcacgggtcaagacgggctttttcagctcttcttccagaatgctggtgttcagagcttctttccgggcttccagctcgtccaaacgctgcttggtggtcggggtcaggatgccctgttcaatggcttccagaaggtttgccagccgcttctccgtgtccctgagctggtctttcaggacaggcagccgggtgttctccttctgctgggcttccatgaccaaatctatcagccgttcgatgatttcatcgctgaaaatcaccttaatggcggtatccaccacgaaccgttccagcggctccttgcggatggctttcaggtcgcagtgcgccttgccgtggcgtttggcgttgccgcacttgtagtaatagtaggtgtttcccatgtggctggtgccactttcgccacccatcagggtgccgcacttgccacagaacagcttggtggtcagcagatagctcacatcctcttttgcaggccgaccatgggcgatcctgttctgctcgaaacgctgctgcacccggtcaaacaagtcctggtcaacaatggccggaatgccacccggcgtcacaatgtccttgtagcgatattcgccgatgtagcggcggttgcggaagatctggaagaagctgttctttacgaacggcttcccggtgcgggtacgcaggccgcgctcgttcagggatgctgcgatcttctcagccggttcgccgtcggcgtaccgggtgaagatctcctgcacgatgggagccgtttccgggtcgatatggtacagcctgtcctccttgccgatggtgaagcccagcggcaccacaccgccgttgtacttgcactggagggcgttttcgcgctcaccgcgcgccactttcagggcgagctcggcggaatagtattccgccatgccaatcagcatactctccaccataatgccttcaggcccctgcgagatgggttccatggcagacaccagatggacaccgttcttttccagctggtacttgtagttcacggcatcgtagcggttccgggcaaagcggtccagtttccagaccagaaccacatcgaagattttctttccgctatccttgatcatccgctgaaagtctgggcgatcatccgttttggcagagtaggcacggtcaatgtaggtgccgaccacggtgatgccgttcttctcggcgtagtccttacagtcgcgcagctgtccctcaatggacgcttcgcgctggctgtcggatgaatagcgggcgtagattacggcggtcatggttgcacctccttggcgcgtattcgacttgcctttatagtatcgggtcaagcgcagcttgtcaacaatctgcgagcagattgaaatgtgaaaattgcgaaacgcagcgaaaaaggtgagagcaagaatcgtcccgtggccacaaattttcaattcttgaaaattcttgcccctttgggacagcttcttgttggggcgtgcctgccccaaaccctgcttcttactatttggaaatcacacaattatgcaccactgggtccacgagaactgacgctcatcggaggcatagaactataaaaagattggccattcacagtgttttgagtcaacccaatcaaatcaatcaactggctctcgttatagctctcttgacagttatccagcacagcacattggcagctatatacaccactatcgttagagacaactccccaccattcaaggtctgccaaaagttttccaatcttcttgcggtcaaagcgtatttctttttcaaaaagggacgagtaaatttgtggagcagacatcggtttttgctttaataggagagctaatgccaattcctgtccatgcaaacggtgaagcaaaagacctctgcgaacccaaatgttcgacgcttttttcatagcaaatacctccttttttagatagct

SEQ ID NO: 1068 - DNA, 5901 bp, unidentified
  source 1..5901: mol_type = unassigned DNA
tcagcccacaaacacgtatttttccagccggtccatggcctcccgcaccagggaatggggcagggcggcgttgatgcggatgcagtcgccatcgccgaagcccgcgccgttctgccagatgacgccatgctccacgccccggcggcggagatcatccggcgtgatgccgtggctgcggcaccaggccccgcagttgacgaacagcatatacgtcccctggggcagcatcatggtgacgccgggatagcggctttgcaggaagtcccggatataccgcaggttccggtccagcacggcgcacagctggtccacccacgccatgccctcgtcgctgtaggccccggtgagggcgtgcatggacagcacgttgcagtcgttgtagccggacaggtttccctgccgctggacccggcagcgaagccggtcattatagatgatgtggtaagacccgatcagccccgccaggctgaaggtcttggtgggggcatagaaggccacggtgcgctcccgggcgtctcgggagacggactgggtgggaatgtgggtgtgtcccggcataatcagatcggaccagatctcatcggaaatgacggtgcagtcgttggcggcgtatacctccatggccttttccagctcccagcgctcccatacccggccgcagggattgtggggagagcacaggatagccacatggatgtcgttttccttcagcttccggtccatgtccgcatagtccatgcgccagatgccctccgcgtcctgcgtcaagggcgtgtggatgatgggacggcccagccgctccagggtgtgggtgaagcctacataggtggggctgtggaccagaatcggctcgccggggcaggtcagggcctggaccacggagctgacgccgcccagaacgccattttcatagccgatgtgctgccgctccaggccggtgacgccgtggcgcacctgctgccagcggatgatgctgtcaaagtaggcgccgctcagctgaaaatatccgaaattcgggtggtccagccgggcccggatggcctccagcaccggcggcgcggtggggaagctcatgtccgccacccacatggggatccgggaaaagccctccttgggctccaccccgtcataggggatcatgtccagggccagggcgtcccggccccgccggtccagaatggtatcgaaatcgtactgcatggttatcctccgttctccgttccggacaggtggaacacccgccgggtattttccagtatggctgcctccgcagtttccggcggcagatgcttcagccgggcgatctcctccacgatgcgcggcagcagcagggaggagttgcgcacccggctcagggattttttgctgcccgtccagggtacgtccggcagcacataggggctgtcggtctccaccagcagccggtccaggggagcgcgggccactgcgtcccgcagggcctccgattcccggcgcagcagcgccccgccgatgcccagacagaaccccaggtccagataggcccgggccgtgtcccagtccccctggaagcagtggaccaccccgccgggcagctgacgccgcctgcgccgcagcatggccagggcgtcccggtccgccatgcggatgtgcagcaccaggggcagtcccagccgccgggccaggcccagctgataccggaaccacagcagctgggtcagccggtgcttccggggcaggtgatagtccagcccggtctcgccgatggccgccacgccgggctcccgggcccagacctccagctgcctgcgctgccgccaaggggcctgatgggtccgggtggggtgcacgcccaccgccaggcggatgaagtccggatgctgccggtacagggcagcggtccggcggttggactcaaagtcgatggcgggctcgatgcacagggcgacgccgctctcccgcagacggtccagcaggtcctcccgctgtccctcccgggccgtcaggtcgccggtgagatagcggaaggcgccgtcgaagcgtttgtggctgtagtgggcgtggctttcgatgatcatgcgcgggtcctcctctccgggcttacgcttcttccggctcctccggctgtgcaggggcctcccaggggaccatggtggccacgcaccggttgatggtgaccccctgctgatagaatttggcctcgtagtccgtcatgacccccacggggccgtcggcgtggaggtcccgggtgacctgggacagccggaagccgaattgggggatctcctccagggaccactcgaacagcttgtcgttgtcgcttttgaagtggatctcgccgcccatgggcagcacccggcggtataattgcaggaaattgccgtgggtcaggcggcgctttttctggttgcttttgggccaggggtcgcagaagttgatatagatgcggtccacctcgccgggggcgaagaagtcaggcagacaggcggcgtcgccgtccacaaagtacacgttgtgcagccccgcgtcccgggcccgttccatggccaccaccatggcgtcggggactttctccacggcgatcagcagcacgtccggctcggcggcggcggtttccgcggtgaagcggcccttgccgcagcccagctccacccgcagctcccgggcctccggcagcagctcccgccagcggccccgcagagcacgggggtccgccaccagcagggcgccgcaggcttccatccggggcagcagattctttttctttctcatacgcatgggtcatttcctcctgtgcggccatggccgcgaataaaataccaactctatatataccacaagatacacggttctgtaaacgaaaaaaatgctccatttggtgccggggacggttttgtgaccggattatgaacatgtcatattgaaaaatgtgcaaagaaaattcatttcttttgtgaaatatcctgaaaaagaaaaagccgggaaacaagggcttgataatttttagacgagggactataatacaagctgtatgaagagtacgcatgatgggatcgctatgggcggcatcccgtcgcgcgcccgccgctgcggcgggggatcgaagcaaggaggaacgatcatgacgaatgttctgttggaaaagaagggccacatcgccgttgccaccatcaaccggcccaaggccctcaacgccctgaactcccaggtgctggaggatatcgaccagctggtggagcaggtgaaggcggacgacgagatccgcgccctggtcatcaccggcagcggcgagaaggctttcgtggccggcgccgacatcggcgagatgagcaccctaaccaaggccgagggcgaggccttcggcaagaagggcaacgacgtgttccgcaagctggagacgctgcccatccccaccatcgccgcagtcaacggctttgccctgggcggcggctgtgagctgtccatgagctgcgacatccgcctgtgcgccgacaccgccgtgttcggccagccggaagcgggtctgggcatcaccccgggcttcggcggcacccagcgcctggcccgtctggtgggcatgggcatggccaagcagctgatttataccgccaagaacatcaaggccgacgaggccctgcgcatcggcctggtgaacgccgtgtatcccctggaggagctgatgcccgccgccgagaagatggccgagaccatcgccaagaacgcccccatcgccgtccgcgcctgcaagaaggccatcaacgacggtatgcaggtggatatcgaccgggccgtggccatcgaggagggcctgttcggcagctgcttcgagactgccgaccagaaggagggcatgggcgccttcctggaaaagcgcaagcacgagccctatcagaacaagtaaccccatttggttaattaacaggctccttaccgggcctgatgattaaaatcgctacttaaataaaaatttatttaggaggaacaatcatgaaagtcgcaatctttggtgcaggtactatgggcagcggtatcgctcaggttttcgcagcgaagggccacaccgctctgatgtatgcttccagcgttcccagcgctcagcgtcataaggacaagctggccgcctctctgaacaagaaggtcgcccgcggcaagatgacccaggaagctgctgatgatatcatgagccgcgtcctggtggaggagttcgaggccgccgccgatgccgacctggtcatcgagtgcgttgctgagaatatggccaccaagaaggagctgctgggccgcctggatgccatctgcaaggaagatgccatcttcgcttccaacacttcctctctgtccatcaccgagatgggccagggcctgaagcatcagctcatcggcatgcacttcttcaaccccgtgcccgccatgaagctggtggaagtcattgccggcggcaacacccccgccgagctggttgagaagatcaagaccctgtccaccgagatcggcaagacccccgtggtggtcaacgaggctcccggctttgtggtcaacaagatcctaatcccctattgcaacgagggcgtttgcgttctgcaggagggcgttgcctctgcggaagatatcgatattgctatgcagctgggctgcaaccaccccatgggccccctgcacctgggcgatctgatcggctgggacatcgtgctgaacatcatggacgtgttgtataacgagacccacgatagcaagtatcgcgcaaacgtgctgatccggaagatggttcgtgccggcaagttgggcatcaagtccggcgagggcttcttcaactacaaaaagtaaatctgtaaaggagaaaagagtatggatttccatctgacgaaggaacagctgctcgttcgcaagatgtaccgcgaattcgcagagaacgaagtaaagcctctggccgctgagatcgacgaagaagagcgtttccccatggaaaccgtcgagaagatggcaaagctgggcatgatgggtatttatttccccaaggagtacggcggcgccggcggcgacgtcctgtcctatgccatgtgcgtggaggagctggccaaggtttgcggcaccactgccgttatcgtctctgctcatacctccctgtgcgccgcccccatttttgagaacggcaccgaggagcagaagaaaaagtatctgcctgacctgtgctccggtcgcaagatcggcgctttcggtctgaccgagcccggcgccggcaccgacgcccagggccagcagaccaccgccgtcctggatgagtccggcgagaactacatcctcaacggttccaagtgcttcatcaccaacggcaacgtggccgacaccttcgtgatcatcgccgttaccggcaagaccaccgataagcgcggccgctccatgaaggagatctccgctttcatcgtggagaaaaccgataagggtttctcccagggcaagcacgagaagaagatgggcattcgcggcagctctacctgcgacctgatcttcgaggactgcgtgatccccaaggatcgtatgctgggcaagaagggtgagggcttcaagatcgctatgaagactctggacggcggccgtatcggtatcgcttctcaggctctgggcctgggcgagggcgccgttgaggaagccatcaagtataccaaggagcgcgtccagttcggcaagcgcatctcccagttccagaacacccagttccagctggccgatatgcacacccgcatgcaggccgctcagtacgtggtgtacgctgctgccatgaagaagcagaatcacgagccctattccatggatgccgctatggccaagctgtttgctgccgaggccgcttccgatgtgacccgccgcgccgtgcagctgttcggcggctatggctacacccgtgagtatcccgtggagcgcatg

SEQ ID NO: 1069 - DNA, 21014 bp, unidentified
  source 1..21014: mol_type = unassigned DNA
caggtctgtgtcaatttcgttttccaaccggatgacggtacacccttcactatgcatgcgcgccatataggtagcttcattgcagagttccgccagtccgtactcctgaatgttgaacttcatcataccggcttcgagccgtgataaatcaagtacatcattaaccaggcgcatcaattcttcggagttcttctgaatgatggaagagtattctttacggagctcatcgggcatgttgggttcggaggctatcaattgtgagaaacccactacaccgttcagcgggatgcggatgtgatagcttatgttcgacaaaaagcgatttttcatttcgttggcttcttccgccatgcgggttgtttcccgtgtttctttttccgatcgttccaaagccttgcgtacgtgtgaaatgcggagcatgaaagcaaccagaattatcaggataatgaccaccactattaaggtgccgagttggatgtagcttttcagccgttcctcttccaatgccactttgtcgatgttgtatttggcttttatctgttgcatctgtttgtcgagaacggtcgtttcgatagagtctttaagatggagcgtttcgatgtacaggggaatggcttccgcacttcgtccggcttctgccaggaggtcggcttttgtcaatttttggtggatgtaattgctgttgaagtcctcttgcagcagtatgatggtggagtctatcttggcaagtgcccggtcatacgctttgcaagctcggaagtatgctgcataggcatcgtaatagagcaccctgtagagaaagaaggtgttgccattgagaaatttgcccgcgttaaccagatttttatgtgcttgttccggctggcctgcatatagataataataggtgtaatatacttcgcagaacaggtaaacatcataaaatgcctctttgagcatcgggttcgtggaggtatggtgatgcagtgtttcttttagcttcgcaaggtattcggagagtaattggttgtttttctgatccttggttatggaaatcagttgacagagaatcgagattcgtactaccgcattatctgtttgtaaagagagttgataggcagcttccaatgctttcattccttcgtcccatctctctgtactgatatagacgttgcccaagcattgttttgctccgatcagtccgcgggcgcagttcactttttgggctctttcgtacatcaggttcgcttcgttgatggcaagttcatactgctcttcgtaggtgcataggtctatctgaaagcggagcgcatcgaaatagagatcccaggtttgcgatttgcgggcataaggctccattgtgtcaagccatttttttacgctgtcccggttgttttggttatagtagtacactgtgtgcagataggcggctatggcgttgtatctgtcattcttctgcaaggtggcttcttcgcgcaacagacccgagaaggtgatacacctgggagtcagctgctctatttgtgccagtctcttgaacatttccagacgagtcgagtcatgcggaagtgactgtgccacccgatacaggctgtccgtttccgtttgtgtatttgcatgacaccatcctaaggcccggcaacatactatgatgataagtatcagtcgcttcatctttctgcctccttttcctttgcgggccggacggggtgtgtaaaccggaatcgcgcaccttcggtgtagtccgggtcaatccatattctccctccgatttgctcgatgataagttgacagatcgagagtcccagacctgttccctgtgcaccttcgttcagtttctcaaaacgattgaatatctggtcctgtttttcacggaggataccacatccggtatctgtcacagtgaacagagctatggtttctgattctttttctaatgtcagggtgatgcttccttcggtagtgaacttggtggcattgatcagcaggttgatcaatacctgttgcaggcgtgcctcgtctgtacgcaaagtcagtttatccagtgaagtgacaaaactgactccggcttgtgtctgcttcaccttctctacggtgttgattacgttacggcatatattgacggcgtcacattctttaaaattgaaagtcagcttgccgggatcgagatttgacaggtctattacatcattgatcagctttagcagcagttcggagttttgctggatgatgtcattgcattgataccgtgtgtcattgtcgatggattcgtcggtcaggatggatgagaatccggaaagtgcattcagtggtgtccgtatttcgtgactcatgttcgacaggaacagacttttggtacgtattgagttctcggcatacttacgggctatttccaattcttctttggagcggagaagtcggttggactcctgccggatgcggacaatcaacagcaaaacaagcattaatataaagatggaagctatgatgatccacaagatgatttggtttcgttgaatttggttccggatttccatccggtctatctgatacattccccgtaggtcattgatttgccgggcatagctcagagcgttcaaagagtctttttgccggttggccttttgatagatacgataggcttcttccgttcgtcccatttgagtcagcagttgggcacactcaagctgcaaaccgatgtgtttgttgggggcaggtgctttagggacctttgtcaggcgttcgtattgttgcagggccagttcatacttcccgacagcctgatagtactgggccaatatatagttgtagatactacgcaggtagagataattcagttgttcgtggattttcctggctttgtccagttcggcttttcccttttcgggatcaccggactcgatgttatagtaggcattgcacgcacatatgaaaaagtggaatgtaggattagggttatcggcatacaggttttcaaacttttgcagatagatgcgtacctcgtccatgtgcgaggtctgaatcagggtcaggatgaatttcggaagaatctcttgttcgaggatttcgctacccggtattttgtcaagcaactccagagcttctttataagattcgatggcgggttcctgcatgttggcattcaagtaggcatccccaatggcacggctggaaagagctataccgatgggggaattcaattctttggcttccttatacatccggcgggcatggtcgatggccatattcatgtctcctcgtgaggcataagctgtcacaatcagttgtttcaactgaaatagagttttatattctttctgctttttcaggagaggagccaattcgttgccccattggataatactgtcgttgggagcttctttactatagttgaggctgttgtcgatcaggtccagcagcgctgacacgtgccttgttgctttgttatcggcagcatatgtagtgacagagtataaggttactgctattactataagcgctatattgaaagactttcccacagtaaatgttgttttcccgatgtttgttttatgcttgtttatgatgcatgtagtgcaaagctaaataaaaagagtgagattcaaacagaatctcactctttttactatattttgttcacaaaaggaactctttagctgttcatgctcatcaggaactcgtcattgtctttggttttttccaatcggtcttttacgaaatccattgcttcgataggattcatatccgacagatacttgcgtagaatccacatgcggtccagtgtttgcttgtcgagcagcaagtcgtcgcggcgggtgctcgatgccacaatgttgacagcagggaagatacgtttgttacttaggttgcggtcgagctgcaactccatgttacctgtacccttgaactcttcaaagattacttcgtccatcttcgaaccggtgtcgatcagggcagtagcgataatggtgagcgaacctccgttctctatgttacgggctgctccgaagaaacgtttcggtttgtgtagtgcattggcatccacaccacccgagagtacctttcctgatgccggagatacagtattgtatgcgcgcgccagacgggtgatagagtcgaggaagatcactacatcgtgtccgcactctaccaatcttttagctttttcgagtacgatgccggcaattttcacatggcgttcggcaggttcgtcgaatgtagaagcaatcacttccgcattgacactgcgggccatgtcggttacttcttccggacgttcgtcaatcaacaacatgatcatatatacttccggatggttggcagcgatggcattggcgatttctttcatcaggatggttttaccggtcttgggctgagccacgatcaaggcacgctgtcctttaccgattggtgaaaagaggtcgactacacgtgccgacatcgagtcggagtagcctcctttgcaaagcttgaacttttcgtctgggaacagcggagtgagatggtcgaacggtacacggtcacgtacgaaagcggcatcacgtccgttgattttagaaacctttaccagcgggaagtatttttcgccttctttgggcggacggattacaccttctactacgtcaccggtcttcagaccgaatagtttgatctgggattgcgaaacgtagatatcgtccggtgaagagaggtagttataatctgacgaacggaggaatccgtaaccatcctgcatgatttccaatacaccggttccggtgaggatatcatcaaattcataaggtttctcacgttcaatcacgcggcgttcctgaacgggtgcggcttcggcggcattttgttgcgacatgggacgctgttgtacaggctgacgctggttattgttgcgttggttattattattgttgttgtaattgttgttgttattgttgtctcgtgggcgaatcacacgcgggcgttggggttgtgccacaggttcgggggctgttgctgcttcggctttggtcgattcaaatttgccgaacagttcggttggcaattctactttttccgaaggcaggtcttcgatggggataaaatcatcgtctgcatctatatccgagaggatcgagctttcttcgtctacaacggccggtttgggtttgagaatcggtttgctgatgggacgtttttctgtttccggttgggcagcgggcttttcttcttgtgccgatggtactgtttccggtttttcggtagtttcttctgcgggtttagcttctgtttctacctgatttttacgggggcgtcccggtttctttttcggagtggcataaggtgtcactttgacagattcggccggagtggcgtttgtttcggcgtttgcctctttagctgtttctggggtcggttctgttgttttaggttgtggctgtgttttggctgcaggtgttttggcatctgttttggttagttctccattcttggtagaagagaaaaccttgtcggcgttttccttctttactgtcacccgagagcgttttttcttatcttctttgcgttcctctttcagtttgtcggcagctacctttttagtagctccggctatggcttgttcgtcgaggattttgtagacaagttcttctttcttaagtgagtctgtttttttgatacccaattcctgggcaatagcttgtagttccgacaaattcttgtcgttcaattgaatgatgttatacatacagtatagtgagttatttaaatattttaattttattcgttgaaatacgtacggctgaagctgcgacgcaggggtcggaaacttaacaaacgcaataatctttaaatgatgaattagggatgtttggctgaatcggaaatccgaatttgtctcccgttggaggggttcggaatgtttcaacgccgcaaagataataaataattttggtttttgtcttcgtttactctttttttcttcataaaagtgtacctttgttgcataaaaagtaactattatgacagcaaacgaagtccatttgatttatttctcgcctacccacacctctaaacaagttggggaggcaattgttcgtggaaccggaataacaaatgtgataaacacgaatttaacacaacaggcaactcaggatttagtgattgccgaatctgcattagctattattgtcgtgccggtatatggaggtcgtgtagcccctttggccatggatcgtctggcaagtgtgcgcggaagtaatactccggcggttatcgtggtggtatacggtaatcgtgcttacgaaaaatcgttgatggaacttgattattgggctattcaacaggggtttaaagtaattgccggtgctactttcataggagaacactcttatagtacagaaaaatatcccgtagctgccggacgtcctgacgaacgtgaccttgctgtggcagccgattttggaaagcagatttcagataaaatagcatctgctaccgaaccggaaaaattatatgcggtcgatgtccgtaaaatccggcgtccgcgtcagccttttttcccattgtttcgctttttgcggaaagtgattgccttgcgtaaaagtggggttccccttccccgtactccttgggtggaagatgaatctttgtgtactcactgcggtgcgtgtgcgaaaatgtgtcctgtaagcgccatagccaaaggtgacgagttgaatacggatgccgaacgctgcattaaatgttgtgcctgtgtaaagggatgcccacagaaagccagagtatatgataccccgtttgccgtactactgtcgcaatgttttgttaagcagaaagatccctgtacgttggtttaatgaaaaaaggttagtggcatagcattgtgcaagattttacttgttattggagtttgtttcaattaacattgttaacgtcatttccttataatttgattcttgtgtgcaaataacaagtcttttgtattttaataacttgttatttgtatcccaagaattattttttatgaagagatttttctacttacataaatttaattagccagttgtgaaaagtataactaaaaatgattttagtgtacggtaaattggtcaggattgggggatctgtcagtgtcatttgctaaatggagattctgtttcctgaactattgtactcaattattgttttaaataaacgtttaagatacagttaccttaatataattatgctgacatttaccgataactttgagaatgataaagagttgatacttcgtgatcatctggcacttgaaagaaccaagctggctaatgaaagaactttgtttgcatatatccgtatggcactttaccttttgactgtggggatagggatatttcaaattgaaagcatttcacgtttggatgggctggcgtggggatgtattatagccggaatctttttgtttttcttgggctttgtccgtttcgaacaaatgagaaagcatttgaaacagtatacgaaaacatgtcgtgatactgagaatgaatcgtcacggaagaagtgatttttattctagattattcgataggcttgtcttcgtgtatttcaatggttttggtggctactgcatattcgtcggggaaaattttacttcccatttcgtttgcccatgctttggtaaattctgcaccggtatatatgatgatggaagaataataaatccaggtgacgaaaaccaccatgaacgcagcagccccatagacggtccccacattggctattcctatataaaaggaaattccccattgacctatcagtagcagtatggtggttacaacagctccgatgcaaacgtctttgctcttgattttggcatcgggtaatattttaaatatgagtgtaaagatgatggtagtgacactcatgtttatgatgattcctaccacttttaccaacgaatcggctacttccggatacttaaagatgaatttttgactgagttctccgattatattggtaatggtgaatgtaatcaggagaatgaaggcaaatacaagtattattgagaaagaaagtatccggtttttaataaatttaagccagctctttttagggacggcttttattccccaaattgaatttaatgaactttgtatttctgcaaaaatagtggtggcaccaaaaatagagatacctaagctgacaaaggcggccgacctggaggggtctgtattttctgcattttctataatagaacgaagggcctcggtaacttcgggacccacaatcggttgtagttggacataaagttgattggccaaatccatatggaaaaagacaccgacagtgactagaagggaaagaaaaggaataattgaaaacaaagtcgcataggctaatgaagcgctcaacctcataacgctgtcgtctatgaatccccaaactgtatcttttattattttgaagagcagggataaactaagtcttttctttctttcggaatggatttccattttaattcttttttatccaaacagcaatattacgggtattaacagaaaattctccacttcctttttcgtctaatgtgatttcttgctgaatatttccggttatttcatgccatatttcgcctttatgttcttcgcccaaatccatctttttactgccggcttcatcattagacattaaaaagactaaaccggaaccgacatgttcttcatctcccgtacgaataaagccgatggcggaaggatgatcgaaatactcaatctgatcgccataagcatattttcttctggtatccagaagaatattaatgatttgggtatgaggtgagttctctcctttgacaccataataatctccgtagaacaaacaaggataaccgtctttcattaataatatcagaccataggccaatggtttgaaccagtcttctatttgtgattccaaggaactgcccgattgcgaatcgtgattgtcgacaaaagtgactgccagatcacagtggtgctcgactaatgtgttttttaggatattctgcagatcataattcttgccttcttgtgatgcttggaataaattataatgtaatggaacatcaaataggttgactttgtgacccacggattttatgtatgcatcgagtgtgttcaaatcaccattccaatattcgccaacagcgtagaatttgtctcctctttcgcttcttaccgcatccaggaattgtgcaatgaacttgtctttcatgtgtttgatggcatccagacgcattccgtcgaggttcagctctttggaaacccattttccccaacgattcaattcggtgactacttcaggatgatccaggtctatatcattgcataataagaaatcgtagttgccattttcattgtcaaccccttcgctccacgctttgccttcaccctgtatctggaagatgccactccgctttttggcatcgtcaaaaccggttcctgaaaaatgataccaatgccatttgaaatctgaatatttatccttacgtccatggaagctgtatccggtccagccctgtatttcgaacggttttcctaatgcttgggttctatcattgggatcgacttctacaactatgaacttttcagtgaaatcacctcctgccttatgattcagtactacatccagataaacggaaatatgatttttatgtaattcatcgatcatttctttcagttcttctttcgtaccatatttcgttcttacggtttctttttgatcgaactcgccgagatcatacaaatcgtaggttgcataaccttcgtcttgttgttcgtcggctttgtaagcggggggaatccatactgctgtcacaccaatctcatgtaaatgtgacgcatcttcttttaattgtttccataaatttccgtcatttggcagattccattcaaaatactgcatcattacaccattttccattatccaatgcatttagttatcggaaaataacaaagaagtgtatgataaggtttcttgtgtttacccaaaagcactgaaagaaaggatatcggcgtttgtgattagactaacatgcgttatttgtcttgccatcatatccccatttaacgtaaacagctccccaggcaaatccggctccgaaagcggtgaaaatcaaattatcaccttttttgagtttattttcgaaatcccaaatgcataatggaagcgtacctgcactggtattgccgtagtgttcaatattgatcataaccttttctaatggtacatccagacgttgggcaacagcactgatgatacgttgattggcctggtggggaacgacccagtctatttcatcttttgtcagttggtttctttcgatgatcgactcacatgcatctgacatattggctacagcatatttaaatactgtacgtccttcttggtgaaggtaatgcatgtggttgtcaactgtaaaataagaaggtgaacaaactgaaccaccggctttcatgtgtaaaaaaggaagtcctttgccgtctgttcttaaaacggaatcgataactcctaaatgatctgttgtgggttccaacaagaaagctgctgcaccatcagcgaaaataggacaggtggcacgatcggtgtagtctatcacagacgacattttatcggcaccaacaataatgacttttttgtattttcccgaacggataaagttagccccggtttctaatgcatataagaaaccgctgcagaccgcttgcatgtcgaaggcaaatgcatttttcaaccccactctttcgcataaaatggaagccgttgaaggaagccgataatcgggagtggtggtagctacaattaccaggtcaatatcatccggattactttgagtacgttgcatcagttgtttgacagcttttcgtgccatgtatgaggtgccgagtccttcttcattcaggatgcgtctttctttgattccgatacgtcccatgatccattcatcggtggtatctacaattctggatatctcatcattagtcaggatataatcgggcacatatcctccaactcctgtaattactgcattgatttgtttcattaactttgtctaaataagtaagttcttaagcgggggaagtataaaatgactccgaaaacttacaacttctcggattgcatctaaaataccgggcgcaaatatacagaaaagaaagatttattcaatatcttgtaatctaaatgcgttgaatttcttagtgagattaggataagttataatacagaaatagaattagggaaatgattaaatgaaggaagataggttgctttgcaagaaaagaaagaaataatcaggtctgattttcttagtaagagtgaggtcttaatctgatttgtgtatctgttggttcaagcgtttttgctacttctttacttctttgggtaaccatactttagtctgtttctgtatttctcgttaatgcttagtaaatggcctatgttattccgaaagtatttaattttcacgtttttgtttataaaaagaaactcctgtaattgtcaaaattacaggagtttatatcatttgatcaagaaacggtggttactttgccaatgcctgagctacatctaccgcacaagccacagtacagcctaccattgggttgttaccaattcccaggaatcccatcatttctacgtgagcaggaacggatgaagaaccggcgaactgagcgtctgagtgcatacgacccattgtatcagtcataccgtatgaagcaggaccggcagccatgttatccgggtgaagagtacgacctgtaccaccacctgaagctactgagaagtatggcttacctgccagtacacgttctttcttgtaagtacctgcaaccgggtgttggaaacgcgtcgggttagtagagttacctgtgatagatacatctacaccttctttccacatgatagctacgccttcacgtacatcatctgcaccatagcattttacttttgcacgaggaccgtcagagtaagcaatttcacgtactactttcagttcacctgtgaaatagtcaaactgtgtttgaacataagtaaagccgttgatacgagagatgatctgagcagcatcttttccaagaccgttcaagatacaacgcagaggttctttacgtactttgtctgcttttgcagcgattttgatagcaccttcggcagcagcgaaagattcgtgacctgccaagaaagcgaaacatttggtttcttcacgtaacaacatagcagccagatttccatgaccgataccaaccttacggtcgtcagctacagaacccgggatacagaatgcctgcagacctataccgatagcttcggcagcatcagcagcgtttttgcaacctttcttgatagcgatagcagcacctactacgtaagcccacttagcattttcaaaacagatcggttgagtttcttcacacgttttataaggatcaactccagcagcttcgcagatagcgttagcttcttcgatgtctttgataccgttagcgttcaaggcttcgatgatacctttgatacggcggtcctgactttcaaattttacttctctaatcataatttcttttcctccttatattattcgtgacgtggatcaatgtgtttaacagctccctgttctgcagtgaagcgtccgtaagtaccggtaactttcttcaatgcttcattcgcatcagtacccttcttgatttcatccatgaatttgcccatgtgaacgaattcgtatccgcagatttcatcgtttttgtcaagagcaattgtcttgatgtaaccttctgccatttcaaggtaacgaggacctttagccaaagtaccgtacaatgtacctacctggctacgcagacctttacctaaatcttcaagacctgcaccgatgatcagaccaccttctgagaaagctgactgagtacgtccgtaaacgatctgtaagaagagttcgcgcatagcagtgttgatggcgtcacaaactaagtctgtgttcaatgcttcgaggatagtttttcctgggaggatttcagcagccatagcagctgagtgagtcatacctgaacagccgatagtttcaaccagagcttcctggatgataccttcttttacgttcagagtcagcttacatgcaccctgctgaggagcacaccaacccacaccgtgtgtcagacctgaaatatcaacaatttcttttgattttacccattttccttcttcgggtatgggagccggtccgtggttaggacccttctttacaacacacatgtgttccacttcgtgtgaataagtcataattagctcttttttaagtgatataattaaaaatacgtagtcacgattctcaaatcgctcacaaaggtagtcgttttatttgtttttgcaaatcgggttttattacttttttatgaaaagagaaaaatagaatttgtggttttgttagattgtaatgtggagatgacattttagataatctttgttttgttgaactattactctgattctttgtttcttctgagaaaaattgatcggttatgaatttgaatgaggtagatatacattatttaattgcagccattagtgtgataacttcggcattggtgttttacacaataggagtgtggggagagcgattgcagaagaggttgaaattttggcatctggtattttttttgttgggactgctggctgattctgtgggaacggctttaatggagaatattgcgcgactcacacacttgcatgatgaaatacatactgtgaccggcattatcgctatcctgttgatgtttattcacgctatgtgggctatctggacgtatgtgaaagggagtgaaagagccaaggaacatttcaaccgtttcagtattgtggtgtggtgcatttggttgataccttactgcataggcgtatatcttggtatgtcattgcatcattgattatcaattataaggattgagaattgaatcccgtctgtttctttgtattgtgtagattgctttgaataagatgctatacttgtcaaatctttaattatctacctttagaaggtattagtgaaattctcggagaacaaattgatgaacctgttattcttttgtaaattagaaggttactatgacttgctgtttgtcggtaaaaggcttgttttaacacactgttaaaacaaatgttttgatgatagagaagaaggcttttaaatgtaaaacacttgttctttgtattcaagcacagaatgcaaagaagatggcattaacaacgttaattgataacgcttgttgcaataccgaactacaatgaactgacatgcgatccggcagagaaggtgatcaaattattcgttataggattattattgaagaaaattaaacgggtttctaaaaaacttatcaaaaagcctttctgaaccatatatttccgtatttttgtttcctgatatttataaatatagaattcaccttattatatatagtggaaatgatagaagttacggatgcctctttgcaaaaagctgcgggtgagggaatggatgaatttatccaggtgtttacagacaagtataaagaagtgattggcggggaacttactgccgaaacaatgccactgttgacaggggagcagcactctttgctggcctatcagatttttcgggatgaagtcatgttcggtggcttttgtcaattgattcagaatgggtatggaggttatatctttgataatccttttgcaaaggtaatgcgcctgtggggagccgaggatttctcgaagttggtttataaagctaagaagatatacgatgctcatcgccacgatctggagaaagagcgtacagaggacgaatttatggctatgtacgagcaatacgaggcctttgatgatcttgaagaagaatatctggatattgaggaggaggttacagcactggtagcaagctatgtagacgatcatttagagttgtttgcaaaaatagttaagtaatagatgcagtattttttaagtctctgcatttacttattgtgaattagaatttatatctttgcaaactctaaaaaatagatttatgaaacaattgaaattaatggtgttgaccttaaccctgttgatgggtactatgtttacttcatgtatggattccggagaaagcggtcctcagcagtgggccggtgtggtgaaagtgaatgatagaatgggttatgttacattcacagatgctgccggtacagagctgatccctactaacacgattcctgtaactttgaatgcaagaatggcttacatttattgccaggttgatgaaggtcaggacctctcaacaaatcctaagtcaattaaaattacacttttagcagatcctacaggaattgatgctacagcaataaccactccgaaagtagaatcaagtgatgtgactactaatgcacctgttggttcgttgagttttgcatcaggatattcaactgtggccccatttcagtttagtgaaaatacgattgtattaccagtactttatcgtgtgaaaaatgtgactactacagaagatattaaaaatgagcttgctaaacatacttttactcttgtctgctatacagatgatattaaatctggtgataccattttgaaactttatttacgctataaagttgaggatgaacctgctgctattgctgagcgtgcaacacgtacttccagctttaaggcttatgaaatcagccaaatcttaagagaatatactctgaagagtggacaaactaaacctgctaaaataactatagtagcacagcaaaatgagtacaacaataagttggaagatacttctactatagagaaggtatatgaaatagaatataaaactgcggaataatttgaattacaaagcattatttcaaatagcaatgtcattgatttcctctccggccaaggcctgggaggaaattcgtttagaggatagacgggcagttcttactgtttttgtctatcctatgattggtttatgtggtttatccgtattcattggtgctttgtggactaatggttggggaggaccacaaagtttccagttggccatgacgcagtgttgtgcggtggcggtagctttgttcggaggttattttctggcggcttatgctatcaatcagatggggataaaaatgtttggtatgaccaatgatatccctttggcacagcagtttgcaggttatgcgttagttgtcacttttttgttacatatagtaaccggattgcttcctgatttcagtattatcggttggctgctccaattttatatcgtttatgtggtatgggaaggagcaagggttgtgatgctggtagaagaaaagaatcggttgcgttacaccattttctcgtcgattttgttaatactatgtccggcggtaatacaagttgtgttcaacaagctaacagctatattaaattaagaaaataaaatgaaactggctcctataaatataaagaataaacgtgctactttcgactatgagttgatcgatacttatacagcaggtattgtgttgaccgggacggagattaagtccatccgtctgggtaaggcaagcttggtagatacgttttgttattttgcgaaaggcgagttgtgggtgaagaatatgcacattgccgaatatttttatggctcgtataataatcatgcggcccgacgtgaccgtaagttgctattgagcaaaaaggagctgaataaattggaaagagggacgaaagacgccggattcaccattgtccctgtgcgtttgtttattaatgaaagaggtttggccaaagtggttgtagctttggctaaaggtaaaaagcaatatgataaacgggaggctttgaaagaaaaagacgaccgtcgtgatatggacaggatgtttaaacgatgataggtttgtacctttagcaatgaaaaaaactattcaacagctggtactcgaacgtatccttatattggatggcgctatgggtacaatgattcagcaatataatcttagagaagaagattttcgtaatgaacgctttgcgcatattcccggtcaactgaaggggaataatgatttactttgtctcacacgccctgatgtgattcgggatatacaccgtaagtatctagaagccggtgcagatatcattgagacgaatacttttagttctactactatttctatggccgattatcatgtacaagagtatgtgcgtgaaatgaatcaagcggctgtaaagctggcacgtgaagtggccgatgaatatacggcactaaatcccgataaaccccgtttcgtagccggttcggtaggtcctaccaataaaacatgttctatgtcgccggatgtgaataatccggcttatcgtgctgtgacttatgatgaaatggctgatgcttatcagcaacagatggaagctatgcttgaaagtggggtagatgctttattgatagaaactatctttgatacgctgaatgccaaagctgctattttggcagcagaacgtgcaatgaaggctacaggagtaaaagtgcctgttatgttatctgtgacggtttccgacaccggaggacgtactctttccggacagacgttggaagctttcttggcttcagtgcaacacgctgatatcttctcagtcgggttaaactgttcgtttggtgccaggcaactgaaacctttcttagagcaattggccgctcgggctccttattatattagtgcttatccgaatgctggtctacctaatagtttaggaaaatatgaccagactccggcagatatggcccatgaagtaaaagagtatgttcatgaaggattgatcaatatcataggtgggtgctgtggtactaccgatgcctatattgcagaatatcctgcattgattgccggagcaaaaccgcatattccggtttgtaaaccggattgtatgtggctttcgggattagaactgttggaagtgaaacctgaaataaatttcgttaacgtgggggaacgttgcaatgtagccggttcgcgcaaatttcttcgtttgattaatgaaaagaaatatgacgaggcattatccattgcccgtaaacaggtagaagacggagcactgattatcgatgtaaatatggacgatggtcttctggatgcaaaggaggagatgacaactttccttaatctggtggcttcggaaccggaaattgctcgtgttcctgtaatgattgattcttcgaaatgggaagttatcgaggccggattgaaatgtcttcaaggaaaatcaattgtgaattccatctcgttgaaagagggagaggagaaattccttgaacatgctcgtacggttcgccaatatggtgcggctgtggtagtgatggcttttgatgagaaagggcaagctgatacagccacccgtaaaatagaagtttgcgaacgggcctatcatttgcttgtagataagataggattcaatccgcatgatatcattttcgacccgaatgtattggctgtggcaacagggatcgaggaacataataactatgcggtagattttatagaggcgacggcttggattaaaaagaatcttccgggcgcccatatcagtgggggagtaagtaatctttcgttctcattccgtggaaacaactatattcgtgaagcgatgcatgccgtatttctttaccatgccattcagaaagggatggatatggggattgtgaatccgggtacttctgtattgtatacagatattccggcggatgtacttgagaggattgaagatgtagtattaaaccggagaagtgatgccgcagaacgattgatagaattggctgaccggttaaaggaggcttctgcgggtaatacttcggctgggcaaccggtaaaacatgatgcctggagggacggtacggtagaagaacgcttgcaatatgctttggtaaaaggaatcggggattttctggaagaagatcttgctgaggctttgcctaaatatgataaagcggtggatgtgattgaaggaccgttgatgaatggaatgaatcatgtgggcgaattgtttggcgcaggtaagatgtttcttccacaagtggtgaaaacagcccgtacgatgaagaaagccgttgcaatcttacaacctattatagaatcggaaaaggtggaaggtactgcttcggcaggaaaagttttgctggccactgtgaaaggggatgtgcatgacattggcaaaaatatagtctcggttgtgatggcatgtaatggttacgatattattgatttgggagtgatggtaccggctgaatcgattgtccaaaaagccattgaggagaaagtggatatgatcggacttagtgggttgattactccttcactggaagagatggtacatgtggctatggaattagaaaaagccggattggatattccattgttgataggaggagcgactacctctaaactacatacagcattgaagattgctccggtttatcacgctccggttgttcacttgaaggatgcttcgcagaatgcgggtgttgctgctcggctgatgagtccgaaatcgaaagaagagttggcaaaagaattatccggtgaatatgaagcccttcgtgataagagcggcatgatgaagcgtgaaaccgtttcattgaaagaagctcaggaaaacagattgaaacttttttgatataaaaagagattatggtaataaagaaagcggtttatgtatgggtgatcgggatactgggaatgatttcattcgcagcttgttcatctgcttctcaaggagaagtcccttcgacatccaatgctgcgttggataatatttttgcacgtaaaagtgtgcgggcttatttagacaaggaagtagaaaaagaaaaaatagattggatgctacgtgccggtatggctgcaccatccggaaaagatattcgtccgtgggagtttgtattggtcaccgaccgggttgctcttgattcgatggccgctgctttaccttatgcaaagatgctgactcaagctcgctatgccattgttgtatgtggagatgtagctcaatcttcctattggtatctggattgttcggctgctgcacagaatatattattggctgccgaagcacaggggctgggtgcggtatggacagctgcttatccttatgaagaccgtatcagggttgttcgtaaatatacggagcttccggggaatatagtgcccctgtgtgtgattccgtttggttatccggcaactgcccaagagcctaaacagaaatttgatgagaaaaaaattcattacgataagttttaaaccgtttattggcttttctgaaagctgcttctgataaaacgaggcagcttttttatttttattcctttccttctgataatttctgcattttgtttctctatttcaataaattccttacatttgcaccaatattaatcgaaatctgatacaagaatgtttggaattagcgactcacttatcattttgccatacttgctttcggtagtatgtgtgctctttgctgcttggtttggcttcaaatactggaataaagacgacgaaaaagataaaacacgatgaatacatttacacttggactgattgtgatagcctatctgctgtcactggcctatcttggttttttaggttataagaaaacatcctccgccagtgattacctggtaggaggtcgacagatgaatccgtttgtcatggcactctcttatggtgccacttttatatcagcctctgctattgtcggctttggtggggtagcagcagcttttggtatgggtattcagtggctctgctttttgaatatgtttataggtgtagtgattgcctttatttttttcggactccggacgcggcgaatgggtgctaaattgaatgtaagtacatttcctcaattgttaggcaggcattatcgttcacggggaatacaagtctttgttgccgcagtgattttcctcggaatgcctttgtatgccgcagtggttatgaaaggtggtgctgtctttatcgaacagattttccagattgattttaatatttcacttttaatatttacattgg

SEQ ID NO: 1070 - DNA, 15076 bp, unidentified
  source 1..15076: mol_type = unassigned DNA
atggctgacgttgtggcagcatggatcgaccgtgacaggagcgcgggcggaagaagccgggtatcgcagtcaggaaaagtaggacatcgtagctggataaaccaggaaaaaggggaaaatcggatgctgcatatcagaaatttggaagagggcgtggagctgttcaaggtgcttggctcggatatccgggtgaacatcattttactgctgttaaaagaaaaagaaatgaatatgaatgagatcgcagccaggctgcagatcaccaacggcgcgctgaccagccatatccgaaagctggaggaggccgggctgatccgtgtgacccaggacagtgtcggacatggaaaccagaaggtgtgcagcgttttggaaacccgaatcctggtggagatcgggacgcaggaggagacagacgaaggcagtattttccgggcagaaatcccggtggggcagtattcggactatcaggtatttcccacctgcggcatttccacgacgaaaaagatgatcggtgaagtggacgatccccgctattttgcccatccggatcgcgcggaagctggaattttatggctttcgaaaggctatgtggaatatctggtcccgaatatccttccggcaggacaaaagatagacgagcttaccttcaccatggagatttccagtgaggcaccgggctttaataacgactggccctctgatattacctttttattaaatgacacgccggttggagtgtggacatctccgggagactttggggacaggcacgggctgtttacacctaactggtggttttccggatggaatcagtacggactgttaaaaatgcttgttatcgatcagaacgggacatatattgatggaatgaaaatttcagacgtttccacaactcagctgcagctcgattataaaagccagattcggttaaaatttgccgtacaggaggatgctgcccatgtgggcggcatgacgctctttggcagcggctttggcaattacagtcagggaatccgtgtgcggatgcgctacagcccgatggaaaaagggaatgaatgagatctttagaagaatagaggtgcggcctcagctgatttgttcgcctttttgtcagctgaggccgtttcttttgtttgctacgccttttctccctgcgctggttttttcatacaggcatctaccgatttacgcagaatcttcgcttctccaaagcccaggcggaaggatttgctgtcctgcatcgttaccttaagcatggagatggatcggatctgccgcatgttgagcaccgtattactggcaagcaggacaaagttatcatatttgtttaaagtgccgcaaaacgaagcaagggacatatcggttgtgtagtctctgccgtcggcagtgtgaatgcagacttgacggttgtttttcggccaagcgtaggaaatttggtcctccgtcaggtaaatggtgtcggtctggttgcggaattcgagtttttttaccttgctgtttttaatggacagcagatggtcgatggtttcggtaagctcggaaacgacaatgggcttgtccagaaaaagcacattatcgggaagatttttcgatttgcggtagtctaccttatcgcagcaaaaaacgatggggacatctgtgccatcggcccgaagcatgtgggaaagctcgatcgcatcgcagccgtcttctgtcatatccataaaaattgcatcatagatcataggcgttacgaggatagattccttactgccgaaagagtccacatacaggacaccggttgtattcatgcggcggtcagattcccgtccgagaaggcgttccatttgttttcggtccgccatatggtcatcacagattgccaagtgcataatgatacctcctgatcttttgtaaatagcattcaaagatgcgattttgcgaatggtgcgagtgaactgtaaattttttagctgcgttttacaggatgcctgtaagcgccggcctgttataagagggaaatggaaacaggaccgaacaggatgtacaaaaccgcagcaatctgtaggattaaaatagcgggcattccccagacgaactgtggatgcagtgtcttgtgatggaatgtatacatcccggcgatgcttccgatgctgccgccgatgatggcgagcagaaacagcgtcgattccggaatgcgccatgccttgcggcgtgcgcggtttttatcaattcccattgcagcaaatcctgcaagatttacaatcagcagataaattgccaaaatcagtaaaacatccattcaaaaactccctgtatttttaaaaattaaatcacttcgtatttattataggatttattataggagatcgaaaaaaagatttcaagaagccggggcaaaaaaagatacgagtgaactgtaacaaaaagggcttccgtgcttttggcacagaagcccttttttagcgtatagtgattagttgttgttcttttctacttcctgcatcttcattgcacgaaccttgctggaaagtccgaacaggttgatgaagccttctgcatcgtggtggtcatacagatcgccggttgtgaaggaagcaaggctttcattgtagagagagtaaggagaagttgtgccggctttgatgatattgcccttgtagagcttgaattttacttcgccggttacatattcctgagtcttttctacgaatgcctgaactgcctcgcgcagaggagtgaaccatttgccttcgtatacaatctgagccatcttgttgcccatatcgatcttttctgcataggtatcgcggtcgaggatcagctcttccagctgctgatgtgcctccatcaggatcgttccgccgggagtctcataaacgccgcgggatttcatgccgacaacacggttctctacgatatcgacgatgccgatgccgtgctttgcgcccagcttgttcagagtgcggatgatgtcggaaaccttcatctctacaccgtttacgctcttcggaacgcctttttcaaaggtcatggtaacatattctgcctcgtcgggagcttcctcgggagtgcagcctaaaacaagcagatgtccgtagttgggctcgtttgcgggatcctccagctccagaccttcatgactgatgtgccagatgttacggtcgcggctgtagctggaatctgcagagaaaggaaggtgaatgccgtgagcctggcagtattcgatttcggattcccgggaatccatggtccacttatcgtttctccatgcagcaatgatctttaaatcaggagccagggctttgatgccgagctcgaaacggatctggtcgttgcccttgccggtagcgccgtggcagattgcggtagcgccctccttgcgggcaacctcaaccagcttctttgcgatcagcggacgcgccatagaggtgcccagcaggtatttgttttcgtaaacagcatgtgcctgtacgcagggaacgatgtattcgtcgcacagttcgtcatttacatcgaggatatataatttggaagcaccgcaggagattgctctttcttccagaccgtccagctcttcttcctgtccgcagtcgatgcagacgcagataacttcgtagtcgaaattctctttcagccacggaatgatggctgtggtatccagaccgccggaatacgctaaaataactttttctttcatgataattactcctccatatgctgtgtttgatttttctttcaagctgtgtcaagataaggatggaagcatccgttcccgactgactgaaattactatacacccggatgcgaaggaatgcaagtgtaaatttatgcaaattataaatattttattcagaaaaaatggaatatattccaaaaatacttgaatattatacacgaatgcagtatgattatgcaatattaaggaggaaaagaaaatgattcaggttggaattatcggagcgaccggctatgccggcggggagctggtccgtcttttatacgggcataaagaggcagaaatcaaatggtacggatccagaagctatgtggatcagaaatatgcgtctgtttatcagaatatgtttcagattgtagaggatgtttgtaaggatgataatttaaagcagctggcaaaagaggtcgatgtgatctttaccgcgacgccccagggcttcctggcaggagttctggatgaggaaatcctttccaatacaaaggtgatcgatctgagtgcggattttcggatcaaggacgttgctacttatgaaaagtggtatggaatcgaacataaatctccgcagtttattccggaagcggtttacggtctgtgtgaaagaaaccgtgaggcgatcaaacaggctcgtctggtagcaaatccgggctgttatcccacctgctccattacttcgatctttccgctggcagcagagggactgatcgatatggatacgctgattattgatgcaaagagcggtacctccggggcagggcgtagtgcaaaggttgcaaacctgtactgtgaggtgaatgaaaatatcaaggcatacggtgttgcgagccatcgccatacgccggagatcgaggagcagctgtcctatgcggcaggctgtccggttgtgctgaactttacgccgcatctggttccgatgaaccgtggaattctggtgacggcttatgcttccttaaaagaagtgaaaaagcaggacggaagccttggactgccggatgctgcaatgattcgggcagcctatgacaaatattatcaggatgagaagtttgtgcgcgtgctgccggagggtgtgtgcccggaaacgaagtgggtagagggcagtaattttgtagatgtgaacgttaaggtcgatccgcggacgaagcgtgtgattatgatgggtgccatggataatctggtgaaaggcgcagcaggacaggcggtgcagaatatgaatctgatgtttgggctggaggagtccgaggggctggatcttgtgccgatgttcccgtaagggatggtggattcccggcagactttgaccgccccggctgccgactgcaattgcgtccccttgatttgcaagcgaaacttttgcaaaaacgcacaggcttccggcaccgaacgtccgactgtccgaagcaggcatgcacaaccgccaaagcagccaaaaacctaccaccatgcctgcaagtttcggacgtgaggtgcgcccttaggaagccgacgcgcttttgcataaaagtttcagcgcgcaaatcccggggacgcaatgcagtcggctgccggggctggcaatcaatctgcgcggtgaggcctggttgcctgcggcaacagcggcctgtgaggtagggctgagtttgttgggggctggtcggctgcgccgactgcgcctacttcggcggtgaggcctggttgcctgcggcaacagcggcctgtgaggtagggttgagtttgttgggggctggtcgccgtaggcgactttgccctgttggggtaaaaaggtcttgattttccgtggagttgtttgtaaaatctagggttagagaatttttgtgctttgaaatggctttgaaggattgaggtgttttggatggctgtcgggcaggagttggtggtgcatcctttttcgccggttgtggacgggcattccagagtgttgattttgggaagtctgccgtcggtgaagtcgagggagaatcatttttattacgggcatccgcagaaccggttttggaaggttttagcgggggtgtgtcaggcggaggttccggtgtcggtggaggagaaaaaggcttttttgctggcaaatgggatcgctgtgtgggatgtgatcgcttcctgtcggattgtagggtcttcggacagctccatccgggatgtggcagcaaacgatgtggccgggcttttgcaggattccaggattgaggcggtgttttgcaacggcgcaaagtcatgggagttatatcacaggtattgtgagaaggcatgtcagcgggaagcggggaagcttccatccacgtcgccggcgaatgcggcatggtcgcctgaacggctgataaaaagctggggcgaggcgcttttgccttatgttggccctggcaggaaaggataaataacaatggttacagtgcgcagcatgcaaatagaggattatgatcaggtatacgccctttggatgacgattcacgggttttcgatccggacgatcgacgattccagagaaggggtggagcggtttttgaagcgaaatcccggaatcagcgtagtagctgagatggacggcagagtggtcggcgcgattttatgcgggcatgacgggcgcaggggctgtctgtatcacgtctgtgtgcatgaggattaccggatgcatgggatcggcagggcgatggtggtgcactgtatgaatgcgctgcagcaggagggcatcaataaggtgtccctgatcgcgtttacgaaaaatgatatcggcaacgccttctggaagcagatcggctggacgaagcgcgaagatttaaactattacgattttgttttaaatcagaaaaatatcgaaaatttcaacgcttgagcgggcaaaagatactgctcaatctgacataaaaagaaaggcaggaggaacatatggagatcattacaggcggcgtaaccgcggcaaagggatttatggcagccggcgtagaggccgggatcaagtatcagaacagaaaagatatggcaatggtgtattccaaaacgccgtgtcgcgcagcgggcgtgtttacgacgaatgtagtaaaagctgctcctgttttatgggataaggaagtcgtagagagcgagtgggaagctcaggcgatcgttgtaaactccggtatcgcaaatgcgtgtaccggaaagctcggctatgaatattgcagggagacggcaggagcggcagcagatgcgctggagatttctcctcagagcgtcctgatttgttcgaccggcgtcatcggtatgcagcttccgatggaaaaaatgaccgaaggtgtgcgtatgctggcaaaggcgatcaagcccggagaagaagcaggaaccgatgcggcaaaggcgattatgacaacggatacccgcaacaagcaggttgcagtaaaggtgatgattggtggaaaagaagtaaccatcggcggcatgtgcaaaggctccggcatgattcatccgaatatgtgcacaatgctcgcatttgtgacaacggatgtgaatatctccaaaaagcttctacaggaagcactgagcgctgacgtgcaggataccttcaacatggtttccgtagacggcgatacctcgacgaacgatacgctgcttgtgctggcaaacggccaggcgggaaaccctgaaatcacggaaaagggcgcggactacgatgcgtttgtggaagcgcttcattatgtcaatgagacgctggcgaagaagatcgcaggcgacggcgagggcgcaaccgcgctgttcgaggtaaaggtcattcatgcggataataaggaagatgcaaagaccctggcaaaatcggtcatcacctccagcctgacaaaggcagccttgtttggacacgatgcgaactggggacggattctgtgtgcgctgggctattccggggcaaaattcgatcccgaggcgatagaactgtatctggaaagcagcgccggaaagatcctgatcttcaaggatggtatggcggcagattacagcgaggaagaagcgacccggattctgtcctgctccgaggtgactgcgcttgtggatatgaagatgggcgaggcggaagcgacagcctggggctgtgacttaacctacgattatgtcaagattaacgcggactaccgcagctgacgcgaaccggcgttagaacgataaaacagtctcacagcgccgcaaaaggaaacgtgcgcagaaatgggaggaaaaagtggaaaaaccggaaatggaacagatcatgaaaaaggcggaggtgctgattgaagcgctcccctatatccagaaattcaaccggaaaattatcgtggtaaaatacggcggcagcgccatgagcaatgaagagctgcagaaaaacgtcatcaaggacgtgacgctgttaaagctggtagggtttaagccgatcatcgtacacggcggcggcaaggccatcagcaaatgggtggcaaaagccggcaaggagcctgtttttgtcaacggattgcgcgtgacggacgctgaaacgatggaaatcgcggaaatggtactggggcgcgtcaacaaaaatctggttgcaatggtacaggagcttggcgtacccgcagctggcatcagcggcaaggacggcggtcttctgcaagtggaaaagaaatattccgatgggaaggatatcggctttgtcggcgatgtgaccaaagtaaatcccaagattttatatgatctgattgaccgcgattaccttccgatcgtagctccggtgggcatggatgaaaattgcgagacctataatatcaatgcagacgacgcagcgtgcgcgatcgcaagggcggtcggcgcggacaagctcgtgttcctgacggacgtagaaggtctgtacaaggacttttctgataaatcctctttcatctcccgcattacagcaagcgacgcggaagcgcttgtcagcagcggcgagatcggcggcggcatgctgccgaagttaaacaactgtacggcggcggtcaaaggcggcgtcaaccgggtacatatcctggacggcagaatcccccactgtctgcttttggaaatttttacagatcatgggatcggaacggcgattgtcggagacgatgagtaggtttaaagcagtgcgaagcatcttcggcacaaagtgcctgcggaatggaggaaacatgggtgaattgatgcagcagtatatcgacgaagccgagcaggatcttctgcatacctataatcggtatcaggtcgttctggatcgcggcgacggcgtatctttatatgatatagaaggaaaacggtatctggattttgtggctggtattgcggtgtttgccctcggctatcataatgccgagtacaatgatgcgctgaaggcgcagatcgacaaggtcatccacacctcgaattattattacaatgttcctgcggtggaagcggcaagacatctgaaaaaggtttcccggatggaccgcgtgttcttcaccaacagcggtgcggaagcgatcgagggcgcgatcaaggcggcgcggaaatatgcttatttaaaagacggcacgacggatcatgagatcattgccatgaatcattcgttccacggtcggacgatgggagcactgtcggtaaccggcaatctgcattatagagaggcatttgagcccggaatcggcaatatccggtttgccgatctcaacgattttgacagcgtgctggcatgtgtaaatgacaagacgtgtgcaattttgctggaaaccgtgcagggtgaaggcggaatttatccggtacaggaggactttctgaaaaaagtgcgcgcgctgtgcgatgaaaaggatatcctgctgattctggatgaaatccagtgcggcatgggacgaaccggctattggtatgcgtggcagaaatatggcataaagccggatatcatgacgacggcaaaagcccttggctgcggtgttccggtgggtgcatttttaatgacggaaaaggtcggacagcattcgcttacggcaggcgaccacggcacgacctacggcggcaacccgctggcatgtgcagctgtggcaaaggtgctggagctgtttgaagaaaacaatattctggagcatgtgcgggaggtgtcggcttatctggaagaaaagctggacagcctggcagcaaaatatgattttatcacggacagaagaggcatgggactgatgcagggacttgtctttgaccgtccggttgcgcctgtgatcaacgcagcgctggaaaacggcctgattctgatcaatgcgggaaccaatattatccgcttcgttccgcctcttgtcatcaccgacgcagatgtggatgaaatgatcgaaattctggattcatgcctgaaaacgtttcaggagcaaaacgcgtagctgccgggaaacggcggcgcggcaaaaaagaaagaaatggagaggaacatgtctttttacccaaaactgatcggggcggtctgcggtgtctgtgctgcgggggctttgatttatgcgggcgtctctgccatggataaggcaggcgtttctacggacggtattttgtcgcccaaaccgacgctgacggtatggtataccgaggaaaaactggaggattatctttccgcgatggcgcttgaatatcaggatgcgaccggcgtgcgtgttgttccggttttgaaaagcggtctggaatatctcgaggcagtaaacggcgcttccatcgcagaggaatcgatgccggatgtttacctgatcagcaatgacggactggaaaaagcgtaccttgccgggctggcggtaaatgtgaaggatcagaatgctgtcctgaataccgaaaatttcccgcagactgcactggacgctgtgacctatcagggacatgcggttgcttatccgctgtattttgaaaccagcgcgcttgtatacaaccagacgtatctggagcaggcggcggcagagctggaaacggacgaggtgtccctgattccgaaaacgattgatgatatccggaattttgcggatgagtacaacgcgccggaaacggtagaatcggttttccgatgggatgtatctgattttttctataattatttctttgcaggaaattatatcaccgttggcggaagctgcggggatgattcgtcccggatcaacatctataatcaggatgcggtttacgggcttgcggcgtaccagaagctgagtcagtttttctcgatcgatgcggcgacttcgagctacgaccaggttgtgcaggattttttggatggaaagctggtttatacgatcgcgaccaccgatattctggatcgggttgcgcaggcgaaggcggacggaagctttgcgtgggaatacggcgtagcgtccctgccggatatcagtgaaacggtttgctcccgcggtatttccgtgaccggaagcattgttgtaaacggctacggcaagcatcaggacgaggcggataatttcgcagcatggctttgcacggacagcgcggataagctgtttgaccgcagtacccttgtgcctgccaaaaagagcgcagcgcagcagacggaggagatggcagcgttctggcaggaatacagccagacggttccggtgccgaagctgatggcgactgcgaacttctgggtacagatggagatcgcggagacgaaaatctgggagggagaaaacgtttcggacgttttaaaagacctgtcggaaaaaatcatgacacaggtaaccggcacgcagtacgtggaagaagaatatatcgaagtgcctacggagactcaaatcgattacgccgagggcgaagaagaataagaacgtgtataaaaatccaaccataacgcatactgtatttcataccggacgctgtcagggcggacggaagaaggaggcttgcaggatggttggatttttgattgcagttttatccggggttctgatgagcgtgcagggcattttcaatacacaggtcacaaaagcgtcgagcatctggtctgcgaatgtgtttgtgcaggcgacggcgctgctgtcgtgcctggcagtttggcttgcagcggaccggtcgaatctgtttgccgtgtttaggagcgagccgaagtatctgctgcttggcggcgtactcggcgccgggattacctggacagtgattaaggcgatggcgatgcttggacctgcaagggcggttctgtttatcgtggtggcgcagatcgcggcggcgtaccttgtggagctgtttgggctgttcggcgttgaaaaagcagcgtgggagtggagaaaggcgatcggacttgctgtagcggctgtcggaattgccgtttttcagtggaaatagcgcccggaatatgctatcctaccagtagtgagaggtctgcagaagaagctggattttggtatctgcagccatgaaatacaagagaggatgtgtatttgattgtcttatcagacgttatttttacagcagtcttatcgggactgtacgaaacagtatgaggaaattctgcacaacccgaacctgccgttgtgggattatgtggtgctgacggcttcgaacgaggcccaggctcaggcatatcgtgcgcagatttcctaccgcttaaagcatcagatgctcccggaaaagacgcactatgcggtgctgcccgatccggacggcaagcgcgtcggaagcggcggcgcgactttaaatgtgctgcggtatatccgggagcatgcggcgggtaagcagagtccggctgccgtgctgcatagcgcagtgcagggtgacggcgcagtggagagtagtcagtttgtgtctgcgcagcccggcgaagcagcttgccacgcctttgacggcaagcgcattctggtcatccattccggcggggacagtaagcgcgtgccccagtattctgcctgcggcaagctcttttcccccgtgccgcggattcttccaaacggccgcagatcgacgctgttcgacgaatttatgattgccatgtgcggtgttgcggcgcggatgaacgccggaatgcttgtctgctccggggatgtgctgctgctgtttaacccgctgcagatcgatttttacggaaaaggcgctgcggcgctgtcgatcaaggagcctgcagaaatcggcaaaaaccacggtgtatacagacgggacagggaaggaaacgtcggcggatttttacataaaaagaccgtagagcagctgcacgaaatgggtgcggtggacgagcacgggtatgtggatattgacaccggcgcggttatgatgagcgtagacctgctcaattccctttacagtctgatcgacacagaggaaaagtttgccgcctgtgtcaacgaacaggcgcggctttcgttttatgcggactttctgtatccactggcgtcggattccaccctggagcagtattatcaagagacgcccgagggtgagtttacaccggagctgagagcctgccgggaaaaaatctgggcggcgctgcatccttatcagatgaagctgatccggatgtcaccggcggcatttatccattttgggacgacccgggagctgctgcatctgatgacggaggggatggagcaatttacgcatctgggctggcaggcgcggatcaacaccaacagtcaggaaaaaagctatggggctggaaacagctatatcagtctgcgtgcagacgttggcgcgggaagctatatcgaggacagctatttgcatcatggtacggttgtcggggagcgctgcgtgatctccggcgtgacgctggatggacagagcgttccggcggatacggtactgcatgggctaaagctgcaggatggcaggtttgttgtccggatgtacggcgtttgcgacaatccgaaggaagcggcattatttggaaaaaagatcggcgaaccgttgtggacggcggcagtttatccgattcgaaatacgattcaggaagcagtatctgcgacactgcgtgcatatgaagacggttttccaacactgaaagacgggatttctttaaaagacagcttcaaccaggcggatgtgacggcgattctgccctggcaggataaactggaggataaggtaaaaatcgaatccctgttggaggccatcgataaaaaggataacctccatgaggcggtgaaggtgttcaacggggagatcaatgcgcgtgtaatccggcagctttgcggtctggcggaaaagctggacgaacaggagctgtttgaattttcccggaaaatccggatttattatgcgctatcctgtctgacgaagcaggataagtatcttgacctgtgcctggatacgatccgaaacgcgattcttgtcggggcggtggctgggctttcctacgatccgacggctaaaatggagcaggaggaagtggtggtacgcctgcccgtgcgcgtcaactggggcggcggctggagcgatacgcctccatattgcatggagcacggcggaacggtgctgaatgcggcggtgaagctggacggacagaatcctgtcgaggcagttgtgaaaaagattccgggcaatcagatcgtgctggccagcgcggacagcggcgcagagcaggcattttctgaaatcagtcagctgcaggattccagcaatccttacgatccctttgctctgcataaggcggcgttgatcgcctgcggcatcattccgtaccgggagcagatttctgtcgaagaggtgacaaaaaatctcggcagcgggctctatttgtccacacaggtgattcatatcccgagaggcagcggcctcggtacgtcctcgattcttgcgggcgcatgtgtcaaggcgatttaccggatgctcggaaaggagctgtcccaggaggagctgtacaaccgggtcctgtgcatggagcagattatgtccacgggcggaggctggcaggaccaggtgggcgggcttgcgcctggaatcaaaatggtgaccagcgatgcagcgattgtacaggaaatcggctgcagtccatgcagcatcagcacagagacgctgcaggagttaaacgagcgattctgcctgatttattccggacagcgcaggcttgcaagaaacctgctgcgcgatattgtaagccgctatgtgagcggtaacccggatacggtggaggtgctttatgagatccagcggatagcggttttgatgcgctttgagctggaaaagggaaatgtagacggctttgcacagctcctgaaccagcactgggagctttccagacggctggatggcggctgtaccaatacctgtattgatatgatctttagttccgtggaggatctgatcgacggaaagatgatctgcggcgcaggcggcggaggttttttacaggttatcctgaaaaaaggcgtgactgcggaacaggtgcagaagcgtctgagagaggtattccaggacagcggcgtggaggtatggcgctgcagcctggtgtga

SEQ ID NO: 1071 - DNA, 7403 bp, unidentified
  source 1..7403: mol_type = unassigned DNA
ttattttatggcatcgagtgcgtttgagatatctgcaatcaaatccaccttgtcctcaagacctaagcttattctgataagctctgccggcactcctgcttccttaagctgctcatcattcatctgacgatgcgtgcttgttgccggatttaagcagcaggttctcgcatctgccacatgtgtctcgattgcaccaagctttaatgccttcataaatgcagacgctgcctctctgccgccctttaagccaaatgatacgactccgcagcctccgtttggaagatacttctgtgctctctcatagtatttgtttgaaggaagccctgagtagtttacataggcaacctttggatgattttccaaaaattcagccactgcctgtccattttccacatgctttggcatacgcacatgaagtgactcaaggccaagattcagcataaatgcattctgtggtgactgcatagaaccaaaatcgcgcataagctgtgctgtacatttagtgatgaacgcaccttccttgccgaatttctctgcatatgttatgccatgatagctgtcatcaggtgtgcacagtcccggatatttatctgcatgtgccatccagtcgaatttgccgctgtctacgattgctccgccgagtgtggctccgtgtccgtccatgtactttgtggtagagtgtgtgacaatatctgcgccccactcaattggtctgcagtttacaggtgtagggaaggtattgtccactataagcggtactccgtgctcgtgtgccacctttgcaaaaagctctatatcaagcaccgtaagcgcaggattggcaatagtctcaccaaacataagctttgtgttcggtctgaatgctgcattcagttcctcctctgtagcatcaggagatacgaatgtagctgtaatacccatctttgccatagttaccgcgatgaggttgaaggtgcctccatagatggatgatgatgccacgatatggtctccgcactcacatatgttgaacatggcatagaaattggctgcctgtcctgatgatgtgagcatggcagcagtgccaccctccatagctgcgatttttcttgctaccgtgtcacaggtcggattctgcagtctgctgtagaaatagccctctgcctcaaggtcaaaaagctttcccatgtcctcgcttgtgtcatatttgaatgtagttgactgaataatcggaatctgtctcggctctccgtttccggctgcatagcctgcctgtacacactttgtacctatactgtattctttcattgtgcttctcctttattatgttaatgtttcagttggatatagtatattacatttggcgcgttttgacaaattcagattatataacttttatcatcataaattcttaagctttataacatattgtatctaccagtgcttcatagctgctgtcatcagcttgcagtatctctctgacattgtgctgctctaatgctgctgttgttttttcacctatcgagtatgctgtttccacgtatgcattctccggcagcatatgaaaaaatctttccacatttgatgcgcttgtaaaaaccgcttcacttaccatttttccaatgctttcaggaatactctcatatgcctgctcatttacatatgcatcaattttttctaattcacatatttctttaagccctgcctcaatgtcaggtgaagcctcctttgccgagaaaatgcagactttgatttcatcattatcgcccatatacgaactcaattctcctgcaagtccttttccggtctgttctgccggaataatatctgcctttatgtgatgctttgcaagctctttttctgtagcttttcccaccactgcaaaccttgcacttgctataagcctgatgtcagcccctgccagatccagattatagaaaaatgatcttacaccatttttgcttgtaaaaacaatccagtctgccgatcttaccttatcggcaaattcaggaattataactggtttaattatgcctgtcttaaccggtgtgacatctgctccaagctgctgtaattttgctatcaattcgtttgttttgatatacggtactgtgatttttcttccaaacagcggtcttttttcaaagaaatcaagcctgtcattcagtgaaaccacatctcccacaacgattatagccggtgatgtcagctttgcttcctcaatcttttctccgatatccgcaagcgttcctatacatttgcgctgcgcggcaagtgtgccgttcgatatcactgctgccggagtatccgctcttcgtcctgctttcataagccctgctacaatgctttttacatgcgcgagacccatcaaaaatacgcaggtgattgtctcatctgtaagaagggaatagtctatatctgtctcctcatcctttctgctgtgcgcagtgatgacctgaaagccttttgctatacctctgtgtgtgataggtattcctgcagccgcaagcgctgcaaccgacgaactgacacccggtaccacttctacctccacatttctatctaccaggtagagagcttcctctccgcctcttccaaagacatacggatctccgccctttaaacggactacaagctcatgatattttgatttctcgtacaaaagctcgtttatggcatcctgcttcatgacatgcttgtgattttccttgcccacataaataagctcacagcctgcctttaccattgaaagaaactctggtgatgacagcctgtcatacaccagacaatccgcctgttttatatatttttctccttttaaagtgagcaggcccgtatctcccggtcctgctccaactaatactacttttcctgtgttttctctcatgattttcctaattatttttctactgaattattatgattaaaaattatgacttgatatttttagtcgatttctaatttataccgaatatcgtgcaccgcacgctccacaatatcgtttctgtctgatgtcatatcccatacctgctctgtcctggcaagctgttttccatcctctgaaccaaacatcgcaagaagctttagcctgttatttttgttgctgtcattaccgcggtctttttcacttacaatatcacagtatgcagccacaggcagatgacagtttccaccgattcgctttaaaaattctctctcaatgcctgcgcacagattggttttctcatctgacaaagcatcaagctttgccatcagcttagcattgtcagcacgtagctcaagcgcaagtgtgccctgtgccggagccggaatcatatcatcctctgaaaagtactgtgtgatctcagaatctcttccgatacgctttattcccgccgctgcaagtacgattccatccagtctatattcgttatacttattctgtttttcgttagctatctcattgttatttacagtattatcggcaacctcttcatatataatttcactatcatatagcttacgaagcctcgtatcgatatttccgcgtatgccaaccaccttaatgtcaggacgcagctttaaaagctgatactttctgcgcttacttccggttcctatcacggcaccataaggaagctcatccagtgaagcggcattttttagcaccaaaacatcccttggatcttcacgcttccatgcctttgcaaatgtaagccctactgccggttcatcaggcatatccttcatagaatggactgccatatgaatctttcccgataaaagctcgtcctctatctcctttacgaagataccctttgagccaatcttatcgagtgcctttttctgctctaaatcgcctgttgtctttatgataacagccttaaaatcatcatccggatatgctctttttaacttatctatcacgtaatcagtctgaacaagagcaagctttgagcctctcgttcctattaaatacctcattttactctcctacggatcatgccattttccatttatcatttataaatgaacaacaacttaaaatctgtaataccatactttaaactatatttccggaattcttccattatcaatagctgcacacaatatttctttaaacacacgctttctctcggcttccgtgtcatattgcgctattactttttcgcggatctgtcccatgtattcattcagttcaccaagaaacggagtaagaatctcctgctctttgcctttcagatactgagtcagcacagggctgtttcctccgctcgaaaatgccgcaacaagattcttttcctttatgtatgacggaaaaataaagctgcaatcagccttctgatcgaccgcatttaccatgatgtccttagctttacaatactctgcaatctcatgatttaaagcattgtcatcagtggcagcgataaccatttccatgccgtcacagtcttttcgttcaaactttctttttatgaacgtaattctatctgctgcatccgagtccgtctgattgttttctttatttgccgtatatgagcccgttttatcctcgcttgctatatcatcaattgtaagctttctcagctcatcacatatatcctctgccacaaccgtgaccttcgcgccaaaatccagcattacgatcaccttgcggtatgccacatttccaccgccgacgatcagacactctctttccgtcatatccacaaacatcggaaaatacgccatttttatctccctgtaataccatatccatactttatttcatacattatttcatgccttattttatactttattatactctttatgctttattttccaccttattcttcacactgtaaccgtttaatattcctgcaaaaacaggatgaagtttggctgaaaacactgctgccgatacgcatagtataaagtccggtgcaacagttatcagacagtaatccactattactatgccccagctgacaggtgttgccgcatagaaattcttcatgcagtaaaagtatatcgctccaactgtataatatgccaccagtccgaccgttgccggaagaatgagtgtaaacgcattggtctttttaagcttttctgagattgctccgattaaaaatgctgcaagcacaaagcctaagaggaatccaaagcccggtcttaaaatgtatgtaggaccaccgcctgctgcaaatacaggcactcccaccagtcctatgcacagatacactatcacgctaatcggtgccagctttgcccccagcaggaatcccgccatcagcacaaaaaaccactgtaatgtaaaatgcatggtgtacataggaagcggaatatcaatcttgataaatgctccaactgctataagcgccgcaaaaagtgcacatgttgtaagttccttcgtttttaatttcattttcgcacgctctttcgttttattaaatatacatgctataataacatctttctctaaaaaagaaaagccatcttcgatgaagctgacttttctttgcagctttcgctgcgactcaaaacattaacatatgatttagaagtaatattcatcagaatatattcgtaaatcctctttcgtgacctgtccaccctcgatatgaaacgagttgattacaggattttctgccataagcgacattatcatgtagctcgcatttggatcgtatgcaagctttatatcctcatccgatggccttgaagggctagacggatgtgaatgccagttgccaagcggcttaaggccgtttgctctcatgtcctttatggctgccagctgctcctttggatccattgtgaaatggtcctcggcatggtctgtattcgtcaggtaatatacctttgtgatgagacgaccgttttcatcctcactgcctgctatcagaccgcacgcctcctccagcagatgctctttagcatattttgctatttcatccagaaacggatatttcattcttatgatactcatatcgttcctttccttactgtctttttattcctgtgtacgaggtgcatcaaatctgcccgctgtctcctcgcagacctcctgctcgtagtcgattggctcgagaatggtcggatggtcaccacagactgcacagttgtgtgtatcctttggaagcttaatcttgtggaactccatggtgagtgcatcatatgtaagcagatatcctgtgagcagctctccaacaccgattaaatacttgatagcctccatagcctgaagcgaaccgattactccgcccatagctccgataacgcctgcctgcttacatgtaggcactgcatcctttggtggcggattcttgaatacacatctgtagcaaggtccctctcccggcacatatgtcatgagctgacccttgaaacggatgattcctgcatgtgaaaacggctttttctcaagcacacatgcatcgttgattaagaactttgccgggaaattgtcagttccatcgatgatgaaatcatattccctgataagctctctgatatttgacgcatctacaaacatacggtatgtattgacctgaacgtccgggttcatggcgttcattgtctcttttgctgactttaccttggctgttcccacatcggctgttccgtggataatctgtctctgcaggttggataaatctacctcatccgcatccacaataccgattgtgccaactcctgctgctgcaagatacatggctgccggagctccgagtccgccggcaccgataataagcaccttgccctttaataatttcttctgacctttaacgcccacctcattaaggataatgtggcgtgaatagcgctcgatctgctcatcagtcattgccattagcatccacctcccatgaaataaaggaactctacattgtcgccatccttaagcactgtctttggcttatcctctgtggcaacaaattcctcatttattgaaactgttacatactcaggcatatctacattctcaagctcgataagctccggtaatgtaagtccatccttatattctttcttctctcctgctactgtgatagtcattttatttcctcctgtgtcacagattgtggtatctgtaagtgttattatcctgtatcagactgctttatataataatctaaaaactataataattcttcaacccacgccttcaaatcggcaggcttttgtgcgccgacctttctgtctaagacctctgcgtcttttacgaaaagcagtgtcggattcgcagtcacctcatactcatcagcgagctctccgtcaaagtttgtgttgaccttgtatacgtgaagcttatcctcataatcatcctcgatatctccgagaaccggtgccagcttcttgcaggccacacatgaatccgagtaaaaatcaacaattaccggaagcttgctttttaatactttttcatcgaaatccgcctttgaaattcttgctgccat

SEQ ID NO: 1072 - DNA, 27362 bp, unidentified
  source 1..27362: mol_type = unassigned DNA
gataaggatcacaagtgctttctgattggtcggcatctttcgataactcttggtccataagttgctcctttcccagtcactttagatacttgtaaatcggctagacggtgacgctgtatattttcccaacgcttttatttttaatcagctttccttcgttttcttgtataatctttgtagcatgatcagcgattgtttctcttaagttcccactattagtatcaatacccaaagaaattatttcttccgctgttgcaaagcgatagctttccgaaggctgtcccatcaaatttctcaaatcgttttcttgttctggtgtcggaagcaattctatgatatcagcaaggagaagttcataacattgaaaatgttctccccaatgaagttctgttatatgtctaccacaatagcgatacaatatacggttccaattcacaatatttttgtcaatcagttcttctttgaattctcgactcagattatcaatacgctcacgatttgctccacgatcaaaccgtttcataaattttcgcaaatacttattttcaattctgagacgataatcatctcgtgacgactcgtcaattgaaatcttgtcatcatccttaacttgataacggttctttagctcaattttctcatttcccgcaagcttgtatacgcctccgactggctgatacttttccgtacctcgttcgtttttcaccagtaaatacttgttgccaactttaattctataaagataggcaaatgaaatgcggacgagcgtatcatttttaataaagtccccgcgtttcaactttctctgagaggttttccaatttgtagtgtctgtgagatcttgtagagatttccaaaaagcaggcaacgaaaaaccaagtgctattccagacaaactacttccggcaggccaattattgcgttcaaacaatattattactcctgccaagattaacgataatcctccaagtacaactactttgagaatcttcacaaaatcacctcctggctattggaatctcaatcctttttcttgccatacacgagccatcttttacaatatagcattcaatatagtgattgccaaagaaagaagtatgttccactatcgtgcgtccgcgctcctcaatttggcctcttatttgattttttctttccgcttcaggacctacgtttttaaccttccagagtattttatacggccatggacaatcggtatactccatttcacatcgaatttcaaaattatgtggcaaataatgttgccacatcgataggaactcccttatcggctttggtctccacccatcacccgaaaccttgcaagatacatcacattgatacaccaatcgcatcggatacatttcttcaatatactgttctccatcaaaaaaaccacatacagatttagacacagaagcgacggcatagctttctgccatcgtcacctgctcgccccagtaatcatggttaaagaagccataccatgcctgaatcgcatcatcctttgtgcagtcctcactaaataagacttccaaatcctccagtttgctttttagacggtttttccagtttgtcattctttgatgatcgatatttcttggtgtcaaatcacgaccgtcatctactggtgctataaccgatgtacttgtttcaaggcgatttacaatttcctgcatcgtataataaaactgttcgtctgtccgttcgtatgattgctgtaatttttcatcgcatagcactgtttgaagcaatccactcggcatgtttttccacgattttctcgatttgcaaaacatctttgatagccgaattattttccttaacttaccatttgaatcatcattttgtgacttaaaccaatcggttaaccccttgagttctctctcagaccaatccgagcctgcgtgttcataaatccagcactcattttcagaatcataatgccgtctgtaaacagcaaaatcaatatgatatccatctgcgtatttaattctaacacagcttgtttttatttctggctcagcgttaaattgttttgtttttcgttttagtgcatttgccactaagtttcttgtagcttgtgcccctttatctcccaacacatttttgtcaaagaccacagcaacatcaatgtcataatccccatcctcattctgaacaacagttgacattgccacgctcccctgtacgcaagtctcggcaatagtatatgatgtattattttcgatgttatattcttttaaaccatccttgaggcgctgaacattaagatcctttttgttatgtaagttattctgttcatcctgtgacagaacaacatatgatgtataaaaagtattgaactttgatgacagatcatacattattttcttttcctcctcgcctcgtttttacattcttgctcacaggaacagtcttcagaggaagctttttcatacctctatgcttgaaaatccgccttttcctcttccccatagccctgtgtgttaggatagttgtcagtgaaagataattacttttgtggtagtatatagctatcacgggaagggagctttcactatgaactatagtccagaattaaagaatgcactcctccggaggatgcttccaccaaacaatgaatctattaccaagatatccagagaagaaggtatctcagaacagacatttcgtaactggcgggataaagccagaaaggaaggctatgctgctcctggtatggatgctgttactgatgactggagtacacaggataaatttttagttgttgttgaaacagcgatctttccaatctattatcctctcacatccaggaactgtacctgaccgtgaatggatagaacctccgaatcggccgggacaaagatacaatctcctttataaaaggtgatgtttccaccttcaaagctaattgtaccgcagccgttcacacagagcaagactctaaatgcaacctcatcggcatggtaatgaaccgtctgccgacgctcagtattcactaacatccggtacacttcaaaatacttacagcgtgtcagaagttctgatgccacacccttccggtatttcaacacacgaagaggctgacgcggttctgcactgctgctcagattagctacttccagtgccttatccacatgcagttcccgtttcttgccatccttgcccacacggtcatagtcatacaggcggtaggtcagatttgagctttcctgaatctctgccaccagcgcaccagcaccaatcgcatgaatcgtaccagccttgatgaagaacaggtcatcttttttcaccggaacttgctgtaagtagttcatcagcgtgccccgctcaatcgctgtccgcacttcttcttcggtacagttcttacccagaccatagatgagtttggcatctttgctggcatccagaacataccacatctccgtcttgccaagctgaccattttcatgctctttagcatagtcatctgtcggatgcacctgaacggacaaatccttcttcgcatctataaacttgatgaggataggcagctctgtttcgcccttatgccgttcccccagatattcgggatgttctctcagcaccgctgcaagttccttcccatcatattcgccgccgaccacataacagggaccctcgggatgggtagaacactcccaggtttcagccagaggagaaaggtctatctccttttcaaattcatcattcagtcgtctgccgccccagagataatccttgccggacggccgcaacaaaagaggcttattgttcatatcctgcctccctgcattctttaatattccaactcatatttctgtttatcgtgaacattgatgtcctcgccaagctgtacttctatcaacttcagttcactttcagcgatcaccgtatgacggcagccagcggacatggtgatcacatcgccagccttcacattctgctccatgccatccacgatggtcttacccgtgccggaaataaccacccaaacctcatcacggttcttgtgactgtggtaattcatcttgtgtccagcgttcagggtcactttaatggtcatagatgtactctccacatctacaaccttgaagctgccccaggacttctccgcaaacatgatctgctgctcgaacatatcgacaaaaggcttgatgtaactgctctgctccttgtccgacacaagaatgccttccggagaagcagaaattaccacatcatgcaaccccatcgccaacaccggtacatccatttcattaacaatggaaacaccagagcaagcatcgttcaaaatgcccttgccgataatatcttcttccatcgcttcggtcagtgtattccatgtgccgaggtctctccaagtgcctgcgaaacgaaccacctggatcttcggttcatgttctacaaccgcataatcgaaggagatttttttcagcgtatcatacttagcgaacaggtcggcataatcggtgaagtccatcaactcatgcgccttattcatcacatagcccagtttgtaggcaaacacgccgccgttccaaagtgcgccctgcgcaatatactgctcggcaacatctgccgtcggtttctctttgaaagtctgcactgtcgccacatggtcggtgctttctggaatgatgtagccgtatttttcactaggataagtcggttcaatgcccatcagcacaagatttgcttcgcccttatcagcctgatcagacaattccttcaaggcttcaaaataggaatcttccacatacggatcgacagggcagacaactacggattcagatgggtcaatgtgcatcacatcaactaaatacgctgtcgccagcgcaatagccgggaaagtgtcacggcggcaaggctcaacagagatgcccactttctcacccaactggttgtggatagcagaaacctgtgtcttgctggtagcaatggtcacggttgcatcggtatccaccttcttgatctggcgatacacacgctgcaccattgattcgtaagtgccatcttcctgcttaaaaatcttgataaactgcttggaacggatgtcgttggaaaggggccacaagcgcttaccggagccaccggaaagtaatacgatattcatatatctacgtcacctcttaaacataaaaggccgcgatcctgttcgggacacacgaccttcaagtttttcttatctttctgctctcatcggattgttcatgaagtcttcataggacaggcgcagaccgtcttccagttcggtcttataagtccagccgagattcgctgccttggaaacatccagcagtttacgcggggtgccgtttggcttcgtggtatcccacttgatctcacccgtatagcctacaacctttgcgaccagttcggtcagttccttgatggtcaattccttaccggtaccagcgttgactgcctcgttgccggagtagttattcatcaggaatacgcacagatttgccagatcatctacatacaggaattcacgcagcggagaaccatcgccccagcaggtgacgctctccacaccattgacctttgcttcatggaagcggcgaatcagtgccggaaccacatgactgtggatcgggtggtagttgtcattcggaccgtagaggttggtcggcatgatagaaatataatccgtgccgtactgacggttcaggaactcgcagtatttcagaccggagatttttgccagcgcataggcttcattggtcttttccaattcggaagtcagcaggcagtcctctttcatcggctgaggagccatacgtggataaatgcaggaagaaccgaggaactccagcttcttgcatccattcttccatgcagagtgaatggcgttcatctccagtgtcatattatcatacatgaagtctgccagtgcttcctgattggcgacgatgccaccaacttttgctgccgcgaggaacacatactccggcttttcctctgcaaagaatgcttcaacagcgtcctgacgagtcaggtcaagttccctgtgtgtacgagtgataatattggtatagccctgacgctgcagctcgcggacgatcgcagaacctaccattccgagatgacctgcaacatagatttttgcatttttctccatcgtaattattcagcctcccgcattgctttttcacgctttgccagtttgcggtcatgctttgccatgatttcaacaagctgttcatagctggttttctgcggattccagccgaggacagtctttgcctttgtcgggtcaccccacaggttgtctacatcggtcgggcgaaaccactgcggatttacgcaaaccagcatctttccggtttctgcatcgtagcctttttcctccagaccagtgcctttccagcggatgttgataccgtttgcggcaaatgccttttcagtgaagtcacggacagtgtgctgaacgccggttgcaataacgaaatcctccggcttctcctgctgcataatgagccacatacactcaacatagtcctttgcatagccccagtcacgcaaggaatccatattgcccagttcaagatgatcctgcaagccctctgcgatacgaccagcagccagagtaatcttacgggtaacaaagttctcgccacggcgctcagactcatggttgaacagaataccgttgacagcgaacatattgtaagcgtcacgatattctttcacaatccagaagccgtactgcttggcaactgcgtaaggagaatacgggtggaacggcgttgtttcacgctgcggaacttcctcgaccttaccatacagttcagaagtagatgcctgatacaccttgcagctttcagtcagaccacaaacacggacagcctccagaatacgcaaaacacccagagcgtccacatcaccggaatattccggtgcatcaaaagaaacctgcacatggctctgtgcagccagattgtagatttcatccggcttaatctcgccaacaatacgaaacagaccagaagaatcagacagatcgccgtcatgcagcttgattttgcccatcaggtggtcaatacgggctgtgttggagatagaagcacggcgcacgatgccgtggacttcataacctttttctagcaggaactcagcgaggtaggagccgtcctgtccggtgataccagtaataagtgcttttttcatgtgtttaattcctctctatttttcaatgttgtgtttacatttttctttacatatgtttattttacaataaacaatccaggcgatctacagggaagaagggaaactcaaagatctttcttgaatattccggtcttggtgtccatgctgtccgatggttaggaaaccgattggcaattatccagaatacaagaaatctcaccaatataaagccggctaacgccccgcaaagcggctttgggcttgacattggctcaatttcttatgaatggtagttaaggcaatcaaaggcggtttccgtatccggaatgtaggtttccactgcaccggaatcacggttttttgacgcaagaatattcatctttcttctaaaaaacgacttacgcaacgtcaggtggtcatccgtccactgatagatgctttatttgtgtacctgaaacagaaaaaagaacagatcgtggtaaaaggcaagctggaagctgcctttacttaccttctgaaccaggaaaaatatctccgagtgtttctggaaggtggagatgtcccgatggataacaatgcttcagaacgtgccatccgcggattctgcattggaaagaagaactgcacagaccgaagctttttggaagaactgctcccctggtcaccagcacttccggaaagcattcgaaaataaaatttatatcaggccgcaaaagcgacttaagattgtcaaggtacttgctatggtgcgtttacgtcagacctttggtacttgttttatatatttagccggatttccgccccatatttcatttgcaggaatttttccagtcactactgatccagctccaattattgaatttttcccgatatatgtaccctttaaaattgttacatttgctccaataaaaactccgtcttctactacaattgctttatgctttgtttgctctatatcactcgcctctccataccgaaacgtcggatttaatggatgaaaatccgtatcatatattttacttcctgcgccaattaaaacattacttccaatcataatcgactcgacacaagttattgcaacattagaaaggcctgtataatcgcctatttctaagtatccactacgcataacttgaaattgcgtctttgttccccccccaattggatttgaccactctgcagatcgaatttttacattatgtccaagttttatcgttccttcattgtatatccatattttcccaattacgttaacatcactttcgaactgtacaccatttatactcaaacaaaatttatttacagggttcatgattatattagcgaacattctaatttttctttttattctcaaccaaagcattctctacacctcttcactattttctctgtttcatttgtttaacagtgtgtatcagataccataagctatctattttaaaagcatatgaaagccctacatagactactgctccaactattatttgtacagaaatcaaaattacatcagaaaaaggaatcaatgagagcaaatatacaactcctcccattaagactgaaatcaaagcagatggtgccatatcttttaacatttctattattgaataacctatcaactttttgttgggtaaaatattaatcaccatagaaattgcagcgaataatgcggcagaagcagcaatcgcatgaacactaattttcatcgataccaatatcattaaaacaccaattattttctttactatttctagtttaaagcaaagatcgcttctacccacagccttaattatttgccaatttgttgtctgaaacggttgacatgcccaataaaaacaagccatctgtaaatacggaattgccggaacccacttttctgacaacaacaaaatgatcagcggtcgagctacaaaaatcagtcctgtaagcattggaaagataagaaatgaggttgttttcatagctcttcgactaatctgctttagtcgttctttattatcattttcttgaaccattgctggaaatattacatttccaatagctgtatccacatttgtgattatgaggtttggtatttggtttcctttattgtaataggccaaatccgtcgaagtatatactcttccaataactaaacttcttaattcattataaactgtgttgattagacttgcagccattaacttccatccgtaattaatcaatgatcttgctgactctatagaaaaaatcatctttggtctccacggaacagtaataaaaagcacgaccgtatcaattattgtattcatcaaatactgaacaactaatgcccatacaccaaagccataaactgccattgcaatcccaactacaccggaaagcaatgtaccacctaaagtagaaaaaaagaactttttaaaaatcatatgctttgatacatatgcatgttgtacagtgctaatagcagaaatcggaatcttaactgccaacacacgaagtacccatattagtctctcgtttttataaaatttagctagagaaggtgccgccaaaaatagcatcacatataagatgcaactcaatataaagctgcaataaaaaatggtagaaaaatccgtatcatctgactcttttttttgaaccagcgcttctccaagtccatttgacacaaatacattcgcaatatttataaataccaataccattgaaatgataccgtattcctccggcattaatattctcgcaagcactatcgaaacaacaaacgataccacttgtgccgtaattctttctccaaatgtccaaattaatccggacattactttcgtttttatactctccattttttcaccatacaagaatttttttaaagtccgatttttctcatagccctttgtatcggttttacccacacatgataatcgaacttattttttacacattgttttgcattctccgataattccatatattcattttttgtcatttctaaagctcttttaacagctcttaaacagttctcttcagaatcgcctttaatgaaaatactattagtattgtcttctaaatagtattttgtataatcacctacttcgctagcaatagggacaatcccatacgacatcacttctggtattttacttggaaaattagctaacgtcatttgagatgttgtacgagccaaaagtaaaaaatgcactttcgcataaagttgtacgagttcttcatactccatccaatcatgaacgataaatatatcttttactttttcataattagcattttcgagacagtccacaatattctcttttttaactccacaaaaatggacttcaactttcattaattcgttttcggataaatttgaaaagcaccgcaccattgtggacaaattatctttcatttttccgtttgccggaataataaacttccatttttcgaatgtttttgtcgtgtccacctccttatactcatctatatcggccattataggcagaaccatctgctcaacttttgcggatttcatatattcttcaatatacgtacttatcggaaacaaaatatcaaactctggacataaacttgtcattatcttatttgtctgtttaaaactttttcgtggatgtcttccttcaaaatctttctcctcaaagagttccaaaatacctattcctatttttaacccatgcttcttcttaaatttaatcaaactttttgtattataaatattataaccaagtataataaataaatcattttctcctgcttccaactgaattaaatatcttttaatctgattccaatatcctgtctcttctaaataatgatttataattttattgccatgtgtttttaaaggcaataactcactttctacatttatgtgtttagatgaatattcttcatttattttagctaacacatacgttttatatccagcaaaagcaaatgccgaacttaaatactgaacataatttgcatttgctccccccctaggatatttgcacggtgtataaatgaatacgcgttttttcaaccttcattcctccctttcatttgatagtgagcaactcctcgacctatgatcagcatcatacaaaaattgggtatatcaattccaaatcctagatatattgccagaccatttaatgccaataaccacatcacccctgcaaaaccgtagccatcacgatatttgaaaaaacacaatgcagatgaaataacaaaccttagataaattactgtcgggataagaccatatctaaatatcatcattagcatttggttatcaatatatgcgtatgttccatgagcactttctatatatgttgcgttatatccttgccctaacacaaactttttaatgtccatctgtgtcataaattctatcaactgtaaacttcgtgtatcttgattaagtctcccccctaatgtttcaaccaattcaggagcaaattggataatcgcaactacaatcaatccaataaccgcaattacagtcacagcttttgttgcattttttgatttgtatgacttttcaccagcctctttacctaaatatgcataaataagcagcgcaattgattgtattatccaccctctactaacagacatcacagcaagaataacagataagatcacaagcatgaataacatttttctatttttgctgaacttaaactctttatacccacagacatacagcattaacgcataaaatccgtattcaaaataaatcagagcatgactataaccatatcgaacaccaacagaaccatactcaacgtagaattgaacagaatatactaatgacaatagcaaaaatatcatagcaatatattttgcaaaatatgatatcgaagccattaattttgtattagagcctgcataaaacgaaccaaaaaacagaagtgttagcggtgtaaaattaccaacaaataaaagggtactagaattctttccaagaaaatccatagtccataaaacaaataaaaaggtaagcataaacgcaaataggattgtgcttactctattctttttatgttttaaggaatctgtaaagcacaaaatcgaaaaccaaactcccaacacagaagaacacgcaagtatatattgatctaatggtccaacctctggactcatagaataaaatccataatatccactccatgtgccattaaaaaagaatatgatccggcttatcgcaaatgttagtagaaacaattttgctaatgtacttcgtaaattaatttgtagtttcacacttctagaccctttcacattaaaattcatcttagatttgtattaaagtatcgtatcaaagtttctctcttattttcgttttcaaactttacatatccttttccatttttacattttctagcatattcatctattgtcataagataatgagcgggaacccctgcccaaacttcgcctgccggaatagattttgttaataatgaatgtgcccccaaaacgctattattccccattgtaacgccaggcattattgttgatctgcatccaataaagcaattatcgccaatacaaactcttccatatttattgactcctttatattcttctctttctctaaagcaccatgttgctccatcatgcgtaagaaaaatcacatcacatgatattgtcacgtggtttccaatagaaattagataaggttcacttccccagtttggcattccaatccgacaattttcacctattttaacacctattttttttgcacatttttccggatcgagatgtttttctaattgctccagtaatctacaaataatcatcttgacgctttcccttcttttaaccttagcgacacaattatatgtagaaagttctatagcaactacattattttcactcaatcggtagcttaagccatttccccagttctatatcccaactttcaggaacaaatcttcccatccctgatgccggataaaatgtgagttcaccaaaataaactttcccattcacctcataaaaatcaactcttaaaaacaataattgactagctagtttttcagctaattctatcattaatcctagtttttttggcatctcaatctttttttcaggtatcggaatatactctgcttctccgaacggaagtatatctccattgcaatcataatagtttgcatgatgatttgtaaatctatcaaaatcgattttaaaacacttgactttaccgttaaagcagaaaaatttataatcattaagactatcgccaagatactcttccgcgataactttagggggaacatctttatatggccactctctaccatgcgaatagtaattgcatttaagacttcttattattctgtttcttgcatcactataatcaaattgttctttatccttacatattgctattccgccggaatcatgtgtgcatttcaacacaaagcaatctggtagtgtagagaaatcaatatcatcaaattcattccaaacaccaagtgtaggaataatgtatttttcccccccccaagatttgttctacatatttttttaccgcatacttatccaccatcgttgtgtattctggttttctatcatgtaattttagccattgtaatttttcgttaaatgttgctggtttaattacatttagtttcttacccataaatcccctgtacattatagatagatactgtttatcaggcatccagtccagcatccccattcgtccgactttatcaaatattctgaaacatatattcactctaatatcctcctgacacttcaactgtgcttctgcatttttcgtccaacacgatagatgaattctttaattcccataaaaaagccctgtttataccacttacggtattcctctggatatgtcccctgtggctttctactcgcatcctctatattttgatcaaagatattttcaataaatgcatgatactcatccatttgtttttcctgtttttttatctgttcatctgtttgccacggttccattatcattttgcaccatatatcgcggttttcttcaacatattgcactttttttattacttcttctaggtttgcacagtcatttacgtatataaaggccttttcattaaattcttcctttacgccgggatctccccaataaatcggcaccgtatgagcttgtaagctggtcaaaagtttttcagttacatatccctcatactttgcattttctgaagcaatagaaaagcgataatgacttttaattccaattccacctgctgcccagtcataagttccaagtttgctcgcaatatctgttacattccgcagatgcccacctagagaatcaacccatttatactttgataatgcataaaaaagctgatctctcatcggatgcgctttgctgttagaataaaggaaattacaaaactcttttttttcatcatatagtttctgagcctcatcaatagtttttactgaattttctttttcaaaaacggaagctttatgaaaatacattgcaggcaatctagtaattctatctccgtctcttaggtttcggtcgaatacaacagcataatcaaaaagatttaaatctggtgcaatacattcgcctgcataataaattataattgtattctttcccaccaatttttcaaattgtctctttatttttcttttgagataaatatgttcactcacaaatagataatccggattttcttctgtccagacatactcatattcatttcgatcaagattcatatattctagagctgcatccaacgaatgtatgtttttatgaataaaatacattctaatcttctttttcatatttttttcccccattcattattttttcccactcattacatacagagttctctgataattcctcacgaatttttaatgcttctcttcccattcgtattgctatttcttcattttcaatcaaccacaccatcttcttagacaggaactcatcatccccgacagggactaatacaccattcactccatctttaatgacttctctagctccgccacctgccgaatctgttgatactactgccaatcccattgccatactctcaagcaaggcattagaaaggccttcataatctgatgtacatacatacatataagcatttacaattttctcatttacttttttttgaaaaccttttaagactacattatttgacagtcccaatctttgaattgtttgctcaacagcttttctttcagacccttctccatagatttctagtttataatcaggatttatcttactaactgtttggaatgctttgagcaacatgaatagattcttctgaggctctaagcgtgatacagcaactattctcttttccttatggctgttatattccggaatattatttggcaacggattttttataatatatccatgtttctgtacactattagaaaaataatccataatctcagaagtttgaaagactaccgcacttgcataaacaaaattcaattttcgaagaaatctttccattatagacaatttatcatgtaacggatcatttctcatggatgtgatgtatcttacatgatttttaaatgcacaagtccacccgtaatagtgttcaaaagtaatatatgtatcaattttgttatcccgaatatacttacgaattagccgcattcgtgtcagatgctgcttaatacggttgcctgaaatggaagggaatttagtccacaaaatttctttattcaatgtatatgcattgggcacatcaacataggttattaaatgcacctcataaccacgaatatcaaaattattagcaagaatagagatgaccctttctgctccgcctgtagataattgtgatagcacaaataatatttttttcatattggtcttcctctttatatatttactttgaatatcaagcataaaacccataccaataatctgtggttgtcttatgtttaaaccaactatgatgatatgttttattaacccattctcatgcactggaacttaataaagtagcacgacaaaatcctttgtacatcgctcctttgtttaatgataaaacacaccctaatcagttcatgtatgctttattttctttgatatatttcctactgaacaatagtaatctctgtatttttctcccataatacgtatatccaatgatgtatttttcaaagaagtctgtgggaaatctttcactttattactagctctttttaatagctctgacaactcgtcaactttgcccatatgatacaattcaccaacatcttcaagttcatccaatacttctttatgttgtgggatatctgacatgcacagataattgtgcgttgaaaccgcctccaaaaccgccagaggtagtccctcactttcacttgacgacacaaagacatctgagatgttcagcagttccttgatatcgcttcttcttccaaggaatattactgcttttttttgcgcatatcgttctttatattcctcgagatatggaccatttccaaccatcagcagtttggcattcgacaaatctgcgcggataaaagcatctactgtctctggaattctctttctaagggtcatacttcctgtacttataaaaatcagagcatcctctggataacagtactgcttacgcagtacttctttatccataatcggatactcctcgggatctacaccattctgaatcgcggtaactttcaacccttttatatctgcctctgtctgtctctggagtgtcttagaacaagcaatcacatgtttgctcctacgcaacacatgtgtctgcattattgtagccagcatagcctttgagcgattcattctgagaaaagcatcctcccgcagataattgtgcagcgtaataatatgagaaatatcagttccttgaaatgcataatgacatgccatatccgagcgcaaaccgttactattgacaatttggcactgattcttcacgaccgtatgtctcaaccttgcaagctcagaaaacagtttacgcttctcaaaatgtagatgaatcggcctgattcccatttcaatcagtttatcctctatatctgtatcattttccacatccaccaacgtaattacaatgcaattatttaccgcgccagagtgttgaatgatttttactgtctgcaaattactgccaccataggctaaatctgcaaaaacgaaagcaatcttcggcatttcttcatttttgttattagaaacttttatcatatttttctcccagcatttttgaccgaatcattgcaaccgcttttctaaatttattctctccgtctaatacccgaagttcaacttcttgataatcaatcttatttttgataatccatgtgtcaagcaaaaattccgccaaatatccacatgttcttgactcaaattcagttcggcctgaaaaatccactcgcttctctacctcaaataagattggaaacatgaacgagcaaaaactattcacatagtcttttcgcataataaacgtattgaatagatgtgcagacgtactctttgctacattctcaaaggcttttaagtactctggtgatatttctgcaataacggtcctcaataaatcgaaatcactagattcatgcgtatgcttaaaatgttcttcaattgtctcaatataatagtgtcttttctttgcaacaataactggacattttgtcaatagcttttctagctctttcctattaagtatgtatctaaagaatttgtcgtcattatacttcggttttttactaacaaagtatcttctgtaatgacatgaacccatatactctacgttaagatttttccatccccaatagactgcacttaaatcagaatagtatctatgtttatatgaaatattatctcctatattatcgccttgataaccaaaatgttccgatacttcatcataaccaacttggatgggcaaatatagagagacatctttgggcataatatatggtttgtgtgtcgaaaccagtattttaatatccataacattcgccccccttacagtttattttgttcttctcatatattcttgaaaactcatcaaattcaaatccttctcactgacaatcaaattttctttccctccaatcaactcaaaaggccattcaatgccgatatctgagtcattgtacatgataccagaatcgccttcgccatagaatacttccgcgcacttatagctgacaatggagtcctcaatcaccagatagccgtggccgaagaacttgggaaccagcagcatattggtattctcgccagtcaagtgaaagccgcgccactgtccaaaagtcggggaatccgggcgcaaatccacgatgacatcatagacatgaccggaaatacagcgcaccaacttgggctgctgttttaccagttgaaagtgggttgcccgaatcacgccacgcttagaaatggtatagaacacctctttgaggtcatgatcaattccattagccttgaaggtatccacgttatagtccttaatcaaaccgccacggttgtctgtggcatagaagggcttgatgaaatacgcgcccttcaaatctagttcctgaaaatcaaatttctgtaccattatgcttctcctctaacgtactctgctgtcatacgaatgccctctgcaaacggaacctcgttccgatatccggtatccagttcgactttcttcaaatcgaactggtcataggaaatgtccactcccttaaacggaatatctcccaagccaagctctgcctccgggtcaacaatatccctcatctcaagcaagaactcccgcagtggcttcggttctccactaccgatataatagcgattaaacgccttacccttttctgccacagcgatgatggagttgattgcatctgtgatatagataaaatcgtaggtctgatagcctgctgtgaaagagcagtgctccttatgtaccagcttgttgatggaagtgtaaatcatccgtgcggacttctcgcccacgccgtagatgttggtaataatcacaggtatgaactcaatcccattaatcttggctaccgtttcgcccatcaggtgagctgccagcttacctgtgccatagatgtagccaccagcaggctcaatatcgtcagactggaggtactcataggtttccatctcgttgatgctggaagcgtaaaccacccgtttgcatccaatctctccacacagcttgatgtaatcacaagctagcttgacgttattcaactgaacagcatagtctgcccgagcggggccagaggtgccggcccatgctaaatggaagaagcatcgatactcctggtgaggaatttcatccgctagcgtagcaacttccttattcatcacactgacacaagtaactctctcgtcatcctccagtacatcatcaaaccgaatatccagtgccaccacatggtaacccttctcaagcagcgcatttaccaacgtcttgccaataaaaccatttgctccagttacgattacattttccatcatcatttcccatctttcataaacacatctatttctctatccatgtaggcacgaatatctccgccttcgccccaacacttgctccactccactaccatttcaatggcagtatccaaattccagtgagatttccatccaaacgttgtcttcagttttgaacaatccagttttaggaagtttgcctcatggggaccaccgtcatagtggtttacccacttcattccttcgccccacttgctgacaaacaaatccaccagtgcgccggtctggaagcaatccacatcatccggacccacattataatagcctgcatatttaatgtcctgatactgcattgccgcaatcatcaagtatgcatatagtggctccagaacgtgctgataggggcgagtagagaatggattgcgcaccacaatatcctcatgcttcgtagctgctcggatgcagtccggaataattctgtcattggcaaagtcgccgccaccaatcacattgccagcgcgagcagtagaaattgctacatgaccgtctgcaaaaaaactgttcttataactatgtgtcaccagctccgaacaagacttggagttggagtatgggtcaaaaccatccaactcctcgttttcccggtagccccatgcccattccttattcagatacaccttgtccgttgtcacgttcacgaaggatttcacacaactgctgttacgaatacattccagaatgtttaccgtacccatcacattcgtttcatatgtataggcagggtctttgtagctgtcacggacaatgggctgagctgccagatgcaacacaatttcaggctgtaccgcatcaaaagcaaccttcaatgccttataatcacggatatccccaatcacagaattcacatcctgttcaatccctgcgatttcaaacaaagaaggactagtgggcggattcaatgaataacccgtgacaattgctccgacatttgtaaggattttgcacaaccaagaacctttgaaaccggtgtgtccggtgataaacacccttttccctttatagaaactcaagtcaaacttatccattatttctcccacactttccaaggtgcattaccagtttcccatagctcttccaacttctgtttctcccgcaaagtatccatacactgccagaatcccttgtggatatatcctactaattccttctgctcgaccaatttggccagcggacctttttcaaatacagtagcatcgccctcaataagatcaaatagttccggttggaataccataaaaccaatattaataagatctccatcaatatcggatttctcccgaaatgcatcaattacaccgtttgctccagcttctacgacgcccttgttctgtccgaaattgtacatggacatcgtaccaattttcccgtgtgcattatggaactctaccagttctttaatattcacatctcctactgcatctccgtaggtaagcataaagggctcatcaccgatatattcccgaatacgcttcacccgtccaccggtctgggtattcaggccggtatccaccaccgtgaccttccagggctcagtgtgtttgttgtgaacgatcatctcgttgtttccgtttgtataatcaaaagtgatatccgatgtatgcaggaaataatccgcaaaccattctttaattacatgctgcttgtagcctgcgcagatgataaattcgttatagccataggcggcatatattttcatgatgtgccacaaaattggcatactgccaatttcaatcatgggctttggtctaaatgcagactcttcagaaatgcgagttccgaaaccacctgcaagaataactactttcattttaatcccctcatttattgttaatctctctgaaaaatatctctcgtataaaccttatccttcacatcatccagacacttgtcataacggtttgcaataatcgcgttgctcatttccttaaagtgatccagatcattcacaacgacagaaccaaagaaagtatctccatccttcaaagtaggctcataaatgatgaccgttgcacccttggccttgatgcgcttcataacaccctggatagaactctgacggaagttatcgctgttactcttcatggtcagacgatacacacccaccacaacatctttctctttattctcatcccaactgtcatttgctccataggcaccggcaatttccagaacacgatctgcaataaagtcttttcttgttcgattgctctcaacaattgccccgatcaggttttccggcacatcggcgtaatttgccagtagctgtttcgtgtccttgggcagacaatatccgccatatccgaagctaggattattgtaatgagtaccaatacggggatccaggcagacaccgttgatgatctgctgtgtgttcagccccttcatctcagcataagtatccagctcattaaagtagctcacgcgcagagccaaatatgtattagcgaacaacttgactgcctctgcttccgtgaatcccataaacaaagtgtcgatattctctttgatggctccttcctgcagaagctccgcaaaggtgtgtgctgcctttaccagacgggcattctccacatccgtgcccacaatgatacggcttggatacaggttatcgtacagagccttgctctcacgtaaaaactccggactgaagataatgttgtcgcagtgatacttctcacgaacgctggcagtaaatccaaccggaatcgtactcttaattaccatgattgcttccggattatactcaataaccagtttaatcacggcttctactgcactggtatcaaaaaagttcttctttgaatcgtagtttgtaggtgcagcaattaccacaaaatcagcgtcactatatgctttctttgcatcaagcgttgcggttaaatcaagttccttttctgcaagatatttttcaatatagtcatcctgaatcggagatttcttgttgttaatcaattcaactttctccggaatgatgtccacagcagttaccttgtggtgctgactgagaagcgtagcaatggaaaggccaacatatcccgttccagcaacagcaatctttaaatctttaaactctctcattttcctttccctctaattctcttatttataaaactcagcgtaccactcagcgaaattccgcagaccagtccgcagacttgtgctcggcttgtagccgaagtcccgttccagtgcgctggtatctgcataggtcacaggcacatcaccaggctgcatcggaaccagctctttatgagcctcaaagtcataagcttccggtagcaccttagcacgaaccagttcctcactcagaatctgcacgaaatccagcaagttttccggattctgattgccaatgttgtaaacggcatacggcggaatcggcagatcatcctcaccgttcttcttgtctggtgccttcttcatgacacggacaacaccctcgacaatgtcatctacataagtaaaatcacgcttgcagttgccgtagttgaagatcttgatggtttcgcccttcaccagcttattagtaaatccgaagtaagccatatccggacggccagcaggaccatagacagtaaagaaacgcagaccagtggaaggaatattgtacagcttggagtaagcatgagccatcagttcgttagatttcttagtggctgcatacaaagataccgggttatccaccttatcatctgtgctgtacggaacctttttgtttgaaccataaacactggaagaagaagcatataccagatgctccactcctgtctgtccgtcatcataagaatggcgacaggcttcgaggatattaaaaaagccgaccaagttggattccacataggcatccgggttagtgatggaatagcgcacaccagcctgtgccgcaaggttcaccactacagccggtttatacttttcaaacagttctgtaattaatgccttatcagcgatgttgccttttacaaaagtaaatgtgggatacttggccagctcattgagacggaactccttcagagctacatcgtagtaggcattcatgttatcaataccgatcactgcagctgaaggaacttcctcatagattcttttcaccagatttgagccaatgaagccagctgcaccagtgaccaaaattgtcttatttttcaaatttactgtactcatttgtatcttctccacccaattctttccacaaaacaaattccgcaacagagtatgcgcctttgcattcgatgttgcggtcaagttcagtcttttctctgtaagtttttttgataccgtctccctgaagcatgttcttatccttgttcctcaaaccattttaccggtacagaggcttccgatcctatttggaagcctcctacgcaccgttgccctccatgcccagaaacacctataaacaactggcgtcatcaccgacagtcctgcttctgtccggtacaggtaccagatccgtcctgcagcttaacctcttttatttctccgtcttcaaaatccgtgacagttctgccacgttattggacgaatccatagctgcataggttacgatcacttcgccatttccggtttctgtcaccttttcaatcagtaaggaggctgtcacatccccgtcatgggaatcgtaagcggttacgccttccagcagcttatcggtatctgtgccggttgtataggtctgctcggtatccggcagtgtgatgaccggcgctgtccggtccatttgtaagtagaagaatgcgcaaagcgcaattaaagctgcatctgcaataaaaaatccgatggtcagaccttttgtactcattttgcatcctccttttctcccgtgttctgttccggtacagcagtttctgtctcagcagctgtcgcgtcggttttggagcctgcatccagcagcagctcgtcctgtgcttcgtctgcaccatcctgtccgtagccgtaatagctgccatagtaatagccataatattttccataataaggattctttttggtgttgaccttgttcaggacgcatccaagaatccgacagcctaccttgtccagctgttcttttacattctgggcaaatttgtagctgatggctccgctttcgacaacgagtaccgttccatcgcagatcgcacctacaaccgcgccgtcgatgacgctgccaaggggcggggtatctacgatgacataatcgtatttcatgcgcagcacctccagcatatttttaaaggcatcgcctcccagaagctcactggggttgggcggtatcggtcctgcaaaaataatatcgaaattgttgacgttggttctgcagcatacatcgtccagttccatctgtccgctcaggtaatgggacagtccgtatttttcacggtttgctttataacggccccgcagtacggattttcgcaggtctgcgtcaaccaggatcgtcttcttgccgctttctgcaagggacagacataactggaaggaaacgcttgtctttccttcatttggcgtacagctggtcagggaaatcactttgacattttttcctgcaaagctcaaattggtacgcaacgttttataggcttcttttgttctgaaatccagacgctcaatggagcgaattactacgttctgcatatttccctgtcacctcactttccgcttgtcgcctgttttttatattttttctttttcttcttgctgtcagtttcattcagcggaatcatcgcaagggtggaaattccaaggtatttttccacatcctcttccgtctgaatcgtatcgttcatcaggtgggaaaggatgacgatggctgctacaatcaggataccaagcattccgcccagcaccgtgttctttccggcggaggggctcgccttatgggtcggtacgtttgctgtttctacgatattcaccgcttcgatatccataacgttgcggatatgggtcgaggctgtttcacggattgcattagcaattttcattgccgcaatcggattgctgtccgtcaccgcaatggagatcactcgggtgtctgcgggcgtactcactgtaaccttaccgcttaactgctcataacttaacggcatattcaactgctcgatcaccgcttccagtacgaaacggcttttgatcagctccgaatagtccttaaccagctgcgtgcctgcctgcaggtcattgtaggttacatttgcactgctgttgtcctgtttgttcagaatataaatctttgttacagactgatacgtgggcgtcatcagaaatttgcttcccccaaaggccagaagtgctgtaaacagtcccaccgcaatcatcagcggaagctttctccagagtacccaaaaaagttctaccagatcgatttgggtttcctcgttgcttctctggttttgattttccatgtctcgttcccctttttctattcgatatcttccatatctgtattgtccagaatgtgtgctgcgtttttatagagcagacgtgccgcatattccgggctgcagtgtctttgcagccatgaggctccttccgccatcgatacagaccggtctcccactactctgtgggcgtccgttccgatcagatctgcaagctcttcttttatcaggctgcgtgctgtgcgttttagctgtccgcccagcagtcccggcagttctcctgcgttgatctggatccggcatcccatgtcctttaattcttcgacccggttgaaatcctttaccacgttccggtagcgttcggtgtgcgcgacaatcgggcggtagccctcgcagagcaggtcatacaggcaattccggatgtacgcccattcttcgtccggtgaaaattctgtcagaatataatctgatccggcaagggttcccgccttgccctgttttaacagctcgatggtatccatgcagcaaaaaatctcaccgccgctgtaaagtctgatgtcgattccgttttccttcgcagcctgctgcagcttctgtgtccgttccaatgcggaagcagcggtaatgctgcgtctgttcggtttctgatgcggagtcaggataactgctgcaacgccctgttttacttcctggcgcagcatcgtcaggctctcttccagattcctcgcgccgtcatccacctccggcaaaatatgacagtgaatatctatgtactgatttttcttctccggcatctcaggcctcacttccggagttttttttgctgtccgagctgctttttacggtctccggtactgtctcgcattctgatgcagcttccgcctgtgctgcccgaagtccgtcggcaaacagccacagcatccgcaggcagtaatcctgtatactctgaggcatcccgttgagtccgcgcatcagctgttcttcctgactgactgcggattttttctctttctcgccataaatcagcgtatccagactcactccatacaagcgggacaggttaattagtgtttccacactcatgccgcaggttccccgctcgatatccgcataatatttattgacgacaccgagccgttctgccaccagctctctgctccagccgagctcaagcctccgacagcgcagccgctctccggcagcgatccggtcatatgccggcttctcctgctttctcttcatcttgtcccccacttgtttctttctgttcatcctaacgtatttctactctaacaattatgttttttgtcgaaattacaaacttc

SEQ ID NO: 1073 - DNA, 6260 bp, unidentified
  source 1..6260: mol_type = unassigned DNA
ttacttcgcagccttggcggccttgatggcctcgatcagcatgggggtgaccttgaacaggtcgccgcagatgccgtagtcggcaatctcgaagatgggcgcagtgtcgttcttgttcaccgcgatgatgcactcggagtcctgcataccggccttgtgctgaatggcgccggagatgcccagggcgatgtacaccttcggatgcaccgtcttgccggtctggcccacctgatggtcggcagacagccagccggagtcgatggtggcacgggagccgcccacgacgccacccaggacgtccgccagctcctcagccagcttgatgccgccctcgacatccttgctgatgccgcggcccacagacacgatgtagtccgcgccgatcaggtccaccagcttcttggcggccttcacgacctccacaacctcggtgttcaggtcgctctcgctcagctggaagctgggcttcacgatctcgcacgcatccgccttggcctggtcgaagacgttcttcttcatcacgccggggcgcaccgtcgccatgcagggacggaaccgcgggcagatgatggtggccatcaggtggccgccgaaagccggacgggtcatcttcaggttccggtcctccatatcccacttctggctgtccacgtccagggtgctggactcacgcaggaactggatgtagttcgccacatccacgtccaggtgggtgcagtcggcgcacaggccggtatgcagacgggccgcacagcggggacccaggtcacggccgatgttggtggcgccgatcaggaacgcctcgggcttcagatcctcgatcacgtcgcagatgaccttggcataggcatcggtgttgtagacggccagcagggggctctcgcacaccagcaccttgtcggcgccgtagccgcccagctccttggcggcggactcgatgccctcgccgcccagcagcaggccgcacaggttcacgcccagctcgtcggccaggtcgcggcccttggagatcagctcaaagtcggtgggcatcagtttgccctcgcgctgctcgcagaagacccacacatccttgaaagcagcgatatcagcgctattgaaattggacattgttcaaatactcccttctcagatgatgtgcttggcggccagaatggaagccagctcctcgcaggtctctttgccggcaccctccagcatcttgccggcgcccttctggggcggggtgaagctcttgaagatgttggtgggagagcccttcaggccgatggtggtggcgtcgatcaggggatcgtccttcagcgcctcatagtcgtaggtggtcatgggcttgccgtaagcctcgaacacaccgcccacgctcatgtagcggggatcgttcagctccttgatgcaggtgatcagacagggagtcttgaccttgatggtcatgtagccgtcctccagcatccgcttgacggtgatggtgtcgccgtccttctggatgtcggcggcgtaggtcacctggggcagatgcagcttctcggcaatctggggacccacctgggcagtgtcgccatcgatggcctgccggccgcacatgacgatgtcgtcagcctctacgccgatcttgttgatggcggcagccaggatctgagaagtggcgtatgtatcggaaccgccgaactcgcgggcggacaccagcacggcctcgtcagcgcccatagccagtgcctcgcggagcataccggcagcgggaggcggacccatggtcaccacaacaaccttgcagccggtggcgtccttgatcttcagggccgcctccagggcgttcatatcgtcggggttggtgatggtctgcatggacgcacggttcagggtgccgtccggattcaccgccaccttaccggaggtgtcgggaacctgcttgatggaaacaatgattttcatgttaacctttacctcctattttacttcacgcccaggcggctggaaataaccatccgctggacttcgctggtaccctcgtagatctcggtgatcttggcgtcgcgcatcatgcgctccacgggatactcgcgggtgtagccgtagccgccgaacagctggacggcgcggcgcgtgacatcggaggcagcctcagcggcgaacagcttcgccatggaggcgtccatggaatagtcctcgtgattctgcttcttcatggcagcagcatacaccaggtactgagcagcctgcatccgggtgtgcatgtcggccagctggaactgagtgttctggaactggctcaggcgcttgccgaactggacacgctcctgcgtgtacttgacagcctcgttgacagcgccctcgcccaggcccagggcctgcgcggcgatgccgatccggccgccgtccagggtctgcatggcgatcttgaagcccttgccctctttgcccagcagattctccttgggaacgatgcagtcctcaaagatcaggtcgcaggtggaggagccgcggatgcccatcttcttctcgtgcttgccggtggagaagccggggaagtccttctccacgatgaaggcagagatgccgtggttgcccttggacttgtcagtcatggcgaacaccacaaaggtatcggccacgttgccgttggtgatgaagcacttggagccgttgaggacgtagtggtcgccctccagcaccgccagggtctgctggccggaggcgtcggtgccggcgttgggctcggtcaggccgaaggcaccgatcttcttgccggagagcaggtcgggcagatacttccgcttctgctcctcggtgccgtgctcaaagatgggggcgcagcacagggaagtgtgggcagaaacgataacagcagtggtgccgcagaccttggccagctcctccacgcacatggcgtaggacagaacgtcgccgccggcgccgccgtactccttggggaagtaaatacccatcatccccagcttggccatcttttcgacggtctccatggggaaccgctcctcttcgtcgatctcctcagccagaggcttcacttcgttctcggcgaattcacggtacatcttccggagcatctgctgctcgtttgtcagatgaaaatccatataccattaactccttttcttgttggtgctgacttcaattacttggaataatcatagaagcccttgccggtcttcttgcccagcaggccgccgcggaccatcttgcgcagcagcagcgcgggacggtacttggagtcgccagtctcattgtacagggtctccataatggccaagcacacgtccaggccgatgaagtcgcccagagccagggggcccatgggatggttggcgcccagctgcatggccttgtcgatgtcggccacggaggcgacgccggtctctaccaggccgatggcctcatttatcatggggatcaggatcttgttgaccacgaaaccgggggcctcagccacttcgacgggctccttgccgatctcctgggacagcttatagacgaaatcgaaggtctcctgggtggtgttggcgccgcggatgatctccaccagcttcatgctgggcacgggattgaagaagtgcataccgatgacggggtgcttcagaccgttgcccatctcggtgatagacagagaagaggtgttggaggcgaagatggcctcgggcttgcacaggctgtccagctcattcagcagctccttcttggtagccatgtcttccttgacgcactcgatgatgagatccgcgtcggcgcaggcggacttctcctccaccagcacgttggccagcagggcgtccacagcctcctgggtcatcttgcccttctccacccgcttctgcagggaagcagccagcttatccttgtgcttctgcgcggaagcgacggagctggcatacatcagggcggtgtggccctttgccgcgaaaacctgcgcaatgccgctgcccatggtacctgcgccaaaaactgcaaccttcatgatttttcctcctgttatttttgaataaattgtttggtttccttgtttcatgcctttcggcactccagggggccgggctgtgccgcccctccgggagaacacagagtcattccgatattgccaatttactcacaaactttattatagggtgactggcggcatttatcaagtataatttgtgcagtttgcgaaaaatttcacgttttttacacttcatacaaattgttcgttaaactttatacaattttgttaatgcattcacaaggcccttcgttccagttgtatctgccggaaatctcacagcctctcggccgcctcgcaccggagccaaaatgccaggatctcctccttagccgcctccgcccgggaaagaatggcagggtgcccaccggatgcaaacaagcgcacggcggcatggggcatctgcgccgccatcgccttgtattcctcttccaaatcctgtctgcacatggggtcctcccggctccccatcaggagcactggcggccgcatctgctccagcgggccgcagaacagcggccgtccggaggcggcgcatcgcaacagggcatccgtgtcccggtccaccaccgcctcccagtccggtccctggcaccatgcataaaattcccgggctgcctcgtctcttttggcgcggtcccgctctgctgtcaaatcccgcgcaaaccccgggtgaaggctccgcccgtcaaagctgtccgccactacggcgcctactgcgccgggtgccagcagagccgcgttcatggcggcccaggcgccgccgctggttcccagcagacagggcctctcatagcccgccgcccggatcagggccagggcctgccgggcctcttcctgccacaggtccgccggaaacgactccacccggtcggagcgcccgtttcccagaaagtccagcagcacacaccggaaatgaggcgtatagagtggaagcaacggctcaaacagccgggatgaggcggtattgccatggagaaaaatcaggaccgggccctcgcccgcctcctgataaaacatgcttctgccgcagtagggcaccttgggcacatcgctcccccctcccatttgggctatcatatcatctctttgctttccgcgcaagcaggaaatccacgctgccatttacagcgccgggtctgtatggtacaatagcattctgaatgtacggaggactccccggcggggtcttcctgaaatcggatcgggaaccgacccaggaggatgttgacacatgcggatgcgaaagaaaaagaatctgatcccccggatggagcgctgcggcgaccgcctgatccgggagccctactccatgccgggcaagtggcgggagctgatgccccaggcccgggagctgcggctggagctgggctgcggcaagggccgcttcaccgccggcacagcggcggcggagccggacgtgctgttcatcgctgtggagcgggtgccggatgccatggtcatggccatggagcggtgtgcggcccaggggctcaccaacgtgttcttcatcgacgccaatgctgaccagctgcccctgttctttgccccgggagaggcggaccgggtctatatcaatttctgcgatccctggcccagcaaccgccacgccaagcgccgcctgacccacggcaacttcctgcggctgtaccgccaggtgctgaagatgggcgggcagatccacttcaagacggacaatcaggacctcttcaccttctccgtggaggagctgcctctgttcggctttgagctgtccgaggtcacccgggacctccatgcgaatggcccggtgggcgtcatgacggactacgaggccaagttccatgagcaggggctgcccatctgtcggtgtgtggccaccatggttccctgggaggaacccttccccaccgacattcggcgggtgaagaaccgctggctggacgtttttgccgacggcgtgtccgacgcggagttggggaggcatgtgctgtcggatgggaattacctgtggcatctcttctcctggaacctggtgccctgcctgtccggcgacgcggcccggcaggctctgtcggaggcatccggtaagaaatacctcttttattatgaagagccgccggagggtgagcctctggtgcggccggtgacggcggaggagctggttaccctgcccgcagatgcacgcgccattcccggagcggactggtatgtggtagacaaggatttcacctggacgtttgcgcagacccatgaggcggactgcgggccgtacttctgtcggaaagcctga

SEQ ID NO: 1074 - DNA, 17665 bp, unidentified
  source 1..17665: mol_type = unassigned DNA
tcacctcttcgtctgaatcccatacaggtccattttctcgtacagcgtgctccggcttatgcccagcagtctggcggcctctttccgattatgcccggccttttccaaagcctggcatatccgcttcttttccatgcattcccctttcaaggcaatgtcaggatcggaaggctttccggactcatccaagttcaattcttccgccgtcaccaattccccttgggcaaaaagcacggcggattggaccgcctgtttcagttcccgtacgtttcccggccagtcatgggccagcaaccgtttcttcgcctccgcatcgaaaccttttacctgtctgccatgctcttggttgtaaagttcccggaagaattcagcaagcggcaggatgtcttccgggcattccctgagcgggggtactttcacggtgtactcactcaatcggaaatacaggtcccggcggaaacgcctttccgatatggcttcttccagattctcgttcgttgcggtgatgatgcgcacgttggctttcctgtcttttgtgccgccgacaggacggtaacgcctgtcctgtatggcgcagagcagcatctgctgtacgccgaggggaaggttgcctatctcatccaggaacaacgttcctccctcggcttccgaccaatagccttccttgcgcccgaccgccccggtaaaagcccctttttcatgcccaaacaaggcggaagcggccagactttcggataacagcccgcagtccactgtcacgaacggtttgtccgcacggtcgctttgggcatgtatcttttcagcgatatgtttctttcctgtaccgttctcaccccgaaccatcacgcagatgtcggctttggctaggacgtggagacgtccgaatactttctggtaggcttcgctctcccttatgaacaggggttcctcatggaatgactgccttttctgcaagtcttggagcatggcgggaagctggctggtcagcagtttcttggggatatagtcttccgctccggatttcatggaacgcacggcggtaggcacttccgcataatccgtcatgatgacgtagggattgtgcttcccctcgcggcgcagttcttcaagcaacaggatgccgtcaccgtcaggcaaccggaggtcggcaagcacgatgtcgtcatcttccagcattgaaaacagtttccgggcaccggtgcaatcggaggtactgactgtccggtatccgttttcttccaaaaaattgcagacatacctgctgtacacaaggttgtcttccactacgattatctttcccatttcttcatctcctttctggcggcttctatgatggtttctccttgttccaacacggcacgggctgcataggcgacttcttcgtccgagtacggttccttgtggatggcttcgtgcaacttctgcaaggggcgttccgtccgtatcaccatccatgagctcctcaaatggtgtacccagctgttcaaggctgtcaagtctttcctttcggatgccttccggacttcctctatctctttctccgtttcggcaatcagctgctccaatgttttccgcttgtcgccgaaagccaacagggcggagaagtccggctgccggttccctctttcacggatgcagtgccgtgtcgcctccatcagttcgtctatggaaaacggcttgggaagcaatccggaaaatccggcttctttcagttcctcctccgatacatagccggccgcagtagctgccacgatgggaagttcacgggaattgccgatgtcggacatgcgcagcagttccagaatctcgtagccgttcgcttccggcattctcaagtctgttatcaacaggtcataatccttgctccgtatcctgtcggtcagctcggccaacgtaaggcagttgtcgcatgaaacgccacattgaaggtacatctcgcgcatcaggcggagcgtcaccgggtcgttgtctatggccagcacggaacatccggccagtgaaggacggacatccattgacttctcttcttccggtacttcttcggctttcggcagcggcaggacaacggtgaagcggcttcctatgccaggtttgctctgtacggaagcagaaccctgcatcagctgtacgagattggtcacaatggcaaggcccagcccgaagccgtcctgagtcacagcattgcccagacgttcgaagggggcgaaaatctgttcctgcttttcttccgggatgcccgtcccggtatcctgcacgtacaggatgaagttgccgtccttatagtccgtgcagagtgtaatgcgaccgctgcgggtaaacttgaccgcattggagagcaggttgcttccgatgcgcaatatgcgctccttatcgcctcccagcacttctgtcgtctggttgtcagtcacgaattcgattcctttggcttcagccaaaggggcgaactccgtttccaacacagttgctattgactcggagcggaatggacggatatgcagcttttctttatggatctccagcctgaaaaattccagcagctcggtggtcatggaagccatgcggctggcagattcacgcacggttaatatgtggcgtacccggtcttccagggcttcatcccggagcaggagttctgcattgccgcttatcgccgtcagggccgtgcgcatttcatggctgacagtctgcatcaggttgtgacggaattgcagcaattgccggttcttctcattgctcgcctgcaattcgccgataagttcttcgcgtttctttttttcgccatgattgcggcggatttcccggtggatggcgatgtggaacaggattaaaaggaggatggcggtggacaaggtagaggtgagcaggagcgtggaacggctttgcgcttccattatcttatgctcacgctgaaagaaggcttcctgcacttgcctgtccagattcttgatgaggtggttcagccgggcgttcaatgccagattgcgggcgtacaggctgtcggcactggtttccatatcctccgtcccttcctgctgcatggcaatcaggctgtcactgaatgcgtgcagttctccggcggaaggcaaaacccggacggttttcttggcgcccaacgctcccagtatattgtcccttcttttcctcacggtgcgtatgcgggtggcacgttccgccactttgggcagatggtggacaagcagactgtcagcagcatcctgtatcccgatggcttccacgacacggaacaagtgcatttccttgtcggcaagcaggtgccggagcgtgtctatctgttcgggacgtacatgctgcctgcaccggggcttcaaggccagcagcaggctgtctgtggacagccgtttctggcgatagtttgccgtatctgcattttcttggctgatcaggctctcgcccagcagggaaagctcggtgatgtgaaggtgtgcggcatggatgtcattccgtaccgattgcaggtcatgcacttcgaaatctatctcccgcatccggctacgctcacgaaagaggataaccaccattccgactatggcggccagcaacaggaagttcccggcatatatcttttgtgtcaaggatactttcattgctagtcatattatccgtagtgcattctctcatcagaatgtgctacctcgtttatgggcaaaaatagaaattatcaaccacaatccatgcgaccggttcagagtttatgaataattatttttttagaacgattcaaaacaaattgagccgcaccatgacgggtgtttgattgtaaaatagtcattgggattatgcaagcgtaacgcaggcatccgaacgaacggatattacaacatccggcaagagtgcagacaatgcaaaatgcacagagagtctgatagacaatgcaactacttgcatacaggtacaacaaaacaatggcgactacaacatttgggttcatagttgcagtcgccatttcacatgcaaaggttgtacctgtggttcccgaaaacttacgatttctttcctgcttcggatacagctacaaaaatagccgtcctgattccgggcggctattataactacttgcaggtaattgcagacagtgctttttaatatatctgtctacaaggtgagaaacaacaatcaattgtcactcgtccctccattatggtttctgttgtaagaggttgtcacgactgccacatcaccgtattgtcttccactgacggaacggttcaatgcggagacggtcaaagtggtcacttgttgagtacctgccacgtgcaaggccgtaccgacgggcaaggtcacattgatggggtaagttcccgtagccgtagtgacacctgcgccggcaatgcgggccagaatctcaatcaggtaagcggttatccgactggtcccggacgaagtgatttccgttccgatgtgataagtgaacgaggccgaaccaacggtcatgtcacccgatccatacaggttgtcccacaggtcttgttcaaaggccaacggcgtgcttgtggaggaagaagtcacatccgctccaaagagcaacgtataggaagtgaactggtcggcaaacacgattacttgtccgccttctacagtatattctgcatccacccattgcccgttcacgtatttctgtgccgtgatggattgcgccacttccgcatccacatcgtaagccaattcgatgggacttgaaagcgtggcgttcgcatcggtgcaagccacgcttgtaccaatcagcatgacgctttcggcagcacgggaagtggcacgggtattggcttcggcttcatccagcgtgtaaagcggggtaaccacgatggaacttcccgcaggcaattccgccgtctcgggtacggtgacagccactgtgaccgcgccctcgtcattgccttcgatggtctctgaagtcacgttggcctccgtatcgccgttggcggctacttcaatggtcgtgccttcattgggcaatgacacgttccatacgacattggctccgcttccgctttctgcaacggtgacggttgtttccttggactgtttccccggagcggaagccgtcagggtataacttccggcatccacatcgtcaaaagtgaacgtgccatctgcgccggtctgtgtcgattcgccgttcatgctcacggtagccgaaaggccgttgccgtccatgccggtgacacgcccgctgatactgtgcgatacggacaccgtgggcggcgtcacgttgctgtaatccggatcatcgtcactgcaccctacgaaactggtgcacaaagccacactaaggaatgcgaacattccccatcttgatagatttctaagattttccatttctaaaaataattaaacgattaaattaggttattttgaaattctgtattctagtagttatatccgtattgtttgtgtcttcaatcagggtgggtcttgcccaacaggtttaacttgaaacacaggccacctgtgaaatgtttcccattctgcaaggttgcctgcaaaaagaggtgtttccacaacaaacagtctgcgccgatgttgatatcgtcaccggtatattctatcgttgcccgaaggtttctggcaaaggacgggcgataggtgataccggcggctatgccccgccatttggcattgaaatccgatgtaaaatagcggtaggtcaaatgaaaaccaaattcattccgcctgtacatgacgtgtttgctggcggctatataataattctggaagtagtcgttgaccggatatttgccttcggcataggactcgttcaccttgctgccgggatcctgggtgcctatggcaattgcaggccaccatttgccttctttcagcggacgcactttcaggtgaaagtaccggtctttcttattatgtccgacatggccatcgttgtcaatccccttcagtatggtacagacatacgctatttctatccaagggaagggggtgatggccagaaaatggttggtcgtgttgaatttctctccttcatactggtaggtgtcaggaagaaattcctgattcaggaagaagaaaccgatacgggcttctccctctgtcgccatttccgccgtgggcacgtggatcatgccggtaacgcccgaatactcttgcgccctcaatatcggaatgcagcccatcacgacaaggaggccaatcaataatcttctcatttccgccctccttccttttccgagaagtccggcttcatggtgttgctgccccattgcagggcattgcggtcaaaccagccctcgcgttcgttctcctccgggtcggtcgtgtacattttgttggcataggcgtcaccttccatactgtatgtcaggcggaaattagaagccggacggaaattgacagtgcgccgtttccgcttgtaaggcggtatcatcatcaccaccttaaaaccggcattcttgccgccctcgttgctatactcgccgtacaatccgaccgtacagtggttgaaatgccgcatggcttcaactatggctccataatcttcatagaggaaacgtccgccccttgcgcggaactgcgtattccatttgttcagatagacatcggtgcccagcaaggcggtaatccgtttgggggtacttgcttcccagtccactgccattgaacaatagccggttaatccagcctgcacttccaatgccaaccagcggtttacgacatacatccctttcaagtccaatccataccgctccctgccgaacaagccgccgcttgctttcaggaaccaccgggatcgccaatgcgcctctttagataacaccgccatgttcaaccgtactttcttgtatcggtcgccatagtcgttatacaccggcactaatgcctgtgctgccgcctgccaccccttgcccatgttccatttcacaccgggagtcagattcagcaaaatctcatatattttcccattgtgaaacaaatcccggtagttgaaatccgcccctacaaatatatctacctgaccagcgggtatggacggctgtgcaattatggatgaatacccataaaagaccagcatgaatagcaaaatgaacagtttcttgcttattctctcgtaagctttcattttttcatatacgctcgtaattgttttattgttaattgatgtcatagttcatatcccggtcatctttcatctgataccttttaccacattttctacgaaacgcaagtttctcttcatccttttaacccaatgtgagccatcctgattttactctaagatggctcacattgaaacgacactcgcacaaagtgcctttcagtctttcaccagaaaagaggtgaaaggtttatttttcccaatcatttattcacactttcattagtccaaatataatccttcatgataaaactttgttttagcttccaccttaggtcagtttacaaggaactacacgcagaccgtgaaacgggctgctgacaacaaacggcggtatgctcccggagagggcagcataccgcctgttttgttgtctagggtttccaaaggggtgccccctttggcacacgactttgcttgcaaagtgtagtgtgttatacctgctggcgtggctgacagaggaaacggggtgcggtgcttcttgcaccccgtttgctccggcaggaaaacaggctgaatttttgcgaatgggaatgagcaaaaaatcggcctgttttcagagaacggcggcaggtatatgaaagcccccgtccctcgtccttcgctccgacttgtggacaaagtgtcccgaagtgtggccacactcccggaaaagtagcaggacagcaggcaaccgtcaaggctgaaatgaacgggtttgcacccggccttgaccgccgcccgccgttccgctgaatgggtgaacaaggcggccaatcctcaaagtgcttgaccgctctctttttgattttggagcatttcttttcccaaaattgaaatgggcggggaaaccattttagggctttcccgccttgattaccctttagcaaagacgggcggggctgtcaacggcggcgcatgaaatgcgccgttcatcttgaccgttgactggctcggctggctttgctatttttatcgaattgcatattggtaaattgcattgatatgtacttgggttgtattcacgattggcacattaacatcttcgggctttatggcaagtggcagctccgtacaggcgagaatgagtgcatctacattttctttttcaatgtatttatttgccagtgcaatcattttctctttatcactaggaattactatgccattctctaaattggggtatatcagttttcctaatagagatattattttttcgctatcgcctttacaagtaacatcatcgggcggcgaagttcatcttccatacccggaatatccatcatctctttaggcggttctgcttcctctacaactttaagctcaaacccattgttcagcaatcccattataatctgtgtaagtgtgtgatgttgttttactacatcacatcctaaaaaatgtgtatttcgttctcctgttataaagtaattatcaatcgcccaatattgcggtttcccatcatctgtataaatccaatcctgcccaactcctgcggtaaaaacagggtgttcgatattaaaaagaaaaattccacctggttttaatgtcctatacactttttgaaatatttccactatgtcctctatatagtgcagagctaaattagatataacacaatcccattcattttctggatagtcatattcctctaatccgctaatacgatattcaatttgatttcctgaattgcgcttttgggcttcctcaatcattttcttacttaaatcgatccctaatatttttgtagctccttgttcttctgcgaacttgcagtgccagccatatccgcaccccaagtcaagaacagattttccttctaacgaaggaaacaaaggttttaattgatgccattcaccagcagcttttaacccctctttatcaatgacaataacattcccttgtgtttcttcaagaattgctgatcgcaaactcgttttccctgaccctggttgcccaccaagtaaaaaagcggttggcgattcaaccgctttttttccttgaaccaattcttctaaattatcatttaagcgattttcaaattgtttgtcagtaaaattgactatatttgccatattaagccactttctctttattcaaaacttgttttgaatagcgattcattgaccgccaatactcatgaacggcttgtaattcttctaaagaataatcaaaaagatttacacgttttgcaagctttaattggtttaataaattgacttccaataattgagagtcatttttatttaattcatgattcaaaacatagtttaatactcgattataaacgcttgccgataattcgttaatgatctctatttcaaatgttttttcataagtaactgccatttcattttcactccttttaaagtttgtcaggtaaatatttccgaatatattcttctaaggctttatccataacttcttttacgtttccgccattctttgctgtttcgatttttataatatggtgcaagtcagcacgaacacgaaccgtcttatcccccataatatctttttttgcactgattggtgtatcatttcgttttgctttttgtgcgcctaaatttcccacaaccactcacttctttctatttcttcttactcttattttatcatcaacaatcacaaatcacaagtgatttgtgattaatcacttgtgatttgtgattctattctttttcgttttctaattgaatgattcgctcaagcatttcaaaaaatacgttctcatacatagataaaatcaatatatcccttttctccgatttttacaacggcattgtaggactttctatctttcgttttgattccttttaccagggtttcttttccctctagtaattcttttacatttgttttggtgagttttttctttctaaaatgttcagctaaagtgaaggtacattcaggataatttgaacaaccataaaacgatttttttaatacaatattgttgccacacttaggacattttcctacaaggggtcccgagcgcttagtgggaatttgtaccccttatcgatacaaattccccgtaggcgctagggacctctttagctccttggaagctgtcagtagtatacctaataatttatctacattccctttagtaacgtgtaactttccaaatttacaaaagcgactcatagaattatttcctcccgttaaataatagataactattaaaaatagacaatacttgctcataagtaacggtacttaaattgtttactttggcgtgtttcattgcttgatgaaactgatttttagtaaacagttgacgatattctcgattgacccattttgaaacaaagtacgtatatagcttccaatatttatctggaacatctgtggtatggcgggtaagttttattaagacactgtttacttttggtttaggatgaaagcattccgctggcagcttaagcaattgctgaatcgagacttgagtgtgcaagagcaaccctagtgttcggtgaatatccaaggtacccttgtagaatccttctgcaacaatcagatagatgtcagacgcatggctttcaaaaaccacttttttaataatttgtgtgcttaaatggtaaggaatactcccaacaattttatacctctgtttgttagggaattgaaactgtagaatatcttggtgaattaaagtgacacgagtattcagttttaatttttctgacgataagttgaatagatgactgtctaattcaatagacgttacctgtttacttattttagccagtttcgtcgttaaatgccctttacctgttccaatttcgtaaacggtatcggtttcttttaaattcaattgttttattatttggttgagtactttttcactcgttaaaaagttttgagaatattttatatttttgttcatgtaatcactccttcttaattacaaatttttagcatctaatttaacttcaatagactaataacaatgtttggtcttgcttcactttgtgcttgtcggaagcctaaatagtaactgcgttttgcttcgtgtccgtctggcaaccgctcaaattgttcatcaagttctgatacaccttcttcgttatagcgtggatcaaattcttctaaaaagtctgcttcctctacaactttaagctcaaacccattgttcagcaatcccattataatctgtgtaagtgtgtgatgttgttttactacatcacatcctaaaaaatgtgtatttcgttctcctgttataaagtaattatcaatcgcccaatattgcggtttcccatcatctgtataaatccaatcctgcccaactcctgcggtaaaaacagggtgttcgatattaaaaagaaaaattccacctggttttaatgtcctatacactttttgaaatatttccactatgtcctctatatagtgcagagctaaattagatataacacaatcccattcattttctggatagtcatattcctctaatccgctaatacgatattcaatttgatttcctgaattgcgcttttgggcttcctcaatcattttcttacttaaatcgatccctaatatttttgtagctccttgttcttctgcgaacttgcagtgccagccatatccgcaccccaagtcaagaacagattttccttctaacgaaggaaacaaaggttttaattgatgccattcaccagcagcttttaacccctctttactgcgggacatctttgcatattcttcaaaaaacttctcattatcgtattcattattcataaccttaacatctcctattttatccttcggcaccgccgcctccaggcggctccccaacttcatctgctcgataaatgggaattgcaccaaaacaatctaagacaacaatgctgccctacttgcgattttttcttgtactgcggaaacagtttcttgaatggaataattggtcgtatctacaacattcgattcatatattcccagattgcaaaattgctcccacattgtttctaccaattcgatatttgtttttcggtctaactttgagcgttcaacagcccgctttaaggtttcttccttacttgcccttaaaataatataatgcacctcataatgttcccgaacaagactttgccacggctttaaaaaccacggtccgataataccgtcaacaattacatcatatcccccacgagcatatcgcttcgcagcttctaaaaacgcttcaatgacaatcaaattttgctcatttgattctggcaaatgcggtggtattgcccctttactcaaataatgataaaagtcatctgtgtgcatatgcacagacttttccaaatctgattcttttgcaacagcagatgccgttgtagtttttcctgtccccggcgcacctgtgattacaataattctaccttgattcatctatattttacctccacaaattccgatttgttgataactcattatatcataaatttatccactatatcataaatctatccacttttcaatctatatcacgcaattaacttggaaaggaacaccgccgagcaatgggttatctcggcggtcactcttttactcgttgtccgctccatacgataccgacgacggaattccgttatcatttagatttttctcgatatccttcaccggaagtgaggaaaaatacgcttctcttccctcttttattataagctcgtggcacggcttgtttccggcgttgtcgggaatgcgcgcgtccattatgttcacggctatcatctcgggagtaatggcggctctccctccggcttgacctacgcacaccaccgcgtcgggtctgtattgctccaccgcttttttaagaacctctcctgcctttccaaacaccgtcggcacttcgagctttaaaatttccgcgccttgtatttcgtttttcatcatttttacggcttctcccgcaggattgattttctctcccccgaacgggtcaaagcctgtgaacagtattctcattttatcatgcctttctttgtctgtattctctcaaaatctcgcggcacctgttttgaagccactctgttgtctcagtatcgttttcgacagcgttttcgtatatttccgtcagccctatccgcagctcatagcataaaattcgctcggtatatctcggcaggtgagagtattttctctcccaatacgccgcagttttttccatgcacatgagccatgtccgccaaaaatacgcggtcgcgatgtcgtaaagaaagtccccgtaagccgcgcagtcccagtctataacgccacttatcctcgattttttgcctacgataacattattcgagccgaaatccccgtggaacagcgctctttcttccgggcaataagatataagctcacgatatgccgcgagaagctcgtcgatgagtgagaggttaacatagctcctgcttaccgccgtccagtctctctcgaatacctccgcaagatattctctccagctgtaaaacggagcgtttcccgtatcgctgtcaaacacgccgcagccggaagtgcctgatatatcggttcgcgatattgcttcggttacatccgtaatatcgccgagcagtcgcacaaccgtttcttcatcggagtcctcatatgtaatcccgtccgcttttacgctgatgcagaagtagtgcgtgccgtcaaagttgcctgtttcaacaacctctggaataggaactctatccgagcggaagtgctcataggcgtatttgtcttttttgaagccttccatatttgaatttatgcgcacgacatattctctgccgccacgcgaaaaccaatacgcctgtgactcctgcccttcttttatcggaaaaagccttatatcctcaccgtactttcggcttaaaaactctgtgatgctttcttttgaataatcgcttttcatgttccgctctctcctttagctctgtctgaggataatataccacaaaaaagcaaaaaaatctaagacaacaacgctgccctacttgcgattttttcttgtactgcggaaacagtttcttgaatggaataagtggtcgtatctataacattcgattcatatattcccagattgcaaaattgctcccacatggtttctactaattcaacatttgtttttctgtctaattttgagcgctccacagctcgcttcatagtttcttctttactggcccttaaaacaatatagtgtacttcataatcttctcgaacaagggctctccatggttctaaaaaccacggccctacaattccatctacaattacatcatatccaccgcgggcatagcgctttgcagcttctaaaaaggcttcaataacaactaaattttgttcgttggactctggtaaatgcggcggtattgctcctttgcttaaataatggaaaaagtcgtctgtgtgcatatgcacagatttatccatgttcgattcttttgcgacaatcgacgcaattgttgtctttcctgttcccggcgaacctgtaatcacaataattcttccttggttcattttcactcctcctatttcgatttgctgttctctatttctttttccgtccccgctgtgggtttggatttttcggcaagtccaacttctccgcaatctattttagccgcttcttttcttcttcaaacagtttattataccccaaaaccataaatcagcaaacgcaaaaaccgttaccaaagaaaatgccgcctgccttttttgctaaacctaaagaggctaagttagaagtggacgcactatacaaaggaatactaccatttcgtctaactgcttctgcccattctgcaagtgtgtggaatgcatacccttttcttctgtaaagttcagccgtttcaattcccgcttcctctgcctcaagaataatccgaacactacgacaaatagatacgacttgagaatcttccaaataagcagcgcaaaagggaacatccagcaactcttcaggtagccagggaaaatagtggctcatctgaggctcaatgttgtctttagtgagtaagcaggcttttaactttggctgttcaggaagccaaaaacaagcatcttctgaaatcttactttctcctaatagttgccgatattctttatcataaataggtgattcattcggcagcatcagtactggctctctgttggtaattgattgtagtttttctcttaattctttcggtacgtcagcgcgaaaataagcatgtggtttttcgtaaagtggtcttgtcaaatagaagcggggagccggctgtgaagtggagtcccatggttcccttatagtcataagttcgttcttttcattcattgtaaacagtgcttctacatgaagctgcatatagtacgagttgctttttcccattttctaatattctcctacatttatttctctgcctgttcaatcattttctttactaaccgctgaaacaggtcggcggtttcctcgtccatcggtgcaagctgtccgatctgtccggctatcatcgccgttacatcgtcaatggaaagcggtttttgtttctgttccgccagtgcgtcccgcatggcttggaacatagcggcggtcacagcttcccccggctgttccccgttgtcaatatctttcttaatatcccgcaggatagccaggatttgttgctcgatgccagggctttcaatgcccgagttggccggaagcagctggttcttgctggtggaattggtgaggtaattgcggatataccgtgccatggaaagctgcgtgttcaatgccagaatttgcgcattggtctcgctgctctgttccatatacatgctggcagcggcctgtacatcgggcagaaggtgttcgctcttgtaagaggagatgttttcatccacattgccaagttcctgctcaatcacaccgagacggtcactaatgaaagccgaggtactaactgcgatttgattcttgtcctttatccagttctcattgtaaacggctatcaccgtattcagcacatcctccgcccgttggatgcacacgtctttgaatgacagattgatgacagtggatttctcatcactcaacgtaactgacaagttggaagcatagtcgcctgtggcatcttggtatcctctgcgtgagacataaacaggtgaatcatgggtggcggaatcgttcgcaacctttacaacaagttttccgataggggcgtcaactgtgtcattcaacacagccgttatctttcctgccacatcttcaccattacgagaaaaatccgtcagaagtacttggccatcaagaccggggttaatggtaaaagccacgctctcgttgtcttgcaattcgttaaagtctaccgtgtaggggcaatctcgaccatacaagactttcttgtaaaaccctccgtccgtgtgataactgatgtccaaatgaaggcgtttcaccacatcaagcattaccgcaggagactgcaacgattgtatttcattgtttacgttggtgttggtctggaagaggtcgaagtctcccatcagaccagccgcatcacccaatgagttccctttggaatcctctttgataaggagcgatgctgaacgggtatataccggcggggtggtcaaaagatagacgacagccactccgacggtaacagccaacgatatgacgaaccaataccacttgttgagacagaggtagaacaaatcttgtatacggataaagtcatccgcctgtttaggtttggatatattgttttgagttgccacgatatacaatatttagattggacgtgattaattaaaaatgaggatggccacagaagtcagcaacgatgccagcgaaatccagaacgaggtggaacgcacgttgttgccgttgacggtagattgacgggctttcacttcattgggttccacatacaccacgtcattctgttgcagataataggcgggtgaagaatagatgtgttcgccggaagtgaggttcagtccgtacacccgttgcacatccccttcttgccgtaacaccatcaccttggaacggtttccgtagatggtcaggtcgcctgccatgctgagtgcatcgagtatggtcagcctgtcccggtcaatgctgaaacgtcccggactgttcacctcgcccaacacggatatgcagagattggcaaattccacggtcacgacagggtctttcaccaaattctcctttatcaattcgttcttgatacattcggcgatttcttcccgcttcattccggccacgtgtatcttgccaagtacaggaaaatctatcttaccgttggcatctacggtataagcggatactccttgattgcttgaagccgtcacgccatttgtccttaaagactgacccaattgcctggacacataaggcaggttgaacaagtccgtcaactgggggtcacggctgttgacgataatggaaatcttatcctccggtcggactgtaatggctttcacttcaggcaacttgatttctgtttccccgggtctcaaatcctggaaataaactacttccttggaagaaccgcacgagcccagtgtcactgtacttgcgacaatgagcaagatgtaaaatactttatttatactcat

SEQ ID NO: 1075 - DNA, 6800 bp, unidentified
  source 1..6800: mol_type = unassigned DNA
atgcgtattattttctgtctgatggttttcttgttcataggaaagaacacgatgctggcacagcagctgtcctcattcgtagaatatggagcagccctgcataccggtgacaatactcctctttggcaggtcagcaaccagcaaggactcacttcgctcgacaacaatacttacatacgtggaggaatatcctacaaacaccaacttggaaaatggaagtttgaagaagcactggatttggttgcagcagccggattcagcacgacctccttcattgtacagcaggcttacgtagacatccgttacaagtggtttggattctttgccggaagccgggaacagaattctccattgctgaatcaagagctgagcagtggcggcatgacctggtcgggtaatgcgcgtcccatcccacaagtacagataggcatacccgagtatgtacagttgctaccccgtttaggcctgaaaggagaaatctcgtacggatggtttacagataacaaataccagcgggagcaagtcggagaaaaatactggtacaccaagagtatcaaataccatcataaagaagggttcctgcgtatcggtatacccaaaggaaaatggcaactggaactcggaatgaccctcgacacccaattcggaggatacaagattggaggttccgaatcgggagacttgggcaacggatggaaggattacgtacgcgtattcttccccggccacgggcgtgaggacggaccggtaggtgaacatctggctttccaaggcaattttctgggtagcgaatatatcaaaatgacttatcgtcctaaggaagatttctccatcagcgcctatctggacaatcattttgatgacttctccgccatggccaaactcaacggttgggatggcttatggggtgtggaatataaatccaaccatagacaagccatcaacggaatcgttatcgaatatctccagactaccaatatgagcggtccactgcacggtttgcaaaattctgtagtaggtaagaccggaggagccgacaactactacaacaacggttactacccaggatgggcacattggggtatggcgatagccaatccgttgatagcatcgcctatctataataaggatggcgatatgagtttcaagtacaatcgcgttaaggccctgcatctgggatggagcggcgacatcagcagtgagtggagatatgtggcaaaattgtcccacaacagaacttggggaactcctcatcgtccaatacccgatatattagaaaatttttctacttttgcatcgttttactatattccccgtaaatggaaaggctggtgcttcaacgcgtcccttgcattggatatgggagagatatatggagacaattttggattccaactgaaagtacataaaacattttaagaaaatgaactacatacaaacagagattgacggcgtatggctgattgagccgaaagtattccatgatgcccgcggatactttatggaagcatttaaggaagaagagttccgtgcacatgtcggaaacgttcacttcatccaggacaatgagtccaaatcctctttcggtgtattacgtggtcttcattaccagaagggtgattgcagccaagccaaactggtacgtgtcattaagggaaaagtgctggacgtggctgtcgacttaagaaaatcttctcccactttcggaaagtatgtcagtgtggagctaagtgaggagaacaaaagacaattcttcattccgcgtggttttgcccatggttttctggtgctgagcgatgaagctgtctttacatacaaggtagacaacgtatacgcaccacaatctgaggcatccatccgttttgacgacgaagccatcggtattgaatggcccgttgctacggaacagcttctattatcagataaagacggacatgccgtatcgttcaaggatgcggtctattatgaataaaatatgaaaatagccattgtcggtacaggatacgtcggtttggtaaccggaacctgctttgcggaaatcggtgtcaacgttatttgcgtagacacgaacagtgaaaagatagagtcactgaaaaagggtgttattcctatctatgaaaatggactggaagaaatggttagccggaatgtgaaagcaggacgcctgcaattcaccacgtctctggagagttgtctgaatgaggtggaagtggtattcagtgctgtaggtacaccacctgatgaggatggaagtgccgacttgagctatgtgctggaagttgcccgcaccattggacgcaatatgcagaaatatgtgttggtggtaaccaaaagtaccgttcccgtaggtactgccagaaaagtgcgggctaccattcaagaagaacttgataagagagggatgaacattgacttcgatgtcgcttcgaatcccgagtttctgaaagaaggtaatgctatcaacgattttatgagtcccgaccgtgtagtggtgggagtagagtccgaacgagccaagaagataatgagcaagctctacaaaccattcctgctgaacaacttccgtgtcatctttatggacatcccttctgcagaaatgacaaagtatgcagctaactccatgcttgccacccgcatcagcttcatgaacgacattgccaatttgtgcgaattggtgggagcggatgtaaacatggtgcgcagtggtatcggttcggatacccgtatcggacgcaagttcctctatccggggataggttacggcggttcatgcttccctaaggatgtaaaggcactgattaaaacggctgaactgagcggctacaagatgcgtgtactccatgcagtagaggaggtgaacgagaaacagaagagtatcttattcgaaaagttgcagaagcatttcaataatgatttggagggaaagaccattgccatttgggggctggcctttaaacccgaaacagatgacatgcgtgaagccccggctctggtattgattgacgagttgctgaaggccggttgtaaagtacgtgcctacgacccggctgccatgaacgaatgccgacgccgcataggagaaagtatttattatgcgacagatatgtatgatgctgcgctggatgcagatgcactgatgctggtgaccgaatggaaagaattccgcctgccttcatgggcagtcatcaagaaaactatggaacagccgttggtattggacggacgtaacatttacgacaagaaagatatggaagaacaaggtttcacatatcattgcatcggaaaataaagttgcagaaaaaagaaaagaaataaatagggacgttatgacaataaaaagaagtgcgattctcattgtacttgttgtctcattggcatcatgcagcaacagacaaaacggggaggtttccgtcaaggaagaccttactgcaaaacaactgttgcaaggcatctgggtgaacgatgaaacagaaatgccgttgatgcgcatcgaaggggatacggtatattatgccaacccgcaaagcgctcccgtacctttcaaggttgttcacgatacaatctacatatacagcaatgaaccggtggcctataagatagaccgtcaaacggaatacagcttctggttccactcgctggccgacgaagtaattaaactgcataaatcagagaatgcggaagattctttggttttcaccagtcgagaagtggaggtcatttctactactccggaagtgataaagaaagacagtatcgtaacatacaagaatacaagatataggggatatgtatatatcaacccttcaaagatgaaggttttcaagacttcctattctgaaaatggaatcagtgtggacaatgtgtattatgataatgtaatccacatctgtgtatacgaagggaagaagatgctttatggccaggacatcactaaaaagatgtttgcggatatattccctgccgaaatgctggaccaggccattcttgccgatatgaatttcatgggtgtggatagtaaggggtaccattatcaggcaaccctcggcatacccgaaagttccgtatacaatttggtaaatatgattattggttttgacaatacaatgaacatagaaaaagcggaataaatccgctttttcttcaccacagtgtttatttcttctcaccgccattctgtggacgtttggccctgggctttccgcctttattgttgttacggccgttcttgtttcctcctggcttacgtccgtttccatggccgccccgtcttcctcctccgtcaaatgctctcggcttgtattcgggtgcttcacccagctcttcgggaaccggtatcttatagatgtccctatccaggaatttttcgatattcttaaagttcccctgctccttttcggaaacgaaggtgatggctacgccgtcattattggcacgcgccgtacgtccgatgcggtgcacataatcttcactgtcgtggggaacgtcatagtttatcaccagacggatgtcatcgatatcaatacctctcgcaacgatatctgtagctaccaggatattgatacgtcctgccttgaattcgtacatcacttcttcgcgctgtgcctgctctaaatcggagtgcatttcaccaacgttcagtttcatctgcttcaaagctttggtcacttccttcactttcagtttggaagaagcaaagatgataacgcgttccggcgtctcctctgcaaagaggctacggatgatgcccagcttctgattctcgtagcagacgtaggctgcctgcacaatcttttctgccggtttggaaacagccagcttcacctcggcaggattgttcagaatgttaccagccaactgttgtatcttagcaggcatggtggcagagaacatgattgtctgccgctctttaggaaggaatttgacaatttgcataatatcgtcataaaatcccatatccagcatccggtctgcttcatccaaaataaaataagagacacgggaaagatctacataaccaaggctaagatgggctatcaaacgccccggggtagcaataacgacatcagcacccagtgtcaaccctcttttctgctgctcgaatagtattccgtcattaccgccatacacggccacgctggaaaccgacatgaaataagagaaaccttccatctgttggtctatctgttgcgccaactcgcgggtaggagccatgacaatgcaattgatggcatcggcagggtgtccgccctctgaaagcttgttcaatataggcaacaaatatgcggctgtttttcccgttccggtttgtgccactgctattaaatctcgaccttcgagtatgacgggaattgatttttcttgtatgggggtgcactcttcaaagcgcatggcatccagtgcctccagtacattgccatttaaatgtagttctgaaaacttcatgtatctcttttaaatttgcgtacaaagataggaaaaagacttataaaatagactcttacagtaaaaaaataagcccttgggacaataattatctcaagggcttgcaaatttgtttcaagcatctgccttcaacggggaatatcaatgtatgaatccttaaatcccagaaagtaaagtacgccatctaagccgatggtattgatggattgcttggcattggcaactactttgggctttgcatggaaagcgattccaaggccggcaattcccagcatgggcaggtcgttggcaccgtcgccgacagcaatagtctgcgcaatatccactttctccacctgagctatcaaacgcagcaactctgccttacgcttaccgtcgactacatcaccgagatagcggccggtcagtttgccatcctctatttccaactcgttggcatacacatagtctataccgtacttcttctggaggtactgcccgaagtaggtaaaccctcccgaaagaatagctatcttgtaaccgtatttcttcaaaacatacatcaggcgatccacaccttccgtaatgggaagattttctgcaatctcctgcatcacggactcatccaatcctttcaataaagccactcgttcgcgaaagctctcaatgaaatctatctcaccacgcatggcgcgttcggtaatggcctttacctggtcgcccacacccgcacgtatggccaattcatcaatcacttctgtttcaatcagcgtagagtccatatcgaagcaaatgaggcggcgcatccggcggtacatattgtccaactggaaagagaaatccatttccagttcggttgccagtttcatcaactgttcttgcatggcaatacggtctttcggagtgccacgaacggaaaattcgatgcaggcgcgtgtacgcgattcgcattcgtccagcgggatacgtcctgtaaggcgcttgatggcatcgatattcatgccttgctctgcaagaatacgggtaacggcagatatttgacgggcagacaacttacgccccaataaagtaagaatatagcggttctttccctgcatattcacccaatcctcgtactctttggtagtaatggggtagaaacggacagtcacgcccagggaggaagccttgaaaagcagttccttcataatgaaccccgagtgttgttcttccgtcttgcacaaaatgcccaacgaaagagtattgtgaatatctgcctggccaatatccagaatggtagcatcatatttcgccagaatttccgtcacggaagctgtcagtcccggacggtcttcacccgtaatacgtattaggatgagttcagtgttcaatggttgcat

SEQ ID NO: 1076 - DNA, 20509 bp, unidentified
  source 1..20509: mol_type = unassigned DNA
taagcgatgccagaatattgtgcttcagccttatagggaacaggcaagaacacttatggatgcgctgtctgaaaaagatgttgagagaactgctgtctaccggaaatatgaaagatgtgaaatggaacaagagcagttggaggattttgaatctcggtatcaggcagaaatagaagaactggaagcagagttcaagaacattatgatgaaagtttccgtaatagagaaggcgttcagttatgtaaatccatggctgacaaaatttcaagaccttacgactcctgaaatactggaacggacgcacatcaaaaaatatgtggagcgggtttggattgatgattttaagcgagtagaggttgttttgaaagaggaagaatggacaagattcttcccggaggaatggatgagaaccagaaaggaaaattaaaatggctagaaagagcagaaaaaacataatgccgcagagtgccgcaccggagattcgtatttccgaagaagtcaatcttctgcgtacagcagcgtatgcacgattatcgtcagagaacagcggacatgaaacagaagataccctgaatacgcagattctgcaaatccatagttatatcaaggaacatccagggctgactctgacggatacctatgtggacaatggatttacaggaacaaactttgaccgcccggagtttgagcgtatgatgcaggatgtgcggacagggaaaatccagtgcattgtggttaaggatttgtcccgctttggtcgtgactacattgaaacaggcaactatctggaaacgatttttccgatgctgcatatccggtttattgctatcaatgatgattttgacaatatccggcagtcggatgtggacagtcttgcagttcccatcaagaacatggtaaacagcctgtacgcaaaggacatttcaaagaaaattgggctgagctaccagatgcgtagagaaaaaggaatccctacttcatggtgtgtgccgtatggctatcgcatgaatgaacagaaaagtcagtatgaagtggcagatgaagcaaagtatgtgaagttgatttatcagtggtatcttatgggggtgagtacgaacgaaatcgcccgtaggctggaatttctggaagtacctcgtccgaatgaacatctgaatcgtagactgcacgagggacatgatacgactttcaataaatggcactccagttctgttctccgtattctggatagtcaggtatatatcggaaatttggtaacgggaaaaacccggactgcctcttataaaggaattgggctgcacccggtagataaggaagaatggcatattgtggaaaatgctcatgaggcaattatcttgaagttcgattttgaaatcgtgcaggaaaaaagaaaccggaacaaggaaaaacgcaataatgcaatggctcgttcagagcaggtgcgggcagagtgtaggaatcactttgcaggcatggtgttttgcggctgttgtcggcgcagcatgacatttgtgcgtcaggtgcataaaacggaagaggaaagctatttcggagtatttcagtgcaagagaaagaaggggacaacaccatgttcctatcatactgtgccagaaaaaatgcttatgatggtagcaatgaagcagattcatcatctggtttctaccatgtgcgaagaagaaaagatggtaaaagaaatgctgaacaacggtggtctggattccacccgttctatcaaggtgaaggaaaactcgattgcatttcggattcaggaaaccgaagaacggcggctgcgcttatatgaggactataaggcggaaattctggatgaagaagagtatagtcggttaaaagaacactatattgccgaaaagcagcggttggaacatgaactgcaaaagcagcggcagcggtcattggaacttgaaaagagaacgagaatttgcgatgaacagatggaacggatgcgggctattctgaatcagaaagaatttgatgaagaactggtacatgagcttatcaagaaaatctatgtaggcatcgacaattcggtagagatcgagtttaagtgcagtgacccgtatcaagaggttctggcatttgtggcggaggtgcagaatgaataataagattgcgatttatcttcgattatctctgtcagatggagatttgaaaaagggaagcaaggatgagagcaatagcattgaaaaccagcggcttttgctccattcctatattgaaaagcaggatgatctcccaggcgaaattgtggagtatgtagatgatggctatactggaacgaacttcaatcgtccggcatttcagaagatgattattgacctgaagaaaggggagataaagaccatagtggtcaaagatttgtcccggctagggcgtgattatattggcgtgggcgattatgttgagcagatttttccattgatgggtgtccgctttatagcagtgaacaatgcctttgacagcatgaagctgaacaacggcactccgggcatcgaagttgcagtcagcaatctggtgaataatctgtatagccgtgacattggaaaaaaggttcgtgcggcattggaagtgaactggaaaagtggcaaagctacatctgttaatgtaccgtttggttacgtctggaatgggaaaggcaatcagcgatgggcgattgacccagaagcagcggcctgcgtccgaaaggtgtttgatttggcattatctgggcgcaatacaacgcagatcgcctatgcgatgaatgaattgggcttgccgacaccaggattgtactctaaacggaaaaataccatagtaggcggcaatgcaattatagccccggagagcgaaatactttggaatccaggaatcgtctggagggtgctgcggcggtacgaatatactggggctttggtgatgggcagaaggaagaaacttgatgtgaatactacggcgttccgcaccttgccggaagataaatggattattacggagaacacccatgaagcgatcgttacaaaagatgagtattatcaggcgcaaaaggcaatccgcaatgttgctccaatccaatacaagaccgaagatgattttgctctgaaaggcaaaatatgctgcggaaactgcctgagacagctccggcatgagaagcagtatggcgaaatggtattctgttgcggtcacaaaaggtcagtaggaaaattctcgcactgctattcaggctattacagagagcaggcggtcaattcaagagttgcccgcgctataaaaacggtatttacagcattggaagttgtgaatcagggaatgcaggagaaaaaatccataaccttgcagtgtgtagatgttgatgatttgaaaaagcaggcagaaatgattcgggcagagcaaattaaactctatgaatcgtatgcagatgggattctgacccgcaatgaatatctggaaaagaagaaaggacttggggaaaagctggcagatttgcaagagaagattcgtatagaagaggaagagcaggaaaccgcagatgaactggatgaggaaatccgcagcctgacaaagcaggcaagtcaaaaaacatacataggaggtctgaccaaggaatgtgtggatgcctttgtcagcatggtttatctgtatgacgatcagacgatgaaagttgagtttaactgtgaggatgtgattcggagagcattggaaaagtatggtgcataaccgcatagaaacagcgaggtgagcaaaaaagaatgcccgtctggttgagaggattcgcaaatcttctcgatcaggcgggcatttcattccgtaggaatggagattagtcgttatgtacggtcttttcccaacgatggaaaacagcttcaaagaagtcgtgaccaaggactccttcaccaatagggccgaacttctcccgataggatttaagaatagccgtaaagtctggattttgaaatccagtatatttgtcaagggaacacagcttttgataatcaggaaaataggaaagcagttcgctgtcggtcttttcttcaaagatgttcatggtatttcctctttagaaatttaaactatctacccatgcggacaaatcggctttggttgaggaagcgttaaatacctttccatgtaggagcttggaaccagggcagctaggagcaagcttttcattggtcttgcccatatcgctgctaccggaagtggcgaatggaataatggttttattctttaggtcatagctttccagaaatgtattgatgattgtaggggcaacgtaccaccagataggaaatccgacaaaaatcgtatcgtattcatccatgttgtcgcgtttggcggcgatggcagggcggaagtcgggattgctcatttcaatagtgctgcgggatttcttatccatccagttcagatcggcttttgtgtaagggacttcgggacggatttcaaaaatgtctgcaccgatggcatctgctaaatcttcggcaacttttgcggtaatgccgctggcagaaaaataggcaacaagctttttgctcatgacaatgcactccctcaatatttgatttgataatagtatagcacggcacgggaggggtatcaagaagtgaaatgaaagcaaaattgcttggaaaatattggtgtctcaatagttggatttggataatcataactttgatattgtatcttaacttaaaatgagttataatacagaaaaagagttatgaatggaggcgatagagtggaataccttaagcgggttttaggaattgaagtgctatatgaaaataaagctttagagcatttgccaaacttcatcagtacaaggtatgattcacagaaagtatctctgaatggtcaaaaaaccgtttttttgtatcctaaaaccgaattggagcaggtggaaacattaaaaaagcatctggaacgtgtgaaaaaggttgcggattgtcctgtgattttagtattggaacagatcactgcacggcagaaagagtatttgcttcgagagaaaatagcatttattgtggatggaaagcaaatttatctgccctttatggcagcatatttgcaggaacgctgtgatgcagaaaagagtgacagagaagaaatcttgccatcggcacagatgctgttgctttattttatttatgagggagcaaaggagctgtccacaagtcaagctgcaaaagatttggatttgacaccaacatctatttccagagcttctaaacaacttgaaggaatgggatttctgcgatcaagaaaaattggagtgcagaagatactgttttcggaaaactccgccaaagagttgttttacaaagcagagaaagttctgctcaatcctgtgaaaaggacggtctatgttccatgcgaggaagtaaagactgaattgttggagagcggatattccgcattggcggagtattcgatgctcaatgcgcctagtgttcggtgctatgcttcagaaaaagtatctcagtggaattactgcatgaccaaggatttacaggactcaaattcacaggtgactgttgaaatgtggagatatgacccacgaaaattatcgaaggaaaaaatggtcgatggactttctctagcattatcgctcaaggaagatgcagatgaacgggtagaagaagcagtagaagaaatgttaaataatctgtggaggaagatagatggtaacagggattgaaagctttaaggaatggttcaagggtaacgaaagccagtatgcaattatcggtggaactgcgtgtgacatcttgatgacggaagaaggcttagacttccgtgcaacaaaagacattgaccttgttctaattattgaagccgtggatgcggcttttggaagaaaattctgggactatgtaaaacaggctggatacgaacattgtaataaaagctctggtatgccgcagttttatcggttcagtcacccgatgtcaaaccgttatccagcgatgatcgaactgttcactagaaaactggatgcaattcaacttccagatgatgcagtattgacaccgctgccaatggatgaggacatatctagcttgtctgcaatccttttggatgatgattactatgagttcttgaagcaggggaaagtgactgttgatggagtgacggttttggatgctgcatatttgattccattcaaggcgaaagcatggatggatttgacggatcgcaaagaagctggagaacacgttgatagtaaaaacattaagaagcataaaaatgacgtttttcgattgactgaactgattgaccctacggtcaagattgccactcccagtggcgtgtatgaggatatgcagaagtttgttgatcgaatgaaaaatgaaacggttgatgttaaacagttggggcttgtgggacgaacgaaagaacagattcttcaggagataggagaattatatgctatacaataatcagtgagttatagaataaaacactatcttgtaaggaagtgatataacatggaaaagaaataccaaatttttatttcgtcaacttataaggatttgatagaagcgcgtagcaaagtaagggatgcaatcctgtcaatgatgcatttcccagttggcatggagatgtttaacgctgctgacgaagaacagtgggaaataatacaagagacgattgatagttcggattattatgttttgattttgggacagcgatatggctctgtaatagaatctggatcggatgctggaattagctatacggaaaaggaatttcgctatgcgagagagaagaaaattcctattctggtattcataattgatgatgatgtggcaattaagccggaatttatggaaaaagatccagaaagtataaaaaagctggctgatttcaagatagaagctaaaaaaggacgaacggtacagtggtggactaatattgacgaacttgctagagaggtttcagaatctttacatcagcaaatggatcgaaaaaagcgtccagggtggataagaggagatgcctttgatattgaagcaagtcatgcggaaattctcagtttgaataaaaagataagagaacttgagcaggaaaatgctgagctgaaatcacagattgtaaagagggttcctgagttgatggccgcagttgtgctggatcaacaggaggatgaagaggaggatgaaaaaggtcttaaagcacatggaaaattgcttattgatagctctgataatgcatacaaaatccaattatatcataatgatggagaatgctacaaaaacaagtatgaaccacttgatttaagttgcgttgaatcatatttgaaaaagtatgtaaaagaaaaggacttacaggcttataatgcagcactaccgtctgaagaagaaataaatgattatgtacaccagatgagtgtgtataagacaataataaacggtggtgttgcgttcaagataagagtgcttaataatggaacagcgaaggcaacagatattagaatctcaatcgtatttccaaagggtatttttgtatatgatattgatgatattgaaaaaatgaaggaaccgcaaggaccaaaacttccgccgaatcctattgaaaaggcagaggaacgttttatgaacgactcaaatccaacatatgctttcttgaaaaatagtatagatggaatgcaaccattccgaagcttaccagtcatagacccggcaatttttagcaactcccatccttctgtatttgaatcaatatctatacgagataattcgatattgattgaatgtgaccagttgccacataaagatgatgccgagtttgatggaatatatattgttccggctagaaaaggaaaattcaaagtaagcgtttcgctgatgtgttcggaatatattgaaccggaagttcatgatattgaatttgaaattgtctaataattaaaataagtacgaataagccgcatagggctttccaatgggtttaacccaatgggaaactttatgcggcttatttttttgcttttttgaaaaaattgttgtccctatcttgacatcagggggatacgtcggcctttcccttagcgttctgttagcacagcataatcaagtgatggctgttgacattgtgcaagcaaaagtggatatgattaacaatcataaatctccaattcaagatgattatattgagaagtatcttgcagagaaagaactgaacttgaccgcaacgctggatgcaaaggctgcatactcggatgcggactttgttgtaatagctgctcccacgaatgtctactcaacaaaatcagttgaggtctgatggtctatggtggagcgtaatacacatgcgataataggcattttttgcataaacatacgccacattttactctgaaaatcatgttttgtgcagtaggacgttaatactgataactgcatttatctgcgtggcgttgagtaacggacggaaattactaatattctgtcgtgtagacatcataaaaatgaataaatcattgtgcaggttgcaacaagaatgatgagtttgcttgtatgattattacaaaaaagatggaatgggaaaatctagcaaaatagaagcgaaaaaacgggtctattcaacagattaatactttgatgtaaagggcggagagtgcggcgtatgaatatgcgccggagaaatgcggaagaagatgcaactgattttgttgagtgaagctgtctggataaagatatataggaaatagacgaaataccgagaaaaagtattgattgctggggtagttggatacgacagcataagaaaacacttagccgtgtgagcggcaagaggaaaaagaaatactatctgtgaagagcagatgtgtacatagatgaagagatgagatgttaacccgatgaggggtggaggagttcattatggaaaaatttgattatttagtagtaggctctggcctttacgggtcgatttttgcacatgaagctaaagcacatggcaagtctgttttggtagtagacaagcgcccgaatattgccggcaacatttacaccgagaatattgagggcatcaacgtccataagtatggtgctcacattttccatactaacaacaaaaaagtatggaactacattacacagtttgccgagttcaatcgctttacgaactcacctgtaaccaattacaagggcgagttgtactcactgccgttcaacatgtacacatttaacaagatgtggggtgttgtaacaccagaagaagccgctgccaagatcgaagagcagcgcaaggagattactggtgagccacagaatcttgaagagcaggccatttctcttgtcggccgtgacatctacgagaaacttatcaaaggctacactgagaagcagtggggccgcgattgcaaggagttgccatcctttattatcaagcggcttccagttcggctgacttttgataacaactacttcaatgcactttatcagggtattcctgttggtggttataccaagatgattgccaatctactggatggcattgagattcggctgaatacagactatctggagaataaagctgagttggatgcattggctgataaggttgtatacactgggccgattgatgcttacttcgactataagcttggtacactggaatatcgttctgtccgttttgaaacggagactttggataaatcgaacttccagggcaatgctgcagtgaactataccgaccgcgaaactccgtggactcgaattattgaacacaaatggtttgagttcggtaaggatgagaacggcaatgatctgcctaagacaatcatcagccgtgagtacagcagtgagtggaaaccgggtgatgagccgtattatccggttaatgatgctaagaatagcttgctttattctgagtataagaagttggcagatgaagaaaacaaggtaatttttggtggtcgtcttggtgagtataagtattacgacatggatcaggtgattgcggctgtgttggataaatgtgagaaggaactgggagagtaaaaatggcaaagaaaaagattttaatggtctgtgaagcttttggaggtggcgtatttacttacgtatctcagctctgcaacgatatggtggatgaatttgatatttatcttgcatattccctcagaccgcagacacctaagaattacaaagattttctggatcagagagtacatctgattgaaatgaaaaatgttggagtcaagggtttgaccaactttaagagtgatattgcggcaattaaggaactgcgtcagattgaaaaagaaattcagccagatgtgattcatttacattcctctgttgcaggtggcttaggtagactggcttataaagaaaagaataatactgttgtgtatacgcctcatggatatgcacatattcttatgggaccggggaagaagagcaaagtctacaagtttgctgaaaaggttctcggaaatcgagcacttacacttacctgttgcgaaagtgaagatgaagaagcaaagaaattctccaagagaacagcctatgttgaaacgggtgtgaatcttgcagacctttcggcatcccttgatggtattaagcctgtaaaaaatgacaagttcacagtctttacgcttggtcgtgcctgcgttcagaaacagccacagctttttaatagaattgctgaactagtaccagatgcaagatttatttggattggtaacggagaacttgaaaatgagttaactgctccaaatattgaagtgacgggatggaaacctcgtaaggaagctttggcaatggccaagggggcggatgcatttattttgtgcagtcttggtgaagccattgcaatgagccttattgagaatatgtacattaaaaagttgattctcgtcagcaatacaatgggaaataagagtgttatcaatgatggtgttaatggctatgtgtgtgataaagcagaggagtatgctgaacatataaaagcggctatgaaggaattccccaaagaacttcctgaaagagcctatcaggatgtccttgaaatttataacaccgaagctatgaagaagaaatatattgagttttacagtagtctataagaagagaggaaaatagaatgttatgatgacaaagcttgttaatctggcgcgaaagaataaattatttgagattgtgattaaggcatttgtctggatcatgatggctgttattaatgcttggtatgaatttacaggatttttaagatgccatggggtacttagaaatcagtatagtgatataaaagcattaaaaggaaaatacgatggaaagcgttgttttattatctgtacgggtcctagtttgactacagaagatttagaaaaaattcgagatgaatatacttttggaatgaattctatttgcctgcttgctgataagactagctttagaccgacattttatggatgtaatgatttaggagtttacaagaaattaaaatctaacatagaacaatattgtggtaatcagattgaagtatttgtgtcggatagaattaagcgccacggtgatataaaaaaaggatggcatgtgtttccagaaaatgtagcataccatacttatgatcggtggtttaaacaaagcttttggtgtaagtttagcggcgattgttatagaaccgtttacggcatgcatagtattacgcactcccttattcaacttgctgtgtatatgggatttaaagaaatatatttattaggtgctgattgcaactttccgaagggaaagcaaattcattttcaagattatggtgttcctgacacaacaatagacacagcaagagaacgtaatattgctggttataaagaagtgaaaaaacagatgaatcaatacggatttacagtatttaatgcaacccgaggcggtgctctggaagtatttgaaagagtaaatttagatgatttgctaaaagaggataaatagaatgaaattattatttgtgagtatgagtgctaggacaatagaggattcatcaggaaatatatatcttaactctcatatgaatcgaaaaaccataaaacgttatgcagatatctgtgacgagtttcgcatgattttaagagatagcggtattcgatgcgatgaggaagaagcgaagcataaatatgatttatttccatatgatcttgcgcagttagacattggatttaatccgtacaatcctaaaactaatttgattaaggtaaaaaaatacaaagagctggagcgtttaattgaaaaagatatcttatgggcagatcgcgtgattctagcatcagctgtaggcgtttattctgagatagcaattaaatactgtagaaaatatcatagaaaatatatgctgatggttggtggatttgcatatgaaacagattggaatcatggaatagacggaaaaatagttgcgtggaaacatgaacgcatttgtaagaagaacatggcaaatgcaccgtatggcttgtatgtgacgcaaaagagcttgcaggaaagatatccgtgtactggaaaaactataggttgctcagatgtcgaaataatggatttgagctcttcaattcttgaagaacgattaaaaaagatgacaagcggaaaggccattctttcattaggtacagcagcaaatatcgatgacaagctgaaaggccatcggtttgtaataaaggcaatttcattgctcaagctgaaaggccatcggtttgagtaccatctacttggcagtggatgtggcgaggaacttctttcatacgctaagcaatgtggggtagaggatcaagtaatcatagacggatcaaagccacataatgaagtgtatggatggctagatagcatcgatatatatattcagcctagttttacggaaggtttatgcagagctgttgtcgaggcaatgagccgtgcatgtccagttgtttgtacgaatgttggtggaaatagcgaactatgttcgaatgaatatttagtaaagccaggagattctgaaggtattgctaaagcactcgaatttctgatttcagacgatgagaggaaaaaacaggctcaaataagctttgaaaaggctcatgactattacagcgaaacgcttgatcaaaaacgacaggagtttctgttggattttatgaaatgagataagaggagaagagatttgacaaacatatatactttattgggttgtttagcaattttattttttttgagctatgtactttgcggaaaagattttttttctccagcaacaatgttatcgctgacatttatgttttcaacaatgtgcgctatatataaatacccagtatggagatatgatttttctggatggacaacttttataattaccagttctttggctattacgctgattataaattattttgttgtgatgtttggccctaaatatctcatcaaaaagagattggcgtactcagagaatataacgccaataacaacatcaatgactatagttgctattattattattttagtgactgctttagctctagttaaacagatagtgcgagttggcggtactggaggaacgatgcagtcaattatggcgtcttatagaaataatggatcttattctacagatcttgataatcaaatgccacaatggataaaaatcttgcagtattttacaaatgctttttcatatttattcgcattcgatttgatgtttttttggaatgaacttaaagcggggagaagaataggagacattttcattgttgtactatgtgtgataacaggtcttttatctggtggaagatttggaatggcatcattattgattgctatttttttgatgaaacatctaattgaaataaaaaagagaggatattacaaacaatataaattgtcatcaattatcaaaatgactcttgctgttttactggctttttttgttttttatattgttagaacacttgtaggaagagatgatgatcaaggcctttttgattacattggtcattattttggtggaggagtacctcttttggatatttacttaaaaaaagatagagttgagccactggtttgggggcaggaaacattttactcactcataaataatcttcggcgtttgggtcttataaatgtatcatattatgtccgacatcatgagtttgtatacagatatggaaattcactaggaaatgtatatacagcatttagagattattatcatgactttggcttagctggaatatatatttttcatattctattttcatggatttattgtgttcagtatcaacgaatgaaaaagtatggaaatctattgaaaattattgttttttcgacaacgtattatgcagttgtattttatccattcaataattctttgtttgcgactattttttcaatgggatttatgattcagcttacaatacttattgtactgtatgagattatgcttagaaaaagggttggctttaggtgttatgagtgaatttatgctagaaaattataagtatatttcatttgatatttttgatacattggttaaacgctgtgttacaaatccacatgatgtttttgatttgattgatagatactgcaaaaaaaatgaaattccggtgcctgatgattttaaagataaaagaattacggcagaacgaatggtcaatcagaaaaataaaagaccaagtacaataggagaaatttacgattttttttgtcaggaatatggtggtaatccggcaaaactagaagaaattgaaaaattagttgagcttaatgtctgcaagccaaatactgaaattataaatttatatcataagtgcattgaagcaggaaaaaaagtatatgtgatttcagatatgtatttggatgcagcttttttgaaaaagatattgtccaactgtggaattgaaggatacgaaaaaatatttgtatcttgtgaataccatgagacaaaaacaacaggagaactattcaaaaaggttatagaggagaaaggacttgagcctgaacgatggcttcacattggagataactcaaaaggcgatgtaggatctccgaagaaattaggtatttctacatatcatgttccttatgaaaaaccgcaagtctatcctgtaaaagctacaatcagagagaaattggattttgaaattgcgaacaggaatgtatctattctcgctcatacgctaaatactagcaaggcaatgggggcaaaagtgcttggcccgttacttgccggcttttcaaaatggctttctgttcaactaaagcaaagaaatattttcaaagtgttttttctttctcgtgatggatattccatgaaaaaagcatttgatcttattaatccaagtggatttgaaactgcgtatatttatgcttcaagacgttcatggacggttcctgcaatatggatggagccagagtatgaggatatattaaaaaatatttcgatgtcacccaaaacatcagttaaaagctttctgactcgaattggtcttgaagcggataaatatgggcaagaagtaaaacaatgtggcttaacactagaaacgacgattaataaaaaggatttattggattctgataaatttcgccagatttactctatggtaagagaaagggtaatagaaaactcaaggaaagaatataacgctgttgttcagtatcttcaagaaaataacgtatgtggaaaaatagccattgttgacattgggtataatggaacgatgcagaaggcgttacagcgaattctggaggctgcaaagattaatgcagatgtcgttggtttttatatgggattaaatccaaaatcaaagctgattgagagtcgtgaaatcgatacgcttagctttttgtacggaccggagttgaaaaatgactatcaggataagataaatgcgtttatatccgtgttcgagagcattttcctttcgcagcatggttctacacatcgcttttgtttagaaaataatgtacctgttgttgagttttatgactatgagtatgatttgcaagagtcaaaatatatagatgaagttgaaataattaaggatttccaacaaggagcaatggattacgttgagtttgtagcaacaatgttaaataacgagttgctggtaatcgataatagtattgcaattaacaatcttctctatatggggctaaaaccagaaaaaagtggtgtagatttgttttctgatttcagaatgtttgacacaaggatttcccatattgctcatccagatactttaatgcattatttgagaaatccatcaagatttaaaagagattttacagaatcaacttggaaaatagcgttcttgtatcgattgtttaaacttccaattccgtatgagaaaatttactatatacttaaaagttttgtgaaatcgtgaggaaaatcaactttgaaaaatgatttaacaaaaaagtttgcttctaatttaacgtatgcctttttagcacagtttctcagtttgatgcttagcgtcttgatgtcattgattgtgccgaaactattgggcgttgagcaatttgcttattggcagttgtttatattttatagtggttatgtggggttttttcatttgggtttgccagatggaatatatctcagatacggtgggacagagcttgataagatggataaatcattattgggttcacaactgcgagttatgaccacaatgcacattatttttagcattattgggattactgtattgtcgttctcgccaatggaaggtgacagaaagtttgtctggataatgacggctgtgtatatggtggtgaccaatgcattttggttccttggatttatctaccaagctgcaaatcagaccaaaaattattcgatagcaacgataataagcaagatatcttttaccgtttgtgtttttacactgatggtatttcgaccggaaaattttcaaatttatattcttctatatgttttggcacagggattgtcactaatctactgtatcgttaagggaaaggcgtttgttttttcaaaacaaatttcgatgaagaaaactttatctgaaatgatttacaacgctaaaattggtatcaaccttactttttcgaacttggcaagtagttttatccttggtgttggtcgagtaatgattgatgcgacgcaaggaattagttcatttggaatcgtatcgcttgcaatttctttgacaaattttttcttgcaatttatttcacagattagtatggtactgtttccgatgctgagacaatttgacaaagagaaaatgaaaaaggtttttgtgcttgtacgaggtggtattagttatttactatgtgcaattttggttttatatgtcccagtcaagttcgttttgagtatatggcttccgcagtacaaattaagtctggaatatcttgctattttgctaccgttatgtgtttttgatggaaaaatgcaactgttatataacacatacctaaaagtattgcgaaaagaaaagatgttgctcctcattaacattatttcattgggtattagtgctgggttatgttcgattggcgcatatgttcttaacaatatgatggctgttgtgatttgtatggtagcagccatagctattcgtagtttaatcacaaacatatatttatcaaagattatgggagtgtcaaatgagataaatgttatctgggagtgcgttctttccctgatttttattgtgattaatcttacccttccgatgtatattgcattttttgtttatttgacggcatatgtaatttattgtttggttactagaaatacacttatggagtgtatttcttttataaaaaagcttagataagagaggtaattattatgaaagtagtatcatttattccaattaaacttaataaccagcgtcttccaggcaaaaatacgatgatgcttaatggtcgaccgatgtgcgactatttatttgaaactattagtaatgtggacagtatagatgaaaagtacatttattgttcagatgaggcaataaaaccatacattgcaccttatgagccaaagggactcagatttttgaaaagagattcatatctggatggatttcaggtaaagggattggagattattgatcgtttcgttaaggacgttgatgcagatatttatgttcttacacatgttacacaaccatttactaaggggtcttctatttccaatgcgttggaaaaagtagtttccggtgaatatgattctgcattttccgctgttatgctccaagattacatgtggatgaacggaaaaccctttaactatgatatgaaaaatatagtaaggacacaggatcttgatccaatttatatggagacaggtgcctttttcatttttcgtaaagaggtctttactaaattgggacaacgtattggaaataaaccgtatatatatgaaatagatcagtttgaggcggttgatgttgatactgcagaagattttgaattcgcaaaagcggtagccacatatttagctaataagggagaaaaataaaaatgaaaaatgttagagttctcgattgtacgttgcgcgatggtggacgaatcattaactgcgcctttcctgatcaagaggcaaaggaaattagtcagagactggctgatgcaaagattgatattattgaaattggtttcctacgtgattggagaaaagtcgcttataagggtaacagtacgttttttacagatgtggatcaaatgagagcgtttgttaacaaatcaagaaagaatacgttatacacagcctttattgattttggcatgtgtgatattgattcactaaaaccatatgatgggacttcaatagatgcaattcgttttggatttacgaaaaaaaattatgcagagcaaaaagatgaagtgattcgatggattgaggttattaaggagagaggttataaactttttattcaaggagtgaattctttaaattattcggatcgtgagcttcttgagatagttgatatggttaatagcgttcatccgtatagttttggaatcgttgatacatacggggcgatgtatatggacgatgttgaccgactttatggattgattgatcataatatggattctgatatttgtattaactttcattcccataataattatcaattatcttttgcgtttgcacaggaagttataaagcttagtggtactggcaataggcagatcattattgacggtacactagggggaatgggtaaagttgcaggtaatttgaatacagagcttattgtagattatcttgttcgtaagaagcattatgattatgaatttgaagatattctcgatatgattgacgattatatttacaaatatagtttaaaccataagtggggatattcaacgccagctatgcttgcaggtgtttacaaatcacacccgaataatatcatttatctaacagaaaaatttaggctggatacaaaagacataggaaaaattttatctatgattgatccgggaacaagacaacggtatgactatgataatattcagagattgtatacggaatatgtagctgacaaggttgatgaccgtaatcaaatcgatttgttaaaaaaacaaatcgaaggaaaagaagtatttattatggttcctggcaattcgctcaatacatatagaccagaaattgataattacatttcggaaaacaaacctgtggtcataagtgtaaatttcgttgcagattattcagaagcaatgtcgttttttggaaatgcaaaacgatattctcgcttaaaaggaaagagagaagggcgaatggttatcatttcatctaatataaagtctgatacaaaagaggatattgtggttaactatcacagtattattaatcgtggatataaatattttgaaaattctacaattatgttattgagtctcttaaagagagtaaatccgaaaaggataacaatggctggttttgatggttttgatgaatgctctgaaatgaattattccgatacctctttccaaaacgaacgccatattgcagaatttaaggagttaaatgaagaactaacaaagatgtttgaagaaattgttgagacaatgactccgggatgtagctttagcatgatcacaccaagtaaatttgaaaaggttattgaagatcactgcatattgcgaagctaaacagttcattccagaattgaacgaccactgaataaggcgtaagcagaacaatctattgttctgcttgattgttacaatcaacagtttgagattaagtcaatggggcattatgccggctttactccttgccattgactcgaatcgaagactgtggtaagatgaccgtttgatttcggaaagtggccgttctaaagcggaatagtgaccgctgaactccgtaaactgcagattacggcattttataatttattgagccagtgtacggtactaaagcagtatctaatataagtacgtgcgctggtttttaaattataagcttgacagacgagtagaggggagaacataattttgagagcagagcagagcagagcagagcagagcagagcagagcagagcagagcagagca

SEQ ID NO: 1077 - DNA, 37262 bp, unidentified
  source 1..37262: mol_type = unassigned DNA
tatcgttaggtatttgtaatgcataatcatcatctctattaagggctgcaataacttgcgttaaataccaatttaactgagttatttctgatgtacttactccagtccatttaatttcctgtccaacttccttaaatatttcttctgctggttgacctttcagattttctatttcttctaaaataatacctattgcgttttccgaccacttaaataacacttgtgctggtaaatgtttatatattccaatacttccatttcgaacattatatttaattgttgcctctatgtcacttgtaattgacgaaataaaacttcccgatgtatccatacgatcatttctaattctatctatttcttcctcttgctcaatagtaattcctcccgctcttgaaacaattgttttttctccatcttttccctgtaatacaatcctacttattgccttaaaatttgtacatttatcaatagctgacttaggcggttttatttgtactatagaattttttaatacgtccgcaatatatttcgtaatgtatattgtcattttttcatgcttactaatacatgctaaatatgtttctgtccttcctatccataagcatcctctatgttgttcccaaatatttgcatttttaccattttcatctatatacatatattctctgctataaacatataaaatctctatacgatccaaatattctttaacagataatatttttaattttctatatcctgataaatctatatactcctccttattttctaatttttttattatttcataatcggatgcttccaatttgctgccaaatgtccacaatgtaaatgtaactcgatccccataaatataatcatttacatattgctcaatttcctcatctgaaagccctccataagataaaattttgctgattattacacttttttcctttccatttatttccttttcgtctatacacatttttttagcaatttcatgtaatgcataccacggcaatgtttgtaatttttgttttctctctaatgtatccattcacaatcctccacatataatataataaagtaaagaaatttatttcttcattacttatttagtttccgtttttacatatcaatattacaattctcgatccccttaaataaagggaatcaacacaatactattattttcacttatacttattcaattattccgattcatggattttaattagatctgccctcaaaaaaggcataaaagaaatcccccctctattcaattattatactttacatattacccctatttatacgcaaagtcaacattcttcgacatcaaaacgctactttgtttatcaatcaaaaaagccagcccagcctccccttttccatccaaggttccgccgttccagctcaatctcatttctctctattaaccaccaatctatatatacctctgcatatgctcacaaccacgatagcgctcacatatcccagtgcatccaacaccagatcaaaggaatcaaaatgtcttccgacaatgaatatccgaactgactgatcgcacaatgatatacacatacaagttaataatgccaataccggcatcagccggattttcttcgctgcaaatgcataaaaaatactaacacagatgccgatgatcaggaattcaaatacatgcgcccattggcgtactgaccaatccacaaatgcaccgacccaattaaggaaatcttccacaacaggcaaatgtcctaccttttccgaaagagcaaccgtatcagccggcggttgaaaagtcagatagaataatatacataaagtaatcaggacaaatacaagtgaaatgatcaatggttttctggctttattaccaatcaatttcttcagcataaacatcccccttttcccaacaaaatctaaaattttatactcataatgcaaaaacatcatcctgatctgaaatcaagaaaaaagtccttcacctcacagcgaaggactatactttcaactcaaccatttatataccgcgtatcgatcagcggtaaactctcgccccgaccatttatataccacatatcggtcagtgataaactttctactctaccgtcacactcttcgcaaggtttcttggcttatcaacgtccaatcctctggcaacagatacataataaccaagcaactgtaatggcacaactgcaagactagcagcgaaatgctcatccgtcttcggaacatatacagtgaattccgctgtgtcctcgatggaataattgcctacggttgtaagtgccataagggatgcaccgcggctcttgcattctaccatattactaatcgttttctcatagagttccggttgagtcagcacgccgattacaagaatgccgtcctcaatcaggctgatcgttccgtgcttcaactcaccggcagcatatgcttcggaatgaatatagctgatctcttttaacttaaggctgccttccagacaaatcgcataatcaataccacgacctacaaagaaaatatcctgtgcattcgcctgtttggctgcaaaccactgaatccgctccttatcttcaagaattctgccgatcttatccggaatcgtctgaagctctgttatatatcctgtatactgttcttctgtgatctcaccacgaactcttgcaaattctatcgacagcatatatcccgcaatcaactgtgcactgtatgccttggttgtagcaaccgcaatctccggtccggcaagagtatagaaaacattatctgcttcacgggcaatcgatgaacctacaacattcacgataccaagagtcttcacttcctgctcttttgcaagacgaagtcctgcaagtgtatctgccgtctcacccgactggctaaccacgataaccagatcatttttattcaaaataggtcttctataacggaattccgatgcaagctccacgcgaacaggaattcttgcaagatcttccatcacatactgagtaacaacacctgtatgatatgcagaaccacacgctacgataaatacctgtgaaatgttcttaatatcttcctcactcaagcccatatcgctcaggtcaattctgccatctttgatcttagaattcatcgtatccaagatagcctttggctgctcatgaatctccttcatcatgaaatgctcatagccacccttttcggcagcttctgcatcccatttgatctcaaccagatcttttgggatctcatcgccatccagattgtaaaatgttgccttaccgtcagccagacgaccaagctccatatttccaatgtaataaacatttcttgtatatttcaaaatagcaggaacatccgatgcgatatagcaattcccatcagcaataccaataatcatcgggctgtcttttcttgcaacatagatttcatttggatactcttcaaacatcattgcaagtgcataagaaccacgaatacgaaccatcgcatgattaatcgcatctaccggtgtatgttcatatttcttgtaatagtaatccacaagcttcacagcaacttctgtatcggttgaagaataaaaagaataaccattcttaacaagcttcgccttcagctcctgataattctcgataattccattatgtacacctacaacatttccatcatcacttgtatgaggatgtgcatttgtctctgatggttcaccgtgcgttgcccatctggtatgtccgataccacaagtgccaaatacagcatgtcctgcatctgtcttctcaatcagacctttcaaacgtccttttgccttaacgatctttatcgctgaggcattatctctgacagcaatacctgctgaatcataacccctatactctaactttgacagaccatccaaaagaatcggtgctgcctgttccttacctacataaccaacaattccacacatttgtttattctcccttgctcattgttatttatcatttgaatcaatgattaaatagattacttttgtcaatctcatatgcgattgtatcactctttgaaatgatattcaatctcttcaatttgaattcgattttttcatgtgctggtaaaaaatagtcaaaaccatgctaatagacttaactgcattcaataatgtcagcttctattgtttttctaatacaatatttataaatctatctgactgctaatgctctcttgtcagtcatctgccttattttagttttctcttacctaacatctaacatttaaaatctaatattccatgtgcatatgcagcaaaatccgtatttcatcgtattctatatgtacactccgatcgctttatttggacgtcagtttcaatttcattttctacaagcaattttctaacatctgcttcagactcaaaagtagatttttcacaaatcctgaatagtctttaaatgtaggacgaatgcacattatccatgccgatgttccctgttctttcaatgccctatagcaaacatctgtcatttgtgcttcaaattcttctgaatgatatataacagtatcacaccctatggcatttgattgaacagtgctcggatgcggtttctgttgcctaatgccgtcattatgaataaaccaatttatatcaaatcctagtgacaaccctcttgtgtgatctccatactcagtccattgagaggatatatcttctttctggcaaaaacacactccatacggtggtccagtttggatttctgtcttgtactgttgatcaatcagctgaatagcattatccaaaacatcctttggaatgtcggtttgctttaatcttttcttgacgccttcccaaagaacaacaaaagttctaattacttcctgctcatcattagaatctgttaaatcacacagccaaagcactttactctttaaaatactcttaaacgtttcaactgtacaataatgataaaccagatatgtttcactcattcacaatcacctcagtattttcaatattgcaagacacatctactactcctaccgctacatcaagccgccgaacattcccccactgcgttatagaagatgtctgatagctgtaacccatcatgatcttgctgcttttatcggacataccttaatgcattgatagcaccgcacacacttgctttcatcaatctgcggatactcaaatttctcttcatcctctaccattgaaatagcttctttcggacaaatagcatagcaggctgtacatccacagcattcttcttttcttttatatagtaccggtatttctctttccatatccaatcactccaagattgtattttttattatagtaatcaaccagcttaacaactacttctgtatcagtctggctataaaaagcgtaaccatgcttcagcagtttttctttcagttctgtgtaattttcgacgatactgttatgtacaccgactacctcggactccactgcaccagatccagaacgagtacagttaccaaaaacatgcggatgcgcattaatctggcttggctccccgtgtgttgcccagcgagtgtgtctaataccacaggttcctttcaatgccttaccgccagctgttttctcaatcagattagacagacaaccttttgctttcatgacctgtgccagactcacgcaccagaatacggccagtatcgctcagtgcttcagcaaccttgggcaccgcttcctgtgcagcaggatcattctgtgcggctttcttatcggtcacaaggacattctccaacacctgcggatagattttcaacggtaccgccagttcactcatcgttttcttcttcgccaacatcacttccatcatcttcagactggtcaggataccatcgtcagtggttacatacttagagaagatgatatgaccgctctgctcaccaccaatgcggcagccgtttttaaccatgtattcatagacatatttgtcgctcacagcggtcttagcgtaaccgataccctactcatcaaatgctttgtacagaccaaagttggacatgaccgtagtaacaactgtattattcagcagtttgccgcgttctttcatatagcagccataaatgtacaggatatccgttccaaagtatttagacattttttattctccttacaatcaaacacgaaacacaaagagtaagccgtattctaaattactctctgcccccccgatcactcgaagcatacttttcattattttctttaccttccttttaactcttgtttttaaagaatatttaatcggagctgcatatttttcttccaattcttcaaaactcattgtgtacatatcgtcaaaaaaagtatctctttgtgatggccttatacacgacttatattcagctggatttccttttacaccagcttcatatgtcacttcttttaatttcatttcgcaactgatatagttaaatatttcttgtcccttttttgttcgaattaatacgagagatgttcctaacccgtcattcatttcaggagcaacatctttgattccccaaaaatctgcaattgttaaatcagactttctttcttccttggccgcacactcatagcaggatggccgcaggcagtaatctctcagaaacatctgcatataaggatctttatctctagatatatacagtttcttttcttcactctgcggtatatttttaagcatctctttcatgccaaaatcaacccaaccgtcatccttacaacgaaaattaatatcccttagcttgccaccatttttcttttcctggtattctgcgtatttcttccatagagctggtgatggtgcaccatggcaaattacatctacacatataagattgtcataatctctttcaagaaaattctttaatccatttacttgacagcctgttccggtaaatagtacatgtcttccagatattaaattccttttaacactcttaaacgtatttcctatctttgcctgaagatattttgatccacgtagccttgccattcccacttcatctgtaactgcaataaactctgctgaatagcaatcctcagacattgcgacaccatacacaacaccttgtttattaagcacatactctgccagagaggaaaaaactgccccagaagaactgttcaatctcaaatctttatttatattgtaacaagcatatactttttctggcttcattcgcattcctcttctataatcatttcctaaaaattttcctaattggtcccataactagctgtttctcttccgcattcacccctaagaaaaacatcgaaagtgcatacacgatcatatatataattgcaaacactcccaatttaacgagtcccgtaatactggcaaatttcataatgataaatccgactacacaaggtgcaatcaatgcagggataaactttgcaatttctttccaaaaataaatcatgttcattccaatacgggcatgataataccaattcatgaagatagcattacccgcaataagagaaatagctgttccaagcgcagcaccagctggtcccataagtttaatcagcggaatgctgataaatatgttggcaattgcaattgccaaatagacaactgcccttgccttatgcatattcttggctctttgaatctcaattccaagattttgtattaagggaactgtaacaggaataataagcaacagtgccacagcatacgaagcaccgtattccgtccctgcccaaatttttacaaagggaactccaaaaaatataaatccagacaaaatcagtcctaaaaccataaactgaattcgtccaacctttgtaaaaagtttagttaattgatcattatcatttgtctcggcaacaatacgattaacttttggaacaaaaacatttgacacggacgaagaaaactgaagatataatgtattaatctgtccgcctactccgtatacggcaactgctgtcgtaccagcaaatctacctaacaaaaatttatctacgctccaattaatttgatcgataatctgattcaggaagatgaaaaatgtaaacacccacatttccttaagcaaactaagttgaagtcctctaaacgcaaatctgatatgtaattttctaaaacaatagaacatattagatatcaataacacaaatgtaagaaatgttgttacggataccatgcctattgatccgtaccccataataagtaatggcaacgtcaaaaaaggactaaataaattctgaagaagtatcagcagtttttgaaacagaaacttttcgtgcgccgtaattgagcagttaaatacacaattcggaaacgtcattgcaaggtttataatgagcagtcccatcaaaaccttagcggtagcatattcgctttctgtaagacccgtaccaaaaatgccacgaatttttcctatcattacaagtccacataaaacacagataacagaaatggaacagaaaataagcataaacattccgttcaaccttgcaacgccatcttcatctttctgtgctttataccttgaataaaaccgtaagtaggaacttccaaatcccaaacttaaaagactcaagtaagaaaccaccgaatacactaactgatacaatccgtattcgctttgtcccaaaaggcgcaacataataggggtgtaaattaaactaactaatatttttactaattcaccagcatatgatagtataacaccggcttttcgctgattaatcatatttttcatttttcaaaattttctattctaaacctttcatttattagactcatttactacacaaacctcatcctgtttgaaccccaatataattttagcgacatacaatcaattcttcaatgcgctactcaaaaactctctggaagatttttgcatagtaagaacatttttatcgacaatcgagtaatcgattggattaactgttttggtcactaaattttcattaatagaaatgacacgatccggcgttccgtacagtttcactaaatcatatattctaacgttcatcaaatcttcaggattatttgttggtctctctaacaaataaaactccttatgaaaaacataggaaaatacacctgcatggaatgaatctgttacaacaatttctgcgtgctggataagactaagaaattctggaattccaatatcatataactgttcatcaccaaaatgccaatcctgtgtcttaaactgaaaaacactgctattaacaatgtgtggaagcgtgacaagctttaatccttttttcttagcaaattcttttatttgttttctttgatttcggtcatcaccaagcatataacaaaaaatatactttccattgatgcactgctttcctgctaactcatgccaactttctctgtctactaaaagtgtcggatctaatacatgttttgtgttatcaaaaatgcaccttttaaactgctccaccgttgcctcttctcttaacgaaacagcagaatatttagctaatgcctttttcatatattgaatatacacatccggcaggttgcttaccgatacgcttgatgcatatgaaaaaacaattttatgatctctagcatttaaaaaattgaatacatatccatcatcaaccacacctggtttccagatctgatcgcttccacttataaaaatatcatattcctttttacactcagaaattgtttcttctgtataaactttagaatgcctaatagatttttctctaaattccgatactttttctgtacgcgaattcaagcattctgaataccgctttgcaaagaatcttgttactatcttagaatatacgcgccatacaacttcagcaatgcccatttttaccagtttctgcattttcgtctgttgcggcggcagatataacggctttatattctctcttttataagagattagttcactatcatatcccaattcactaatatacttatccaaagcataggcttgcaataagccaccatagtttttactattataataaagtgaaattatacctacttttttcatctgaccttaataatcctctcacttactatctatgaacagcattcaaaaaaccatcataaagagtaaccaatgttattttgcttgaatcaatgttataacctgcttcgtttatttcatccaagtgtgatgttcttgttttttcccaatttactttttcattcatcatcctttgtgcccattcaagcggagtttcatttaaagaataatacctgatattttctgtaagttttgtgtcttctggaactcgatctgaagcaaaacaaaataatccagacgtctgtgcctcaaccgcaaccattcctaatccctccattttagaaggaaaaagaagtatatccattgcagaataccatttttcaacatcacccacacttcccataaacaggcatttatccgctatctcaagctcttttgctaactctctaaccggttcatccagttctcccgctcctagccataatagcctggcatcaggcactaatttctggaattcagcaaatactcttactgaaaaaaacggattctttaaataactcaatcgtccgactactccaactacaacagcatttgccagcccaagagattctcgaatttgatttctattctccttgttgaacacatatttttcggcatggattccattggggaggatcttaaaatttcctattccaaagatttcgttgcctgctgctgtagaacaagctaaatgtgcattagacaatgttgaacacaaattatcaaaaacaaaagatttgattttatttttgtaagtatctgccagcttctgagcatggctatgatacactctaaccggaactttgtttttgtaagcagacaatagaacggccgctccattatgattcggcacatttacatgaacaacatcataccgttgccccataatttcatccaaaaatttcatcttctttttgctaatataagaatctgcttttggtattaaatacaatttacttccatttctaatagcttttttttcgttagctgtatcaacattttttagcactaaaaaatcaacacactttgaacttttaatcagttcatcgtaattattcatgatactattcgttactccattattttgagtaaaactgctaaccataataagtatttttttatctttcatattttcgcactctcacataaattgatatggtactactccatagaattctgctgccttagttatcgtcagccaaacaaagtaaaagccgaacatgaaatatatgaacgctctaacaattggtacattggatttcaacttcattgagctgattgcataaggacaaagaatcaaaataaaaggtgtaaagtataatgaaaatctattcagaatattcatgcggaaaatcaataagttaaatgtcgacgctatcaaagccatataaagtaaaaagctttcatttttcgctaggcagtacatactttcatcatctttcaaaaaatgattttctgttttcttttcccacaccaaaacataatagccaagtaaaaatggtacaaatgaaagaataaaattataaatcgtctggagatttatatgtccaacaccttccgaagcacttgtcaaatatcgttcataattgtttcctgttccaaagaaattgagtgcagcagtatagaaattcatataaaacaagtaaaaaactaccattactcctacaccaatgattatttgtttctttgtgaaccttagccgatcaaatagaattatcagtatacacaaaatagccgagctgtgaaaggttgatgccagcaaaatcaacaatgcaaattttatataatcttttattcttctttcgctattattcaacaatgtataggcaaccaatatgattgaaatcgccaatccctgcctcatcattgtcataaatcgataataaaaacagctgaacagcataagttccgtacttagtataacatccgttgactccttatagataaaatatccaaatgctgcgcacattagaaaagaagtcacaaaaatgaaaaactgtacatcatttgaaaaaagatgtaagaatctagtaaaatagcaatatccaatttcgtagccaatcgtagttgaaaatgtaggaatctgcgaccagctataatctccaatcatattaaaacgttttgcatagtgccccgctaaatccgttccaacacttggatctcttaaacttgccaccaaaatcaaaacaccaaatgtaacaatcagatatatttttctgcgtctatttgaactgtttgctcgatacaagtttccgtatatatatataaatacagctaatacaaaatatattgccattgctattctctcctctttaacctttttccaccagctctttcagcttcttttttagtccaatcggaattgatgcttttaaagtcagcatcactctttttattccaagactctttttaaattcttcatcgactgcatcataccccttcgcatgatacagtttcataattttctctcgttcctcgctataatgggatggttttctcagttgtccattatttgccgaaattcgtgtatagttggatgcgactaattccaacgaagctgtatctgctattagctccatacctttctctgtattagccaaaacgcaagaaatgccatcatatactctgtctttccactttttatctctaaaaagttccggatgttcatgttcgatgccccaataatctccgatagtaatatcgctataccgcatttcagacgcatatttacagctataacaattctcgcgataagtctcaccctggagaaaatactcgtaaaatgaagaaactcgacaatgaatatgccttgactttttatttataccatatttgatataaaaatccttccagccttttttcttatccctaaattcaaaagtctctacgctatctgaaagcgtgtggatgtaatcattcaatagtttctgactaggaacaccatgacagattatatcaaccgtaatgagattgtcatatttcttttttaagtaacccttcagagcatccacctgacatggtgtaccagaaaaaagaactttcttgcctgattcaaggtcctttttaatacatggcaaaacatcaaaaatatagctctgcacatatttggaaccctgaacttttggaagttcctcaatcgtatcaattcttatgtgcctcagcgtatagtttccatctttcatctcataggctgcgccgtatacaacaccgccattctgaagcatttctgtcgcaaatgcgctgaatgcacctccggaagatgatttcattaactgatcgtgatttgtatttgttgcagcatatcccacaatcggtttaaatgcctcatggttcttttgataattacatactatcttgcataaaccacattgcacacacttgtctctatcaatctggggataaataaatccgtcttggtcttctttcatttttatcgcgtttttcgggcatatactataacacacaccacatccgcagcaatttttcttttcatgaaaaagctctatgttgttcatccggttcacttctccccctatctgcttctcaatcaaaaattcttctgaataaaagatgttgctttcactctttcgcgttcaagcacatcattgacctttgtaaagtcaatcggctcgtatttcttcttatcattcattacacgatgttctgttcctgtaagttccagcacactctgcaatctggaattatatttacctggataaaaaatgaaaaactctttattgaaattcaaagagaaagctgtgcaatgaaacgaatctgtaatcacataatctgcatagttgatcaacgacaaaaattgattcactgtcggtgtgtagatcatttttccctgttcttttaagtggttcagataatagctcattctaacaatcctacagcccgttttttcagaaagttctttagcgaacagttccatctctgaatttggatttaaacggtaaataataatgtatttttcccgaatcattcgaggggcaatcatgtcactccactcctctttattcagcacaagcgtcgggtcaaggatgtgttcaacatttttatatccaagttcttccaaaagttctttagctttattttcacgcaccgaaattgcgctgtacttgtgtacataattactcatttcggcacgttcattttccttaattgagttcataccaatgctgaccgcataaccaactcgtttttttccatcaggagcaaattccaaatagtatgctggaagtattccaccattgtattcgctattccaagtctgatcgcttccagtgcaatacacatcggctaccggtggattcttttttaaatcatcatagtccttatatcttcttgtcagtgatacattttgtgctaaaaaattcacacagaccttatttctctttatattttctatttttttcaatgcgacatacgctactgacttcaatacattttttccaaaatgcttgctctcaagcccatctttgagcatagcatcttcttccgcattcggtctaacatagtcaataatctcaaccttatgccccatcaactccagctttttttgtgttgcataggtctggagcacagagccataatttctaatataatgtaaagttattactgcaacctttgacatattttctccttattatccaactagctttttcttcataaccttcatatacagtgctgggctaacaataaacagcaacatctgaactttctttactgcatgaagttctgatgtcataatttcccgtatattactctttaaatctttcttcacgagcttcacagcctctgaatccagttttcctgcacgaaccatcgcatttgcaatagaaagatcaccatttacgcatttatatcctatagccagatttttcatagaggcacaattctgtgcagtttcatccataatggaggtaatgttgctgttctgttccaaataccatgcgatgctgtgatcagcatgaaatgttgccgcaccctcacgttgcgcataatacgcatagagcgcatacggtacataaacaaccgttctgcttttaaataaggcgcgcatcaaaaattccaaatcctctgccattcttttactggtatcaaaacgcagattctggataagttcccgtttgaaaagtttattccacactgtcacttgaactggtcggctaaaatctgctatgagctcaaatgctttcttattgtcaaatttcagcacattgaagtcatcacccgaagacctgtgtacaagttgatcagtcgcaccatcagtaattgcaaattggcacatagccatctctgcatcagccaagactgcttgccgatacatatcctcaaacatcgtagcagcaacgtaatcatcactatccacaaatcctacgaattcacctgatgccacttcaagtccactatttcttgctgctgataccccagcattctttttgtggattacgataactcgcttatccttggcagcatactcatcgcagatatttccgcaattgtcaggcgatccatcatccacgagtataatctcaatttccttaagtgtctgtcctagcacagaatccagacatctagtgaggaatttctccactttatatacagggatgataatagaaactttaggtttcattgtatcccccccattaattcttccttgtgtttaataacagatcctgctggtacatccttataaatcaaacagtttgcaccgatcacgcaattatcacctatgtgcactcctgcaagaattgttacattacttgctatccagcagttatttcctatagaaacttccttgcttgtgaatccctgtgaatgaatcggaattccagcattcttctcactgtacttatggttatggtcgtatatcttaacaccctcgccaaaaatgcaatcatttccaatcttaattttctttattgacgtcgctgaaaaataattattcacaaaacaattatcgccaaattcaacacgacctgtaggttcaatatacagtttaaaattacctctgaatttaaaatgctgtccgtatacaaatctatctctgtatacgaaacgataatatgcagttatcactatccgtctggcatttattaaaactctatgaacaaaaaacatgacccttactcctcactaagcattcgttcatagcactccatcagttttataacgtgatgttccgaagaatacttttctctattaaaatctttttcaatgttggactgcagtttggttacaagcgcatcactttccatactacagatagccttataaagagcatttacttttttccctgaataaatcagtccattatattcatgctgaatgtaatctttaccggctgagcaatctgaaacaatacacggcagacaatatcctcccattacctccgggatagttaacggagcaccttcataccataccgatgggaaaacaagtgcacgtgcctgaaggatatactccttcatttccgcctgttgtttccatccaacaaactctatcatggggtatttttttttcagatcatccagtctatctccagagccaattaccagtccactcactccggctttagtgattccctcacagaaaaaatctatgcctttctcatacgacaagcggccaatatacaaatattttttatttttgctggcaggaacaattgaccgcagttcaacattgattggattcgtaatcaccatctttttatagcgaaaaggaattcgtttctcagaaacattctcattgaattttgagataaatgccacatataagtctgttcctttaaccagcttgtgcatgccaatctgccggataattctatacagtttatatatgtaacttctcttgtcacagttacacgtcacacaatcaatgctcagtgcttctctttcacatatctctttcttttgaaagtcatagcaacagccgtttggacattgtagaaagtagtcatgcattgtcacaagaactttaaatcccatcctcttaattggaataaaaatggatgaactcagtacctttgaccagccgtgcatatggataaccgtatctttaggatcatactcttttaacaacttctccatctcctgccgtgcagaacgattgtaaattcctctgatgattccacgcaacctgttgctgtcttttattgcttcctcttgattcaggcatataacatgtacgttgctattttttagctcatcacataccgaaccttttcctgtaaacatgacaacattgctgtctgtttctgcaagtgaaacagcacttgtaacagctactctctcagcaccaccagttatatttgcaaaatcacaaacaacaataatatttttaaccttcatgtctacactcttcccacctgattattctatcaacagttcttcaaatttttttcttgcaacattccaagtgaaattatccttaataaagtcacttccattttttccaattaagcatctattggcttcatctgtaagcagatcagtgacccaatctgcaaactccgaattatcgtctgcaacaatccaatctttaccgttcacagcatttatattttcggctccaatgcttgtcgttacaatgggtagtcccatcgccattgcttcaagatttttggtttttattccacttccaaatgtcattgggcaaacaaaaaccttacaccgctccagataatctcggacgtcttctacacgtccagtaaaatacacgtgttctgattcaagcttacgcaattcctccgatacaccaccaccaataaccatgaacactgtatccggaaccttttgcaaaacaattggtaggatttctgaaataaaatgtcggactgcattttcattgtgtgctacactcattgctcccaaaaagccgactatgttttttgttgccttaggttcgcggtaatagaaataatccacatccacacctatcggaactgcaaccgctttgtcttgttttaattcctgattaaattcataggcctctttttctgcgacaaatactgttttttcacatatctgtccaatttctttttcatatttttccaacaaagcaacctcattcttcattactgccaatttcaaaggtttgaccagcattattgctcggagaactttcggcacagtataaagaaatgccccgtatggatttattccatcaatgtcattgtctaactgtcttttgtagcgcaacgaaattctatcatccagatctgcaattctaaaagaatctatgtctcttatgtattcagtactgcgaaccatgtctccaattacgtattttggatgttctttttcaacaagttcatctaccatcttttttgcttcaggactccagtacaatgctacctgcatcggtttttcatgcaagataatagaatcttttacaattcccaatatgcggctttttgcagacgcttttggtaggactaataatttatcaataaattccggtttttgtgtaggatcatcactgctctccaaaaatgcagcgacaaccaatcgataacccaattcttctgataaaattctgcaataatgatataaagatgtctttctgccagaagatgccggaaatggaagtcttggcattataaataatattgttttttctttactcatccttaatttctccaaaaaattcattctctagcatcagacacagacaatggtaaacaggaagatgcaattcctgaatcatatatgtctcagtctgtggaactttgatacacacatcactcatctgcgctaacttactgtcctttgcaccggtcaggccaatcaccttcattcctttggcatgagcagtcgtcgctgcatacaaaacatttttactgtttccacttgtcgaaatgccaagaaacacatccccggtcttgccatagccatttacctgctgtgcaaaacacagaagcggttcgcaatcattcatgtacgcagtagataacgccggatgtccatccagtgcaatagcaggaagcgcaccttgcaggttttctacaagaacagttccaagctccttattttccttaacaagtttatctgcgaaatctgcgtctggttttcgagggagtttgaagcctttcattaattcgccaacaatgtgttccgcatctgcagctgatccaccattgccagcaatcagtagctttccaccgcaaccatagcagtctctaagaactttatatgccttcaaaatatcatcttttgccactaaaagttcaggatatctttttacaagtatctcaatctcattcattcgatttctccttaattattctggaaggattaccagcaacaacgacatttgaaggaacgtcatgtgtcactacggcgttagcaccaataaccgcattgtcaccgattgtcacattgcctaatacacatgcaccagctcctatcatcacatgatttccaattacaggtgcaccaccctcattaattcctcctgaccacttgctacctaatgttacatttttcgccaattatgcatttgggatgcacaacacaaccaagtcctctatggtaaaaataggttcctgcacctattgaagctttagcactgattgaatttgcaaagagtatgtgttctagaatatctaagaatcttcctatcttctgtagcactcctccatctcgattaatgagagcatgtgcccacttccacaatatgttcatttctctcctcacttcatacctgaatttacaaatgaagatagcgatttaaccgtaaccatctgaccatagttttcatcaacttcgcttaaaagcacagtcttgcatccagcattgatgccagctttaacatcgttttccccatcgccaatcatccacgactgtgacaaatcaatgttataatcttctgctgctttcaacagcattcctggcttcggtttacgacagtcacattcaatcttcagttccgggcactcaccttcatatcccttatgagggtgatgcgggcaataataaatggcatccaaatatgcgccttcttttccaaggagtgtttccatcttattgtggatttcttcaagttcatcaaaagacacttctccacgggcaataaccggctgatttgtcacaacaattgctagataaccagattcattaatcttacggattgccgtcgcaacgccatcaatcaattcaaaatcatctatctttctaagaaacccaacatatttattgatagtaccgtctcggtcaagaaataccgccttttgtttgtttttcagattttttccagagactctgccctctttataatctgcacatacagagtaatacctctctggagtgcccatgtctttgacatactctggactgtcataacagaacatctttcctgtccccgctaatggtttcaataactgacgatccaaatcgacttttaccggtttaccatttgcgccatttttacctattaaatctgcatcaataccggaaaactccagtactttaggattaataacatgtaaacctgcattcacacgatttttgtagtactgtggccgtgcatcttccttggtcaaccacttttcgactgtgccatttttatccgcgacaattagtccgctatcatagggatgactattcggatgcgtaaaaagtgtaaccaatccgccacgtttccggtgaaaagcaacaaagcggttaaaatccacatcaaacatcgcatctgcatttaggagcaaaaaatcagatgtcagcttatcttttattttgaacagcgcacctgcattgccgagtggctctttttcaaaatagtactcaatatgtacaccaaacggctttcctgttgccggagagtttccagaaccgtcaccaaagtaatccataataatatttcccaagtgacttaccgtcataataatgtcatcaaatccctgatctttcagacatttgatttctcgttccaataccggaatgccttcaatttttatcatcggcttaggaatatcactcgttacagaggaaatacgagtgcctttcccgcctgccataatcactactttcatgtctctaatccttcggtgtatagtcttccggtgtataatggattatacgcgttccactatcttcaaatttgaacggaatatagagtaggtcgcgcatcgcccaacgaacagcatcctgtcgttccggctgtacatagaatacaaggaatccaccaccgccggcaccaagaagttttccgcccaaagcaccagcagccattccttttgcataaagttcatcaatgctatttgtggacaccgctgatcccgtttgacgtttcaacttccatgtgtgatccaacaacctaccgaaatcatcaagattcttttccttatctgtcagaactctctctgcatcgtcaactaaagacagcatttcttttaactgtcctgttttatcaaccttacctgaggcatttactttctgaacgtcagaagaaaagcgagtaaaaccagtaaagaacatcattaaattttgatttagctgcttctttctctcaggtgaaatgatcataggtaggacttcatatccatccgcattaaagttgatacgattaaatccaccaaatgatgctgcaatctgatcctgccagccacctgcttcctgacacagatttcgctccagataaattgcttcatctgccaattttttcttatcagcatattttccttttagcgcataaaaggcattcagcattcctactgcaaaagaacttgatgttcctaacccggaacgtgctgggagatcggcttcatatgtaagacgaatttcgtgcatgtctagcatcttcatcgcattgcgaattgcaggatgttgaatgtcatcgatatttgtcacacgctcagtttttgaataagataactcagtagagtaatcaaagaaacgtggcaggtgtctaacgttcacgtaacaatatttatcaaatgtggtagacaaaacggcaccgccatattctttaaaaaagctttccatatctgttccgccgccaaaaaaagacatacggaaaggtgtctgtgtaataatcatttatttactcctctggttcttctcgaaccaatcccttaaaagtaccttcatatctatgtacacatctgctcttcacagatagtatttctttttccttttgctgctcctagtcagctaagttttcccttaaaatttcattatatccaaaccaatatcacatcgatccttcacccttcaacacaacacccactgtcttgaacagtatcttgatgtcgtttacaagactccattcatcgatatacttacggtctaatcttacaacctcatcgaaatccgtgatattacttcttccgctgacctgccagagtcctgtgatacccggtttgatcgccatacgtcctctatgatgggcggaatacttctcccattcgtcctctgttggcggtctggttccgatcagactcatatcaccctttaacacattgaagaactgcgggaattcatcgagtgaccagtcacggatccggtttccgatgcccttcttgatcgtaccatccggcagcttcttgcagccaatgattcgcggatcatattccatcttgaacatcatgccatccttaacctgattctgctccatcagctctgcttttcgtgcttccgcatccatatacatgcttcggaatttatagatcttgaacttcttaccattcttaccgatacggtactgcgagaagaagatcggtcccggtgatgcaatatagatacatggtgcaaggatgatcgtaagaatgcctgtaaagatacatcccacaattccaccaaggatatcgattgcccgcttcacaaaagcctgatacatcgttatatatgtagtgctgacggtcagtacatgatgaccaagctgtttatcgaatacatactgataattagaaagctctgccggaacacgcacccgcacatgaaccgtgattcccatatctgcaagctgtcccagaagattctccggaatatgcttctcaaatggtatattcacatagacctcatctacccagccatgcatgatctgttccagaacttcgtctgaatatgtatatatactaagctccaaatctgcatattctgtattgtagctttctgcctcatcctcagttgcatctaataatacaacacctgcaacccgatacagattatagtattctgtatccatttctgcaagtaacgcattcagatattctttgactgtcacgatcacaatagatttctttgccacacgatgtcttcgtatatattccttccagagaagtgtaaccacataacccataaccagataaatcatgccaaacaaagccataacctttctggaataggccgcacccatcttcatcatgaacagaacaaatactgccagaagtacaaccagtacagactgcttcacggatgcgattgcttcacgaaaacgtcctcgttgcaatacgcctttatatatatgacatactatggtaaccaataattgaaataatgtcagaagtacggctattgtccgatataacttactatgatacggattctctgttcccatccgtataaaatacgccatacaataagatgcatgcagtgctatcagattcagcactgtaaaatccagatgttttaaccagccctgcggtccttttctatacattgtattccctcatttccctcataaatgtgttcatcatgtatctttatcaagtcaagctatataaatatagttgttaatggcttagaaatccttaacgcttcttagccactaacaactataattcaattcttattaaaagtcaattttctacgtttaagttgagtgtagaaatttccggaaataatactgttattttaggcaaattttccaaagtattcgacgcagttctacaacttatatccattcttctttaacagcgctctcgctgtctccggtgaatccacaccttctgcattcttgatcggggcgaattcatagtctctgacaacctcgaatggcagacagtcattcatgaactgaagcatatcaagagcaagtgtctcgaacttatagccgttcggctccgcaggctttaccaactcttttttctcattcatatatggaataaccttcttcgcagcatgaagcggcatattctcgtttaagagcaccttcaactgatcaaccgggaagatataatttaagatcaccccatagttataggcatagtcaccgtttgcatttttctcaaaccgcatatcatctgttaattcataatattctacgatatgtggctttccatccagattacaaaggacgcctacccgttcatatggatctgctttctttacgacttttgctgccgactggtaatcctccatcatcattgctccaaggaataccgggtctgcgatcttctgtaagacattgtctacagcgaatacattgatataccggatgccttctttatcaagctgttctaccagtcctgcccgtttcatggatgagaaccagccaccatttccatttggtgacaggcagatctttgatggtgcttccatcaatatctttccattaaaatcaacggatggtaccagctcctgtttgaagaaatgcagatactcctccttatattcaaaattcttatgctctgcaaagaaggatgtcgttgcttcgtagttcttatcactggtcatgatatagagatggatccatcgtccaagtgtcctcacaacagtcaggatcgtcttcacctgacattcgaagatatagagatctctcgtcagtccgatattgtatgtgcccttcggcccatcaaatccaagtctggttccctgacctccggcaagcataacaagagcgagctgtcctttctggatcgccgtctcgccaagtaccttgtaagcgaattcgtattctttgatcgtatcaagcgttaatgccgctgtcggtgtgatcgagccggtctttccggctgtgcctttttcttttaacacatcaaacatcgagaagtctatctcgccgatctgtaacagcaggctctgcttctcttcatcgtttagttcatcataataggcgagcacatgctcctgcccgtactttttcaaaatttccaaagcgttttcatatgtcatatattttccctcacatttctatgtcgccactatgtatgaggttaactatactattattccgcaaaacgcttccgctctatcttcgacgtagcggtacataaggctgcaaaggacgcagcctaagtaccgacgctcagataggtttgcttcataatatatagcaaaacctcatactcgtggcatttacgttatcttgttttacactgtcagttaataactatagatacattgtatgcaacaaaccgcgctttgcggaatacaatatctgctttacatagccagttaatgactgcggatatattgtatgtagcaaacctctctttgcgtcggtacttaggctgcgtattttgcagccttatgtaccgctacgtcaaagatagagcggaagcgttttgcggaatacaatatatccgcagtcattaacgtccgttattcaatgcataacacgttttctcacttctaacgtctctttaaagacctttgctacatcctttaatccaatccttcttccgcccctgctgtcatcccggctgtagttcagctcaatcggagcttcgcagatctttctgccatcttttgctgccatggcaaggatctcaatatcaaatgcatatccttctgcctgcatctggctgacgatcggtttgatcacttcttttttgaataacttgataccggtctgtgtatcgtgggtgttcagatggaacatcatctttaacatcagataatatccatagctcataatcttacgcagcatcggataatggagcttcgattccggatgcagcttggaaccgatcacaatatcggcgttctgctccttcatatcctttaagaatcgtttcagcaggatcggtggcagttccagatcggaatccagaaatgcgatgtatcgtccctctgctgctgcgattcctgtccggatggcatgtccttttccaccattcggctgatacgagatccccctgatatgggtatcctgcatttctgcccggtggatacactctgcggtattatctgcacttccgtcgtcaactgctatgatctcataccgtttgacgaaaccggacaacaccctgctggtttcaagcagattatctgttatatgtgttccttcattataggcgggcatgacgacagatagtgtcacatccccttccttatttgtttccatggtcaacgttctcctgtctgacagtcttattcttctatgttcgcctgttttacgataccgtagactgcctctctgacgatttccgacatggatacacctttttgctttgcatactttgaaagcagttcatgtgtatctgtgtcgattcttagtctcagaattgtgtctttccgtttatcggtcggtcttcccggacctctcttgatttcctctgccatctccctgctccgtttctttttatttaaagaaaatacttctttactccatgtatcgcatatcctgcaaaatatccaagtgacttcactgttccaaatcccatcttccgatatacctgatacgtcatctttgcagaatgtaatttggaacctgatttactgttcttcaccatccggtaaagcagtaacggttcattgatgcctgctgcctccccgtatttcttaaggatctgcagccagcagatataatcctcgtgagcatcatcatcccccatcgggaactctgctgccacctcacgcttcatcactacggatgagcagttgatcacatttccatataacatacctttataagtgatcttctccggtaccggcaagatccgcccggtatgggttccgtcctcttccatcagttctctggcagttgaggataataccactccggtcttcttcataacagcgagctgctttgagagctttcctggccgccagatatcatcggaatctaagaatgctacatattcgccctctgcaagctgcacacctttatttctcgttgcggctacgccaagattggtttcattcttatatagtctaacctgtggattgcttttatattctgccagacactccgtcggatcctccggtgaacagtcgtcgatcactatgatctctgatatcacatcctgacaaagtgcggaatcgattgcctgtttaattgttctgctgcaattatatgccggaatgatcacggatacttctggtttcatttatttcttttcctctacactatagaaggcatcctcggcttcatcatgcggatgcttgatgcctgttttctttgtcttgtcttcgcggatcgctgtcgtctgatttgcatcgattccttccgtgttctccttctggaataagatcttgaaggtcagcaggatcagcttcagatccagccataaggaatactgctcataatatgtcaggtcaagcttcaccttatctctcggtgtggtgttatatttaccgtaaacctgcgcatatccggtaagtccggccttcatcttcagacgatagtcgaattccgggaaggtctccctgtactgtgctgcgatctccggacgttccggtctagggcctacgactgacatatcaccctttaagatattaaagagctgtggcagctcgtctaagtgtgtggcacggatcacacggccaaccggtgtgattctgtcatcatgctttcttgcaagctgtgcaccatgttcctcggagtccatccgcatacttctgaatttcatgatcttgaataccctgccatttaaggtcagacgatcctgtttatagaatacagggcctctgtcatagagcttgatcgcaagtgcgatcaggatcataaacggtgaaaagataatgatcatgatcagggatacgatgatatccatcagacgcttgaagatcatatcttctcccgtcagtccctggtttctggataataataacggtgtatcaaacaaatggatcggttctgctcctaagataatgatatccgataacttcggtaccacatacgaacggatcgaatgctcgaagcagtattttaccagttcgtttctgatatatgcctttgtctcacaaaggataacaccatcgtactgtaagattttttcttttaatgctttctcaccttcactgacatggatacggtcagcaatgatatatttgtcttttctggcattgatcttatcaatgaattcggtcggtgtcttatatccataaacaagcagtaaatgtctcggtggatagaacttgcggtacatcatcctgcagacaaatacccatataaatataattataatctctaagaatgtaagctcgatcatgttcagtgccggcagataattacgggcaatgatacacagctcgacataacctacgatatttgcacagaccaatgataatatctgtgaaaaaagaacatccatcacccggaggaagcctactttataaccaccatacagcttcgtaaacagataaatgataatcgcatacataccgattaccgcccagttacctttgttccagaacggaatctggatagcctgagtattatctgcatattcggtataccacattctcgcaaacagcagtacttccgcagctaacagaagcacgccttccgaaaatgtgataatacgtttgtaaatgtctctctttctcacatgtctggtttcttccatatcaatctccatcccaccatgagaggtggtcatcaggtggatatgccacctgctttctcttcattttttctattggtatcgattattttaacagctcacggagcatctggtttacggatgccggatctgccttgcccttcattgctttcatggtctgtccgaccaatgcgccaagtgctttttcttttccgccacggaagtcttcgattgcttttggattattggcaataacttcttctacgaccttacggagtgcaccttcatcatttacggtggcgagtccatgttcttttacatagctttccggttcgatatcatctgtaaatatcttctcgaatacttcctttgcgacattgctgttgatggctttcgcatctaccatctgtatcagctttgcaaggtgctctgcgctgaatgacagctcatctgcatcgatggaatgttctttcatcagacgcatggtctctcccatcagccagttggataccttcttcggatttgctccgagagcgatcgtctcctcgaaaaggtctgccatcttctttgtatttgtaatgatatctatatcatagtccgggatatcatactcttctttataccggatcttcttctcatcccggaattccggctgacggcttcggatctcctccatccactcgtcactgatctgtaccggtacaagatccggatcagggaaataacgataatcctgtgcatcctctttggaacgcattggatatgaatattccttggtatcatcccatcttctggtctcctgtacaaccttttcacctgcctcgatcaggtcgatctgacgttctctctcgttctcgatcgcatgggcgatagccttgaatgagttcaggttctttgtctctgttcttgttccgaattcttctgctccgacttcacgaacagacaggttgacatcggcacgcatcgagccttcatttaacttacagtctgatgctccgagatactggatgatcagacgtaatttctcaagataagcaattacttcttccgcagaacgcatatccggctcagatacaatctcgatcagaggcacaccggaacgattgaaatccaccagtgaactgtctgtatatggatcatgtaccagtttacctgcatcctcttccatgtggatctcatggatccttacgaatttcttcttgccctctacttcgatctctacctttccgtttctgcagattgggtagtacagctgagagatctgatagttctgtgggttatccggatagaaataattcttacggtcaaatttacagttctgtgtgatcgtacagttggttgcaagaccgacagcaactgctttttctactacccctttattcagtaccggaagggaacccggcataccggtacataccggacatgtatgtgtattcggtgcaccaccaaatgcggtactgcagccgcagaatatcttcgtctttgtcgcaagctctacatgaacctccagaccgatcacggtttcgtatactttactcatcttacagacccctttctgctacagcggcaggctgcttgtactctcttgtctgctcaaatgcatatgccgcctgaatgattgctttctcgttaaatgcatctcctaccatctggacaccgatcggcatgccgtctttgtcgtatccgcatggaagggaaatacccggaagtcctgcaaggttgaccggaacggtgtatacatcgcccagatacatcttgatcggatcggataaggattcacccatggtcagtgcagttgtaggtacaaccggaccgaggatgatatcgtattttgcaaatgctttatcataagcctgtttgatcagggcttttaccttaagtgcttttacatagtatgcatcatagtaaccggatgacagggtaaaggaacctaacatgatacgtctctttacttctgcgccgaagccttcggaacgtgtcttcttatacatgttgtgaaggtctgtgtactctgctgtacgatagccgtattttacgccgtcaaaacgctccagattcgagcttgcctctgcggatgcaatgatataatatgcaggaattgcatattctaccataccaaggtcaaattcttccacgatcgcacctttttcttttaatacttcagctacatggtacacagcatccttgatctcaggatccagtccttctgtgaaatagtcctttggaagtccgatgcgcataccttttacatcgtcctttaatgcgcttgtaaaatcattatccgtacgttctacagatgtagaatctttcttatcataccgggaaatgatctctaatatcgttgcacagtctgttacatcctttgcaagtggtccgatctggtcaagagatgaaccatatgcaaccagaccgtatctggatactctgccgtaagttggtttaattcctgttacaccacagaatgctgccggctgacggatcgatccaccggtatcggaaccgagtgcacacggtacttcttctgctgcaacagcggctgctgatccgccggaagaaccacccggaactttatttgtatcccatggattctttgtctcgccataataagaagtctcggttgtacttcccatcgcgaactcatccatatttgtcttgcctacgatcacggctcctgcttccattaatttcacaacagcatctgatgtataggtcggtacgaagtttgataagatcttggatgcgcaggtggtaagtacaccgttctgacacatattatccttgattgcgatcggtacacctgccaacgggcctgtcagctcgccgctgtcgatcttcttctgtatttcttctgcctgtttgaatgcaccttcttcatctacggtgataaaacagttatattctttgtcgtatgtctttatattctcgatgcaggctttggttgcttccataacggagatctctccggccttgatcttctttccaagctctactgctgtcatactcatcatatccaatgtccgttacctcctaatcaaatgttcttggcaccttatagcagccatctttctgctccggtgcatttgacagcatattctctctgtcgtcgccatttgttacttcatcttcacggaatacattattataagaaaatgtatggctcattgcttccacattctcagtgtccagttcatttaacttacttacatagtcaagcatatctgacatatctttctttgcctgctccttctcctcatcggaaagctcaagcttcgccagaatacctacataatcgattgtttcgtctgtaataaccatggtatgtctccttgtctgggttttattaggcaattgcaatactactctttactatgtttggatacttttgaccttaccaatcaggggacgctttcgctcgtttcggtctgcagcggtactaagatgccgcttatgcgccatctaaggaccggcgacctcaaatgcccctgtattagtaagtcaaagtatccaaacaacattcagactattgttttcgcaattgcctactattatttatagtaccacaaaattagttagagtgtaccacataactccgttgtttgcaagtctatgtccaaatgaagtcgtcctgctgttcagcaacaattgtccattcaaaatatttcatttatgacaaaaaatggaagaatgaattactattatgaagcaagcctgtccactctgtgtaacttcgaactaatctcgacaaaacctcgataagatctcagttattcatgtcggtacttagtgaactgctgaatgcagtgaacttagaaccgctacatgaagatagagcgaaagcgtcttgcgtaataatatgtaatcattcttccatttttatgtcatcatttattaaatggacaattgttgcgtccttttataacatgccctctaaggtctcacggattgccttgatgaagttctcgctgtttaatacagttggattctcaagggttgtgataagtgcaagatcctttgtcatctttccggattcgatcgttgcgatcgttgctttctcaagcttgtttgcgaaatcaaccagagcgtcgatgccatccagttcaccacgttttctaagtgcgcctgtccatgcaaagattgttgcaacagagtttgtggatgtttcttcaccctttaagtgcttgtagtaatgtctctgaactgttccgtgtgcagcttcgtactcatactttccatccggggaaaccagtacagatgtcatcatggccagtgaaccaaatgcagatgagatcatatcactcattacgtcaccatcgtagttcttgcatgcccagatgaatccaccctgggatttcataactcttgctacagcatcgtcgatcagtgtatagaaatattcaatacctgctgcatcgaatttctctttgtattctttatcaaagatctcctggaagatatctttgaatgtatggtcgtatttctttgagatcgtatccttggttgcaaaccagattgtctgcttgatatccagcgcatagttgaagcagcatcttgcaaagctttcgattgacttgttgatattgtgctgtccctggatcacacccggtccgtcgaattcatggatcgtctctttgatcactgtgccatctgcacctgtgaataccaactcagccttaccggcacccggaaccttgatctctacgttcttatatacatcaccatatgcatgtcttgcaattgtgataggagccttccagttctttacacatggctcaatgccctttacgatgatcggcgtacggaatacagttccgtcgaggatcgcacgaatcgttccatttgggctcttccacatttccttcagattatactctgtcatacgtgcagcatttggtgtgatcgttgcacatttaacagcaacgccatacttctgtgttgcatatgcggaatcaaatgttacctgatcatttgtctcatttctatattcaagtcccagatcgtaatactcggatttcagatcgataaatggatagatcagttcatccttgatcatcttccagagaattctggtcatctcgtctccatccatctctactaaaggggtagtcatttgaattttttccatcttgctcgttcctccatgttcttttattatagttctaattatttatctgtttttatacacgcctagaattatacatgaaaaatgctgctatttccagttttttgaaagttttttacacatatccgtaaattccgcgcacggacacttccccggatataatgatcgactcctgtccatctttatccttcacacgaagtcctccatttggtgcaagtccgagggctgtgtattctgtccggttatatccttcgatcacatagacctgttcatccttgttcacaaggatggaattatattcatccagcataaactgaagatcctgacatttgacaaatgcgtcatacagctcttcaaaatgatttgccacactagcgaccagtttgcttctgtcacagccggttccgttttccagcttgatcgacgtcgccttatctgccagttcttccggaaattccatcatggatacattgatgccgatacctacaactgcatatttgatatccataccttccgaactcatctctgtaagaatgccacagatcttcttgccgccgactacaacatcattcggccatttgatctgtgcctgcaagcccgctgtatctgcaagagcacgcgccgttgcgagtgccgacaggatcgtaagtctggatacattctcgatcggcacatccggacggagcagaaatgtcatggctatgctggttcccttcggggtgctccatgcccttcctcttcttcctcgtcctgcattctgttcatttgcaacaaacaacgctccgtgtgttccatctgtctctcctgcaagctttgcccgtatatttgtggaatccgtctcatcataataatacagttctcttccgatcaccgatgtcgtgagtgctgcctctatcttctctttcgtaacgatatccggctctccgaccagacgatagcctttattatttactgcatctataatgtaaccttctgcctttaaggcattgatatttttccagacagcggttctcgagacacctaatttctcacagattgcctgaccggatatataatcactgctcgttcgaagtagcgcaaggattttttctttcatgatttaccttctttctgtctcactttcctgataaattcccatcttctttaacaaatgataatagattgcatcgcacttctcacgtttaccgctgaacggcagtacgaattgctcttttcctatatctatctttaatatgtaatatggcaaatgtggatcagggatgaccagattcacatttgtaatcttatcgtatggtgtatgataggatttccttcccttttctattaccagttcatcgtcttcaaaacgataggtcagatcaaatgccgatttgcgaaatgaagatttcacaagcatcaatccatatgccgcaagtgcaagtccaaatgccagcttgaatatccgtccgccggtactgccatgtgttttgatcattaacagaataaatgctgctccgatagcaacaaaaaagacacccaccatccggtatgcaattctggttgttctgtttttctttacggtatgctgcatgtgttttcctcgttctttctgtatattttctgttctctattatattttctacagtcataaaaagcaagccggagtaaacatgacattttgtactaaaaccatcgacaaaaaacatgatttttaccagattgatttttcttataaaaagaagtaatatccagtatgcatttagaatatggaagtcgttgcggggtgttggccggagccatacagacattgccaacagggaacgcttccgctcgtttcgtcctgcagcggtactaagatgccgcttatgcgccatcaagtaccggcggactcaaatgtccctgtattggcaagtcatatggctccagccaacaccccgcaacgactaaactaacacaaggaggtaaaatcattgaaaaacttactgaaaaaaattaatggttccaaggatctgactgaaggcaatcctatgaaactgatcttgaactttgggctgccattattatttggacttttgttccagcaattttataacatggtcgatacgatcatcgttggtaaatttctgggtgtcgatgcgcttgcggccgtcggttcaaccggatcgatcaactttatgatactcggtttctgcatcggtatctgcaatggttttgccatcccggttgctcaggcctttggagcaaaggacactgataatatgaagaagtacattacaaactgtgtctgggcttcgatcttcttcgctgccgttatgacagttgccgtcggaattcttaccagaaatattctgatctggatgaagacaccggacagcatcctggatcaggcatttatctacatatttattgtatttatgggaatacctgcaaccttcctttataatatggtttccggtatcctgcgttctctcggcgacagtgtaacccctgttgtctgtctgatcgcatcctccctgttaaatatcgtactggatatcctgttagttcgtccgatgggtgtcgccggtgctgctgttgcaaccgttgttgcacaggcaatctccggtgtcggctgtctgatctatatgtgtaagaagctcggatatcttcattttacaaaacaggactgggcatttagtatgcgccactgtctgaccttatgcggtatgggtgttccgatgggacttcagtactcgatcacagcgatcggcagtgttattcttcaggctgcagttaattcgatgggtgaatccgttatcgctgccgtatccgccggaacaaagatttccatgttcctctgctgtccgtttgatgccatgggatcgacaatggcaacctacggcggacaaaatgtcggtgctaagaaaatggatcgtgtcgatgccggcttaaaggcatgtatcaaacttggtattgcctatgcgattcttgcatttgtatttatcctgttattcggcaagaatctggcactgcttttcctggatgcagaagagacagagatcatcaagcttgtatattatttcctgcttggcaactcaggagcttacatcctgcttgcccttgtaaatatcgtccggtttatgattcagggactcggctactccgcatttgccgttatcgcaggtatctgtgaaatggttgcccgtacgatcgcaggctttatcctggtaccaaaattcggttatgtctttgtagcactcggcagtccgctcgcatggatatttgcagatatcttcctgattcctgcctatatctatgttgtaaaacgtcttcgccgcaagttcggtcaggagaccccggcgatgctgaagcgttgtcaaaagaaccttgcataatatattctaatacagttttttccatataatcaaaaaaccataccggcagcatatatattttttatgtgatttacctatccacccaaatata

SEQ ID NO: 1078 - DNA, 13042 bp, unidentified
  source 1..13042: mol_type = unassigned DNA
ttattcatcccttttcattgaagtttgtcccgttttgattgtcacacctgaaccctcggttgaaatgacaaccgttccgttttcatcggttctgtatgtttcaactccgaattcatcaagcagctttaatgtgcttttgtgcggatgtccgtagctgttatccttgccgagtgaaataaccgcatatttaggatttaccttttcaagcaacgcttttgttgttgatgttctgcttccgtgatgacctactttaagaacttctgcactcatatctgccgtaacggtttcaagctctttcttttcggcatctccgaggaacagaaaactgtcgtttttataagttatttttagaattacagagcaattgttcagatcatcctcgtcaattgttacgggagcaagaatatttatgctgaaatcgttgtcatcaataatattcatacccgctttggctgacttgactttaagtcccttgtctgcaattgccgtgagcagattctcataggtcttggttgtggttgtaaccttaggcatatagatttcgccgatattattatgctttacaacataagccattgaaccgatatggtcggcatgagggtgagttgcaacgagataatcaatatttgtgtatccgagattattgatatattcggtaatacttttaccgtacatattttcgcctgcatcaatcagcatacacttttgattcggcagttcaataaatatgctgtcaccctgtccgacatcaaggcaatgaaccgataatgttccgatttctgaaacagttgttttgctttccgaatcggaaccgttcacattgatattgattgaacacgaacaaagtgcaagacaaattaccgcaaacaatgcagtaagctttaatattaattttgaattaattttaatttttgacacctcacaattctgagtcttattgtacaataaacaagtcaatatttcaagaacagaaaaaggagagcctttgcgactctcccctttcgattatcattatgcggttttgcctgtataaagctgatagtatctgcccttttgttcaagaagccgttcgtgtgaaccacgctcgatgattctgcccttttcaagaaccataatacagtctgaattcttgattgttgaaagtctgtgggcaataacaaaggttgttctgccgtgcataagcttatccatgctgtcctgaaccatcttttcggtacgggtatcaattgaacttgtagcctcatcaaggataagtgctggcggatctgcaacagcggctcttgcaatcgcaagcatctggcgctgtccctgactgagattgccgccgtcacctttgagcagggtgttgtagccgtcaggaagttttctgataaagctgtctgcattggcaagctttgccgctgcgatgacctcttcgtctgttgcgtcaagtctgccgtaacggatattttccattacggtatccgtaaacaggtgcgtatcctgtaaaactataccgagtgaacggcgaaggtcgccttttttgattttgttgatattgattccgtcataacggattttaccgtcctgaatatcatagaatcggttaataaggtttgtgattgttgttttgcctgcacctgttgaaccgacaaacgcaatcttctgaccgggttctgcgtacaaatcaatattgtgaagaacgattttatcatcagtataaccgaagtcaacatcgtccataacaagcgcacccttgagttcacgatactctgtttcgcctgttatgctgtgagtatgtttccaagcccacatacctgttttttcctcagtttcaacaagcctgtcgccctctttgcgtacattaacaagtgttacatatccgtcatcaacctcaggctcttcgtcaagaagtttaaagatacggtctgcacctgcaagcgccataacaattgagttaaactgctggctgacctgattgataggctgggtaaagctcttgttgaatgtgaggaagcttacgagtttaccgattgtaaatccgaggaagttgttgagagcaaagatacaacctacgattgcacaaagcacatagctgatgttaccgatttgtgcgttaatcggcataaggatatttgcaaacttgtttgcattgtatgaactgttgaaaagcctgtcattaagctcattgaattcttcaatgctctttttttcatggttaaatacttttacaaccttctgaccgttcatcatttcctcaatgtaaccgttagtcgcaccgaggtctgcctgctgttttgcaaaaaaccttccgcttcgtgacgcaagctgttttgttacaaaaagcattaagccaaccattacaagtgtaagaattgtaagaggaacactgagtgtaaacatactgacaagaacggctatgattgtaattccgctgttgaaaagctgaggaatactctggctgatcatctgacggagggtgtcaatatcgtttgtgtaaacgctcatgatatcgccgtgagggtgtgtgtcaaagtattttatcggaaggctttccatatgttcaaatatctgacaacgcaaatcacgcattgtaccctgtgttacataaaccataatttttgcgtagataaacgccgacgccgcaccgattgcatagaaaattgcaactcttaaaattgctccgagcatcggtccgaagtcacggctgccgctctgaatcatcggagtgatgtaatcgtcaataagattctgaataaacaatgaaccctgaacatttgcaagtacgctgatgaggatgcagacgaaaacaataatcatctgaaatttatattttttgaagataataccgaatagtcttttaagaacctgacctgaattttcaaccttttgtgcaggtcctcggtttcttcttcccattggtcccggcataattacagctctcctttcgcatcaaaatcaccgttgccgcttgtctgggcaacataaatttcattgtaaatcggactgtttttgataagttcttcgtgagtacccactgcgcttatctcaccgtcatccattacaataatcttgtctgcgtgtgaaacgcttgatacacgctgtgaaataatcagctttgtagtatcggggatattctcgctgaatgccttgcggatacttgcgtctgttgcggtatcaactgcacttgtcgaatcatcaagaataagaattttcggatttttcagcaaagctcttgcaatgcaaagacgctgtttctgaccgcccgaaacattagtaccgccctgttcgatttttgtgttgtacttatcggggaagctttcgataaacgcatctgcacacgcaagcttgcaggcattgacgcattcttcctctgtagcattttcgttgccccatctgaggttgtcaaggattgtaccgctgaaaagaacattcgactggagcacaaccgaaaccttgtcacgcagagtttcgatatcatagtcacgaacatcttttccaccgaccttaacagaaccttcggttacatcataaagtcttgcaataaggtttacaaggcttgtttttgaagaacccgtaccgccgataataccgattgtttcgcctgatttgatttttaggttgatatcgttgagaatcggtttttcggcttttgtgttgtatgagaatgaaacattgtcaaactcaatgcttccgtccttaacctcgtaaacagggttttcgggatttgcaagcgttgatttttcattaagcacacctgcaacacgcttaccgcttgcaatgctcattgtgagcattacaaacaccattgccaccataagaagattcataagaatgttcatacaatatgtgagcatacttgtaagttcacctgttgtaagctcactgcttacgatcatatttgcgccaaaccagcttacaaggatgattgatgcgtatgaagtaaccatcataatcggtgatactgttaccatggcattttcagccttaacaaaaagtctgtaaacattgtcggctgccttgcggaacttgccaacttcgtgtttttcacgaacgaaagcctttacaactctgattgaagttacattttcctgaacgcttgcgttgagttcatcgtacttttcaaaaacctgactgaaatacttgtatgttgccttcataataaaggcaagaacaacagaaagtaaaattgttgcaatgagataaatacaggcaagccttgcattgatgatgaatgtcattgccattgcacagatgagcgatacaggcgctctgaaacacattcttaaaagcatctgatatgcattctgaagatttgttacatccgttgtcatacgtgtaacaagtcctgcggttgagtaacggtcaatgttggcaaacgagaatgactggatatttgcaaacattgagcgtctgaggtttcttgcaaagcctgccgaagcttttgcaccgtagataccgcccatcatacctgcaaacaagcccgtgagtgcaagtgcacccatataaccgcccgttatgaatatgtgctgcatatcgcccttgttgataccgtcgtcaatcattgatgacataagaaacggaataattgtttcaacaattacttcgagtatcataaagaacggagtcagaacggattctttgacgaaacctttgatattttttgccaaagtttttatcatacttatctccttccgttttaatttgcattttcaagtccgctgagaattttatttataagaaaaagaaattgtttcttttcttcttttgtcagcagactgtcaagcaaagtttcgtttttggttatcatattttcgattttgtaatgaagttcaatacctgtttcggtcaagacaagttttttgagccttgcatcactttcaacgctctccctcgttatgtaatttttcttttccataagtttaagaatacttgtaacggttgaacgggcaattgaaaatgcgttttcaatatctttttgataaacatcttcatcacgatgatcatagagatatgcaataatccagccgtgcataagagtcagcttatccacacccttatccttggcggaatagattaactttctctgcaaaacctgattaagcaccttgatttcgtgaccgattgaatcattaaagcgtttgttgcacttacagctttttacgcttttgtcatcacacattatttcacctccgaaatcacacttatgagatattgttctatatagaatagttcgatacaaaacaatttgtatcagtaattatagcaccttcattttgaatgtcaagagaaattacaaataattattcaaagtttcacattgctgtcacaaatcaaaagcgacagctaaaattacagctgtcgcagttaaaatcatattcactttgcacaaattatgacaattgtcacttttttaggatttctgtcgcatcacggatatcgggggttttatcaccgttaatatcacaaacaaaaagagcatactgattttcgtcataatcgtcaaaggtcaggtctttgataagatacttctgaataagctcagcgtccttttcatctgtttttccgtcaatgttgaggtctttcatatttttgggaacgcaaccgccgtcaagtacaaaatcaataccgctgtcgttcatgagttcatcggctctgtttttgtcaacatcaacaatgtaaagtcccaatgtgtcaaagcattgataaacatactttgcatcctttaaaatctcggctttcttttcttttgccctgtcatttgttatgcctgcaccttgaagatgtgaatcaagctttgcaatcatctccattgcgtaatcgttatccgtcattgcacgctcgagatcaacaccgtttgtcatatagaaccaaccgagcgaacccataacatatagattattcacatcaagtccgcagtaaacggcaattttcccgtccttgtactgaccttttttcatcgacattttggaatagcccttgattatactgtagccgagcttcattccgtcctcgctgatatagtcaaggtcaaacgccgctgcacttgtgcatgaaaagcacgctccgccgatgagcattgcaaatacgagcaatattgaaatcacctttttagaaaattttcttttcataaaaaacacctccattggtagtatcaccgaacggaagtgttttattttgatttatttacttttatttgacttattattttttctttcttttcttatctgattaagctctgaacctttggtttttacctttcttttaaattttgcaacggtaaacgcttttatcctgtcatgatagacataattgatttccgcacaaaccataagacaaaccataagaaagtaaaaccaaatcataataacggcaattcttgtaagacctccgtacacggagaatccgttgaaatccgacacataaaccgaaataccgaacgaaagaacataccacgaaaccgtgcagagaaacgcaccgggcaactgtgacttaaagccgtattccttatgctcactgcgtgagatgttcggaaagttcctgtaaatcagcgcaaacaataccgtcagaaacaaaaagataagtatatatctgagatgatagattattccgattatgtcaggcaacgattttagatgcggtgaaagaaaatcgttaattgttgaaccgaggacaataagtacaagtgacgcaagcaaaattacaaacaatgcaattgtgtagaacatcgcccttattcttaaaaagaaccagtttctgttttcgtaagcatcataaattctgttaagaccgtttgtgattgcgtggattccctgtgccgccgaccacagagtgactacaagcgttacaagagaaattcccacagcactttcataggcagaggtcagaaagtatgttaaatcatcggcaatttttgacgaaaacacactgctgagtccgtgataaacaaaatcaatcggaatgtgcaggttctgcaaaagtgacacaaagaacattgagagcggcacagccgataatataataaagaatgccgactgtccggcaattgcaaaaatattatcgtgaacgcatttgcttgttatcggttcaaatctgcctgttattcttttgtaaagttttatcgccttgtcaacgaattttatcctcaatgtgtcacctcccctatttctatatgatatatatgataattattttataccgtttttcttcatctgcacattataagaaattctcgtgagaagtttttcgggtgcaaaatgtctgaaaaacgacaccgctttcatttcaaagccgggtgtgataatcattttgcccttcatggtcatgtcaacggcataccttgcgacaaacttcgggtcaagtcctcttatgcagaattttacatccgcaacattattgaagttggtttttacgggacccgggcaaagtacggaaaccttgacatttttattatccctacgcatttcctcatgaattgcctgagtaagacggacaacataattctttgatgcatagtagcttgcaaatgtcggtcctgcaagaaatcctgcggctgaacctacattgagaatatatccgctgtttctctccgccatatctttaagaaaaagctttgtgagaatgtgaaccgttgaaacatttgtgtgaatgagttcaagctctctttcaagcggaacatccaaaaattttccgtatgcaccgaatccggcattgttgacaagaaaatcaatctgttcattttcattcttaatatgctcatacaaatccaggctgtcactttctcgtgaaaaatcaagcgtaattaccctgacattcacatttgaaagttcctctttcagcttgttaagcttatcggttgagcgtgatacaagaataaggtcataaccgagttctgcaagatatcgggcgatttctttacctatgcccgaacttgcgcctgtaatcaaagccttcattagttttcatcatccttcggtttttgtgctgtggcacaaagccatgttgtaccttccttagtgtatgtgtttatgttttcaaagcctgccgattcaagtacggctctgatttcctgcggagttaccgacttgatattcagcatattttcaaccttttcccacttgaacggatcatcgtctgttctgagcatttcaaaaagcagcataaccgttccgccctgtttgagaacacggaaaacttcttttacatcattctccttatcaggccagaagtagtaggtttcaactgccgtgatattatcgaatgtattgtcatcaaaaggcatatcggatactgatgcctgaagaattttcgctttgttgcagagtatattttttgagttgagtttttcggaggattttaccgagagttcggaatagtcgattccgtaaaccttgccgttggcaacaattgagcaaagtcggtcaacggtttttccaccgccgcagcctatgtcaagtacagttgcggtgcgttcgatattcatatgttcaagtccccatgaggtgaggcttgaatgtcctttattcatagctttaatcatcattttgccccaaaagccgcttggctttttagcattctccaccaacttgcggtatttcataaaaatcactccaatctgaaattttcatctgtttactgtcttattatctattattttctttttcttcctgttgaattaagtttttgaagcagaagtgcaaggaaaaatgcaccgcctactataacgatgaaccaaacaaatgacatatacaacggttgattcatcacacgcaaaaacgggtatggaccgtcaaatgcaccaactatgttaagtataataagaacaatcgcatatattaatgtagggattgtagccgtgaaagctgattttgtgttaaggtgaggttctttttcaaaaagcacaaacgataaaattgtaagaatcggacacaaagtatgtaaaaaggtgaagtctttgttaaaaagcatatagagccaaccgtttacgccctctcctcgcatcggggaaagtacggcaagaactacaataaatgttaccgaaagcacagccgccgccatatatttaaacatctgaaccgagtgcggaatttcttttccgcttttgagatatcgcacctgaaagcctgccataaccgcacaggcaacaagtgcaaacaggttgctgtcctcagtgtaatatacaagcggatagcagcctattttgaaaaacacgataattattgcggcaatctcacaagcgataatcgcaagattaaatgccaaagctgtttttgttcgttttattttaagtgtattttgcatttttaatccttttctatattattttgttaatttctttcaatcaatgccacgctttccacatggctcatctgaatacgatgaatttcttggctgattttgggttcaagggaatacatccacagcctttttcgtggttctgccgtttgtggggatatgtccgtgaaactgaagttttcgcattatctatttcaatgtaaataatgctttttcataatccttaacataatacttgatattagtttttcctttttgcactacagtatgtccctcagtttcaagcattttcttttgtgcctcaattcctccgggatactttgcatttaattctccattcgcttttaatgttctccaataaggggttttatcctctgtgcgctgataactcgcccatgcaactattgaaacaaaaattccggctgtgataggctctgtaaaatcggcactgcttaactctgcaaagtattctcgtatttttccgagagtaatcactttaccatacggaatttttttcattactttgtcatagtcgattggcggtgcaaaatacattttatctccaccatattttttaatactcttttcatctgtgattatttgaaatttaggcatatccttgctatccataagcatagcattaaaatcctttttatcttcatttgccataatgtatcacctccaagccaatcatatctcaataaacagactcatgcaatgagacgcttttataatttctcgcaaaacattaaaatttccatttactcttctttcatcttttcttccagttcaagtaaatatctgtcatagtcagacataaacaatctgtcctgaatgatgcgatatttctcaaattccgtttctgcgtgaagttttgcctgctctgcacttatctttcctgctcctgtgagaatttcagtaccgttaaattcgaggaaaccgtcaagtcttttcgcccaatcctccatgctcataggaatatgacgttcggcttgtaactctgcataatcgagatacagcgatacaatacgttccaaaaaagacaattctttttcagtaagatagttttttgctacagatacatcgcttttcactattttaccatcaggagcattttcccaagaggttagtcccatatgttccttttccgcatccgctcgttcaacaatcagttccgcagcagtatgtctgtgcgtagcatagtgcattttgttctgcacagttttgaaaaagagtcttgtggtttttgcatctttatcatagtcgaaagctgttgcataaaggtctgtaaccttttggtagaattttcgctcagacaggcgaatttcacgaatgtattctaactgacggtcaaaatattcatctgtgaacatcgtgcccttcttcagacggtctacatccattgtccagccctgaatggtataatcttttacaatttgacctgcccatttacggaatcgaactgctcgttcattattaactttaaatccaactgcaataattgcctgaagattataatgttttgtttgataattcttcccgtcgtcggcagttgttaagtatttcttaataactgaattctcgactaattcgccgtcttcaaagattttttttagatgttgattgatcgcaggcacagaaacatcatacagcgttgccatcattttctgtgtgagccatatattttcgtcctcataacgcatttcaaagctatctgcctgatttcccacagaagcaacatatgtgagatattccgcagcacttgagcgaatacttatttcatttttcttctttgccattttgtgcacctccatcaaaaagcatcaccatcggtttcactttttctttttaaataagtcaattcaatatcgtaccccaaaccccaatcatatttcattttaatttgttgcactactcaataatcataataaatatgttacttttgactttcattaattacagaaccttcatcatataccttggttcatattctatatatccgtgtttcggataaaaaacataagattcaaaccactgctcctttggtgtccccaaatgtacttttgaaacagcaatgccgttttcacgcatccataactctgccgtattaagtaactttgaaccgattccctttcgttttaatgacggttttatataaagcctatgcaaaaatgcctgatctgtatcagtaattcttgaacatccaatacatccgactaccctgtcattttcatctattgcaagccaaaacatatcattgcaatcaagatagtttgccttaatatcaagaaggtcaggatttatagtaggttttctacccaaagcatcttttgcctgtaaaaccgtaaaaatcatatcatcacgatagatttcttcaaatttaataattttcacacctttactcctgtactttagtcaacagagccacgctctctacatgggaggttccggagaacatatcgcagggggtgatttctttgggggtgtagccgttttctgtgaagaattttaaatctcttgcgagggttgcggggtcacatgatacatagactacacggctcggtgacattcttgaaattgtctttacaagctcttcaccgcagccttttctcggtgggtcaagaattacgcagtcgggttttaagccttctttttcaagctgaaatgcggcatctgaggcatctccgcagatgaatcgtgcattttcaatgccgtttgcttttgcattttcatttgcatccttcacggcatcttcaacaatctccgcaccgataagctgtttacaggaatcagccattgtaagacctattgtacccgttccgcagtataaatcaagcagaatttcgtcagatttaagatttgcatattctttggctttgccgtaaagcttttcagcctgttttctgttgatctgccagaacgaaaacggtgaaattttaaactgcaatccgcaaagtgtgtcggtaatatggtcacttccgtagattgttctgttttttctgccgagaacaacattggttttttctctgttagaattaataatcacactttttaactgcggaagttcggatttgagcattttcacgagtaaatcttcctgtttaagaccgtttgcgttgacaacatagcacaccataagctcgcccgaaacctcgccaattctgatataaatgtggcgaagtcttcccttgcctgttgtttcatcataaatttccgtgttagtttttgcgataaaatcttttgtgatttcaattacccttgcaaaaatttcgggctgtaaaatacagtcggtgcaattgattatgcggtggctgtggaatgaataaaaaccagtcacaacatttccgtcacggtcaagaccgacaggatactgcgccttgttgcggtatcttgtgatattatccgacgaaattatcggcttgaaaacaacattatcaagaccgccgatgcgtgttacggcatcctcaactctttgctgttttattttgcattcttcttcataagaaatatgtcgccatgtgcaaccaccgcacttcataaagttttcgcagtcgggagtaattctcgccttggacggaacaagaatttcttcgattttgccgaaagcgtaggttttcttaacctttaatatacgcaccttgagttcgtcaccgattgcagaaccctgtacaaaaacggcaatgccgtcatctgttcttccgactccgctgccctcggcagttgccgaagttattgtaaggtttacaatatcgttcttttttaaagtcat

SEQ ID NO: 1079 - DNA, 8073 bp, unidentified
  source 1..8073: mol_type = unassigned DNA
tcagccatttgcatatgcctcctttattacttcttcaaatttttctttgccgacacggtcaatcgtgaacttaaaacgttctcctgcctgtgcattctgttcaaagaatgtaattgccgcatcacagacttttaacagcttatcatggtcttcaataaacggaatcaccgtgttacccttgttgatgtgattaccgaataatccgccaaaggatacgatataaccatgtgtttcatcgtatgcgttggttggacaggccttggtacatcttccgcagtagttacatttgctctcatcaatggaaatctttccatctgttaatgtaattgcaccgctgcggcatgcctttacacagacaccgcactggatacagtcggattctttccactgtacctgaataccacctttaataccaacatcgttttcttcggatttcagacagttgttctgacagcctgtaataccgaatttaaacttatgcggcagttcctttgcaaagtaacggtcgtccagttcttttgcaagagcatatgtatcaatacagccgcttggacagattgccgcaccctgacaggctgtaatggtacggactctcggtccgcatacgcccggttcaacgtcaccttctgccaatgctgcttttacttcgtcaatatcgtctaatttgataaacggaatctctacgctctgtctggatgtcagatgtacgtatccgtcaccgaatttatccgaaacttcagcaatctttgccagctgttttgccgtaagatttcctccgactacacgaagtcttaaagagaagttgtttttttgtttctggcgcatgaatccgcccttttttaacactgcataatctgttgccatttgtacttcctcctgatataaagctttcttagtctaaatccttaattgccgaagtgaaatcttctattaaatcgctgccgtcttcaataccgacactgacacggattgtatctgcatagacaccggcatcccgcatctgttcttctgtattgtggatataaattgtagaagccggatgaattaccagcgttcgtgcatcaccgatattcgttgcattgagtgcatactttaaatggttcatcaactgatacgctctttcttttgagccgacacgcagagttaagattccgccgcccataccgtttaactgactttctaccagcggcttatacggattgttttccaatgccggataattggctgttacgccgtttaatccgtcaactgcctttgcaagttctaaggtattagaacaaatcttatccatccgcagtcctaaggtgtccattccgataaaatttaaaaatgcgttcatcggtgctaaacagccacccatatttctccagattccgttacgcagctttgcaacgtaggcaaattcaccatacttctgatattcggcaaatcccggatatcttttattgtcccatgaaaacttaccactgtcaacaataacaccgctgattgcattgccaccgccattgatatattttgatgatgaatgaaccaccacatccgcgccgtatgcaatcggctgtaccagatacggtgtcgccgttgtgctgtccacaatcagtggaatgcccttgctgtgtacaaactcggaaacggcttttaagtcgataacatccagtcccggattgccgatgacttcgccgaagacaacctttgtcttatctgtaatgagtggtgcaatctcctcaaccgtaatctgctttgcaaaacgggttgtaatgccaaatgcctttaaatcaccgaataaatcaattgttccgccaaacagtccgctgcctgcgataatctcatcgcctgcttccagaatgtttaacagggcaagtgtcacggctgacataccggaggaacaggcaaccgctccttttccgccttccagttcacagacccttctttcaaaggaatcgacaaccggattactgattcttgtataagcatatcccggtgccctgttattaaaaactttttccaaatcctgtgctgtttcatatgcaaaagcactgacctgactaatcggtggaagtgtcgctccgtcaggataccgcttaattgcatttccatgcagcaattgtgtgttaaatttcatatccctcttattcctatctgcttactatgatttcaagttgaatttagtataatccatattctcccatgtgtcaactactttttcatggaaaaataacagtttcaaatgaggtgtgccgctgctgtataccgctgtatataaacgcagagccgggcagtctgcctctttcggcacagctttgcccggctctggacgtgtctatatgctgcccacgaattgttgtgcgcttacgcactcccacaattctgccctcctatgagcaagctccggcgggtgaaaggctttgtgcccctggcagcattagataaaatctccgtgtacggatacgcccgccgcataagaagatactttctttacaaattctgccgcttcggatacggtaagcgtaccatccgtctgccagtttctgtaataagtcttgtcatcctgtgcaaaggtctttcctgcaaatgcttcatctaatacaagcagtacaacgacaccggcttctgtcaggtggtgcagtacggtttctaccggttcatctgcttccggcgcatacagataagtatgtctgccttctgcgcttaactgcttttcaacctgttctgccagttcaagtgtaatgccgtgctgtcctaccggaaattccacggttactgcactctgaccgtttaaggctgaacgaagctttttattgactttcttttcttccagtccgtcttcatcggcatgcagttcagtaacaacaccgcaggcagaagtcatattggttacacggtcaattaaaatcagttcaccgagtgtcttatgtgccgcaaatgtatctgccacgattctgtctgcaaatgcgatttcgcagactgcgatttcatttttatgtaaggaagatacttcctttttctcgcctgtattgacatcaattaatgaaacaatctttgttacaagccccggaatcatcttcgtgccaagcttgataaagaagttttttccgttttcaagagcatcatcatccatccacagaatcgttgccgtaacggctgcggctgtcttgataccggaatctacggataatacacagcctctggatacgtccacttccctgtctaactgaatcgttaccggctggccttcctgtgcggcatctacattcttatcacctacatggatactctttacatgtgcctgctcgttgcttggaagtgttgtaatcgcatcacccacatgaatgtttccggcttcaatctgaccctggaagcctctgaattcatggtttggacggcatacgcgctgtaccggcatataaaagccctgttccttggctgcggctgtaatatcaacctgctctaagtacgaaaggagtgcctgaccgttgtaccatggcatattcggtgattttacggtaacattgtcaccttctgttgcggataccggaataatcgttacgttctgtaaatccagttcctttgtcagttctgcaatctgttcctgaatctttgcaaataccttttcatcatagcctacaaggtccattttgttgactgcaaatacaaagtaacggattcccattaatgcacagattcttgcgtgacgtcttgtctgaaccagcacgccctgttttgcatcgactaagataacggctaagtctgcaaaggaagcacctactgccatgtttcttgtatattcttcatgtcccggtgtatcggcaacgataaagcttctgttgtctgttgtaaaataacggtatgcaacatcgattgtaataccctgttctctttctgccatcagaccgtctaacagcagagaataatcgattttaccttcacggcttccgaccttggaatccagctccagtgccttttcctggtctgcataaaggagttttgaatcatataaaatgtgtccgattaaggtggattttccatcgtcaacactgccacatgtaataaattttaataatcccttcattttagaaataaccctccttctttcttctctccatgctgcctgcttcctcatggtcaatcacacggctggtacgctctgaagatactgcacttaatgtttcctcgataatttcatcgagtgtttccgcatcggattccacaccgcctgtcagcggatagcagccgagtgtacggaaacgtactttcttattttcaatcttttcgccttctcttaactttaagcggtcatcatctaccatgatgatgtttccgtcacggtaaattaccggacgttcctttgcaaagtataacggcacgatttcaatgttttcacgcttaatgtactgccagatgtctttttccgtccagttggaaatcgggaagacacggatactttcgcccttgtggatctttgtgttgtaaagcttccacatttccggacgctggtttttcggatcccatgcctgtgccgcatttctgaatgagaagatacgttcctttgcacgggacttttcttcatcacgacgtccgcccccaaatgctgccgtaaactgatacttatttaatgcctgctttaatgcctgtgtcttcatgatatctgtgtaggctgaaccgtggtcaaacggattaatgcctgcctttacaccttcttcattggtatatacaagcatttcaatacccattttttttgcgatatggtcacggaactgtatcatttccttaaacttccatgttgtatcaatatgtaagaacggaaatggcggcttctccggataaaatgccttcatcgcgagatgcagcataaccgaactgtcctttccaatcgaatacagcattaccggattttcacattccgctgccacttctctgataatataaattgcttctgcttccaattcatcaagatgcgataaatttcccatactctctctccttaatatttatttgcgtcttttttgttgacttctataacctgtacactgccgtccggcgatgtaacgcaccactcacgaatgtcccctttggacttgacagacagcgtacttcctgcaccgcccatatctgctcccagataaaagctgattgcgcctgtcttacattcttttaagcatgaggtacagccccagcagtcggaaatgtgcttaatgactgcctttccctgtgcatctttttttatcaggttgccgggacaggcttcgatacaccttccgcaacctacgcagttattttgtgtaattcgtatgctcatagtgttttcctcccgtcaccagttctctgaaaatgatttctattttgccgtctttcatgcgggaattgacatatttttcccaatcggcattcttttcaggataatccgcattttccgcaaaactgtgccagcgtgtttcttttctggcaagcagatgtgcgataacgacctgacagacaaccagacgttctttgacttcgtaaatacggagcagatcgtccatgtcttctgccgcaagtccgtccaccagcttttgcagggatgtgattttttcctttgcaagggctaaacggctttcattataacggtaatccgttgcaataccgcctgcgtactggtccatgattttctgcatggtttcctcaagctgttcggtcgtaagcagtccctgcggattgtttaaaaaatgctcgtattctgcctgcttttcattctgctttgcttcactgtccgcatctttggctgctgtctgcttttcatcttttagaaattcaagcaccgcttctgccgcaatttcgccctcggctaatgcgccggttacgtatttctgcggacagccgcctgcaacatcgcctgcggcaaacagtccgtgaattgttgtttccctgttattgtctacccagtaaccgcttgcggtatgtccgcccacaatatacggctctgtgccttcaatttccacattctgctctgacgggcccttgccggattcaagccactttaaagtctggctcggcgccatatttaagtatgccttgtataaatcctgttcctgctcttttgtaatctcatcagtctttaaataacatggtccgtatccggctctgttttccataaccgttccgtatacacgctgggaagttgtaagaccgtattttgtttcataaatttcgccgttggaattcatctgctttgcggatacaccctgtgcaatcgttcctgtcggtgcaatcgtatctttacagcgcagtgcgataaaacgcatttcaaaggttgtcatctcagcgcctgccgtaatgcccattgcgtagcccgcaccggtattaaacggcgggtaccacattttatgtcttgaaaagcccggattgtttggacggtaaagtcctgccgcgcctccggttgcgcagatgaccgctttggcatgaatcacataaaagatttcttcattaacatcaaagccgtaagccccgtaaatgcggttgtctttcacaatgtaatctgtaatattgacgtgatttaaaaccgttacattttcctgtgcggatgcctcttctgcaagaatcggcttaatattttccccgttaatcttgatatttctgtttcctcttgtaacgtatttgccgttttcatcttttaaaatgacaagtccggctttttccataacatccgttacatggtttaaccgctctgacattgaaagcagtaagtcttcacgcacaatgccgtctgcatcttttttggcatagtctacataatcctgaggcactctgccttccgtaatataagcattaattgcattgacacctgccgccagacagccgctccgcctaatattggctttttcagcaatcagaacgctgatatttttttcttttccgagcgtcatcgctgcaaaacagcccgctgtcccgccgccgataatcaacacatctgttgagagttctttctttttcatggcaccttccattccgccgcacaacacggcttttctatcttgatttttagataaatactgaatcatctaccagtgactggttttccaaaagcattgccttttctccgaccgttacaaacagccgatatatgaatacatcaaccttttctcccaccgcaatacttttttcttccaatcctcttttggcaataatctgattgtcgtttacattgacaagcagttctaagctgtcacctctgaaagacacgcgctccacaacgccttcggaagccgaaggaccgaaacgctgtacttcatttttcttggatactttgacaaattccggacggataatggctttatcgacattgtccactttcggaaagctgtgaaagctctgataattggtaatctgtgacgtctgtccgaagaaagtcgccgcaaatgccgtctgcgggttctggtaaatttcaagcggtgttcccttctgctcaatgtgtcccttgttggtaataataatttcatcggcaacttcaatcgcttcgtcctggtcatgcgtaacgaaaatactggtaatgccgagtttttcaatcatttcctttaaccagcttctgagttcctgacggaccttggcatcaatcgccgcaaacggttcgtctaacaacagcagatgcgggtttggcgcaagcgcccttgcaaatgccacacgctgtcgttgtccgccggataactggctcggataccgcttttccagtccatctaggctgatgagttttaaaagttcgtggactctttcatctatatattttttattctcttttttaacatttaaaccgaatgcaatattgtcatataccgtcatgtagcggaacagcgcgtagttctgaaatacgaagccgataccgcgctcacttgccggaatgttgttgactaccttgccgtcaatgacgatttcgccgctgtccggtgtttccagccccgcaatcattcttaaaatggtcgtcttaccactgccgctcggtcctaacagcgcaatcagcctgccctgttcaatgccgaagctgacatgattggaagcctgatagccggcatacgttttattaatatcttttaattcaacatacat

SEQ ID NO: 1080 - DNA, 14661 bp, unidentified
  source 1..14661: mol_type = unassigned DNA
ttattcattttctatcattcccgccggaggtgtcgtgatcgtctgtacttctgttgtcgaacctgtttcagatccatttgttgccgattcactcgaagcttcactgctttcctgtgttgtaacagcagtttcgcctgataccttatctatatcaattgcttctgttgctgccactcccgtttccgatgatacttctgtgcttatagatgatgctgaagtcgacggagtataacccgatgttccatacagatattcatgtaatgctgtaacatttgcattcagatccgctgctacgatcacactgcctttaccatctaaggacatcggtgtataagcgaacgggaatccaatatttcctgtaatcttatagtcagcaatatctttcgccaacgaagtcacttcatcctttgtaagactggttgatatgcagctaaaggatacatcgatcagattcgatatcatcttactgtctgcatttatcattttatttaccagaccaagtaatacggtacgctgtctcatggttctggtaatatctcctttacccgtgcttcggattctggaatatgcaactgcctgctgtccgtttaataccttcgttcccgcctcatgaacgccctcggaatattttcccgaaataccgatctgttccgcaagattcttgttcagattatttacctcatcttctgttattgttacctctacgcctcccagcgcattgattatatctgccatagcattaaaatcaacggtaatataatccgatatagcaagatccagatttgcatttaacgtattgatcgacattaaagcacccccgagctgatatgcgtaattgaccttatgagttgtctgagagtcgctctgtatctgtaacaatgtatctctgtataccgaaaccatcttaacttcttttgtatctttattgatactgagtaaaataatcgcatcactgtttgttcctgtatccagatttgaatctctggaatcaactccgtaaagtgcaatcgtggtataaccctttgtctgttcttttacaccttcgttgacaaccagatcactgttcttgatcggacgaatatccatctgattatacttataagatttattcgccgatacataaccgatcgtaaggatcaggaatactacgaacaatacaatgcctgtaaccgcccatttaccgagtgtattcagtcgaaatgatcgtttctgtccatcattacccacttctgatctaacaggcttccggcttctgaccttcttctcagcctcacctactgcatcccggacattttctctcagatttgcaaatacatcagcaaatgtatgtccatcttcttccgattcatccatatctgcctcagattccatggtatcatcctgcgtctgttcttcataaccgagtttcttataagcaagccttttccgttcttcggctacacggtcttcttttattctctctgtcggctgcttcgattcggacttctccgctgtcgcaaccccaacctcttttaataccgactctaatttgtctgcatattccttataggattccgataccggtgtttctttcgccgaagaagcatctgatacagaatctgccattttctcctcagatgtaccatctgctttaccgtcagctttgctattttccggttcattctgattgatgatcgaatcgatcagctcatcatcgtccgctgtcatttccttattccgttgtaacagtctgtctctgtattccgatagacgtttatcatactgtgtagtcttattatccattagtgaaagacatcctctctgcaactaaaaactttattagaacttaaatgtttcctttaatcccagccatttctggtccttatcactcaggttgagcgcggttccatcttccagatgatacccttccgcacttgcgtttccctgatattcaccaaagaccttcggccactcaataccaatttcaggatcattccatgccagaccgccctcatcaccgggatgatagaaatctgttaccttataacaaaattccgccgtatccgataaaactaaaaatccatgagcgaagccttccgagatatagaactgcttcttgttctcttctgtcaactccacaccataccattttccatatgtttcgcttcctgatctcagatcaacagcaacatcataaactgcacctttaatcacacgtactagttttccctgcggaaattccttctgaaaatggagtccgcgaagcacgccttttgtcgacatactttgattatcctgaacaaataccatattcagaccattttcctccatatccttctggttataggtttccataaaatatcctctgctgtctccatgtactgcaggttcaataatgtacaatccttctatcggtgcttttgtaactttaatctgtcccatcttatttctctacctcttttccacaaattaacgattaccatacatcttctcatagtaattctggtattctcccgagataatggtctcccaccattctctgttatcaagataccaccggatcgtcttctttattccatcttcaaactttgtctccggaagccatccaagttcattatggatctttgtcggatcgattgcatagcgcatatcatgtcctttacgatcgccaacatgtgtgatcagagactcaggcttgccaagttctttacagatgatcttaacgatctcaatattctgtttctcattgtgaccaccgacattgtatacttcgccaacacgccctttatgaatgatcaggtcgatagccttacaatgatcttctacatataaccagtcacgcacattcaagccctcaccatatacgggaagaggcttgtcattcaatgcatttacgatcattaatggtatcagtttctccgggaaatgatacggtccatagttattcgaacatctggatatgctgacaggcaatccgtaagttctgtggtatgccaataccagaagatccgctgctgcctttgagctgctgtaaggagagcttgtatgaatcggtgtttcttctgtaaagaacaaatcaggtctgtcaagcggcagatctccatacacttcatcggtggatacctgatgatatctctcaattccatattttctgcaggcatccataagcactgccgtacccataatatttgtctttaagaaaatatccggattctcgatacttctgtcaacatgactctctgctgcaaagttcacgatgatatccggcttttcttcctcaaataaccggtaaacggcatctcggtcgcaaatatccgctttaacgaatctgaaattcggattcttcattaccggctcaagtgttgacagattacctgcatatgtcagcttgtccaagcatacgatacgatattccggatatttatcaagcatatggaatacaaaatttgaaccgataaagccggctccacctgttactatgattgttttactcatttttatctttctcctcaatctatcttttatctttttatctgcaaaagctatgcaagcacatccagatacttaccatctaatacatccttcagatactgtccatactgattcttcttcaaaacttcatatacttcaagaacttcttctctggaaatccatccattcaggtatgcaatctcctcaagacatgcaatctttctatgctgatgctgctctatcgtctttacaaagttcgtggcatcaaccagactctcatgtgtccctgtatccagccatgtgaatccctgtccgagaagctctacatttaactgctgatgttcaagataaatacggttcagatcggtgatctcaagctcgcctctggcggatggtttcagattctttgcatattcaacaactttattatcgtaaaaatagagacctgttacacagtaattgctctttggcttttccggtttttcctcaatcgagatcgcacgtccgtctttgtcgaattcaacaattccaaaccgctccggatcatctacgtaataaccaaatacagttgcacccttaccgttttccgcattctgaacagctgcacgtaatctctttttaagtccgtggcctgcaaaaatattatcaccgagaaccattgccacagtatcatcaccaataaaatccgcaccaataacaaaagcctgtgcaagtccatccggtgtaggctgtacagcataagtaagatttacaccaaactgacttccatctcccaacagatcctcaaatcttggagtatcctgcggtgttgaaatgatcaatatatcacggatccctgcattcatcagaactgacatcggataatagatcatcggtttatcataaatcggaagcagctgcttcgatgttacttttgtcaacggatataaccttgttccagatcctccggctaaaataatgcctttcatctcttattcctcctgttaatcaaaaaacttttcattctttcacccgaattattatatctggctgtgatttctaacttcaggatttcccattcacagtctataataaccagtatccacagtctattatattatatagcatttctacaagatactcaaacattattcctattttttcttatttctactatttttttctgatttgttacaactttctattcattatatacaaaccgatgtttcctgtaattcaatgcatatatgaatattattcatatttgtatatgtaatattcatattttattctttttgtttcatgatcgtattttttcttctatccctcttctatattgtaaattctgttttcttccattttgtttcttttttattttttccacttttctattcaaaaaacacttgcataatattcactaccgttatatattaatttgcagacaggacgatatgtcctttattcaacaaatggaattatgatatatcagaaatgtacatattccacacagacggattttaaggaggatttagaaatggcaaaagacaaagttgttcttgcatactcaggcggccttgatacaacagctatcatcccttggttaaaagaaacttatgattacgatgttatctgcgcctgtatcgacgtaggacaggaaagtgagctggaaggactggatgaaagagcaaaatattcaggagcttccaagttatacattctggatgttgttgatgaattatgtgatgaatacatcatgccaaccgttcaggcagatgctgtatatgagaataaatatttactcggtacttctttcgcaagacctctgatcgctaagaaattagttgaggttgctcgtaaggaaggtgctgttgcgatctgtcacggtgcaacaggaaaaggaaatgaccagttaagatttgagctttcaattaaggctcttgctcctgacatcaaggttatcgctgtatggagacagccggaatggaagctggattcccgtgatgcggagattgcatactgtcaggcacacggtatcaatcttccgtttgatgctgctcattcttacagccgtgaccgtaatatctggcacatcagccatgaaggtctggaactggagaatcctgcaaacgaaccaaactacgatgatcttctggttctcggtgttacccctgaaaaggcaccggatgaggatgaatatctgacacttgattttgaaaagggtatcccaactgctattaacggtacaaagatgaaagtttctgatatcattcgtgaattaaaccgtttaggcggcaagcatggtatcggtattatcgatatcgttgagaaccgtgttgtcggcatgaagtcccgtggtgtttatgagactcccggcggaacaattctgatggaagctcacaagcagttagaggagttgactctggatcgtgaaacacttgcatacaagaagctcgtagcaaccaagtttgcagatcttgtatacgaaggaaagtggttctgccctctccgtgaggctcttcaggcatttgttgaaaagacacaggagacagttaccggtcaggttaagatgagactgtacaaaggaaacatcatcaaagccggaacaacttctccatattctctgtattctgagagtcttgcaagcttcactaccggtgagctgtatgaccataaggatgcaaccggattcatcaacctgttcggtctgtccatgaaagtccgcgcaatgatgaatgagaagaacaaaaacaacgacaaataatagttgaaatggaagcggcattcctgttataaaggaaatttcttccgtaaatctttgaaataaaatgggaaatacattacatattattccgcaagtcgttcgcactctattttaacgcaacggtactaagctcctcgcccatggcgactcgctaagaaccggcgttaaaaaaggcttgcttcataatagtaatgctatttcccattttgttttatatatcgatttccagatatgtttccttcataacaggaatgtagcttccagatgatgaaagttttatgtaaaagggaagtggacattattattatgaagcaagccttttcgaatgtcggtacttagtgaaccacggagtggtgaactttagtaccgctacatgagaaacagagcgaaagcgtcttgcggaataatagataatgtccacttccctttttataaaactttcatcatctaactactcaccaggcgatggtttctggcacggtcgatcacgattgcgattgtgatgatggcggctgcaaagagcacctcgatccccatatatacgaatgcttccgatggtatctttgcctcatagtccagaagatcaacgactttgacataccagtaagccggaaggaaatgcgccagcttaatgactcctgctccaagaaattccatcggaacaaagatgccggacaggaatgccataccaagggacactatattgccgatcatgctgaacgcctcctcgtttttggcaatcttgcttgcaagaaaggcaagcgccatagctacaaacatgtagcagaccatattgagcagatttccaagtcctgctgccgtaaacatttcttttctgaatacaaagcatcctccaactgcaaatactgcgcatccaagaaatcctgtcacgatcgttccgagaaggatctcttttgtcatattggaatatttatatgccgagcttgcgatccgttctcttaattcttttttgtcgtaaacgatcaataccggacttacaccctcgatcatcataaccacaagtatccatcccagataactgaaaaatgtgtatctcgtactatgttttccgccatggccttccgttgtcatcgttacgttcgttctagtctgaaacaattcatccacctgagctgctgcctctgcccggtcatatccggctgcaaaatatgcattcagataagagatatatttatttacatctgcttcaaacagttccaccttgctccggttcggaattgcaacgatctcgatataatcggacagatcttccttatccagatgatccgcataaccttttttaatgcggacgatacagtctgtatcccggttaaacagactgtcctgcatcgcttccgtcgtatctgtttttaattcagcatttttatgtgcatgatccagatacgaaaacagttcttcactttctgccgtctggtcataatcaaaccaggcgaatttacacttcatgcttttatattcatcttctgttttgccggaattcggcaatataaatccaaatataatgcctgcaaagatcccaatatacatcagcattgagccttttttcttatttaagattttaaaataggatttaaacacttgcatatttattcctccttaagaccagaatactcgctccaagcaggcagacagccataccggttaagatcaggatatttctgaaataacggtcgtaattatcgtatacattgagtgcataaaggcagtccgttaccagcactgccggattaacccggttcaatatcggaagtttatcttcaatactgtttttaattcccggccccatcagatccgccataaaagagaagatcaggctggccgctaccgcaattccaatctttcctccatatgagcattttgaccaggtaccaagcagcattcctccggcaataccgatattacatgcaataaagagtaccagtaaaatagccggatactttgttccaaactgtacaccgaacagccgcatatagattacagtgataacctcggctgcaaactgaaccagcagtaatgccagatactccgccagaacagtcacaagtttaggattcggtgacagacaacgacgcattccaagtgcgctttcatttgcctgcagcttatgcattcttgtgattccggcaaaggaagaaaacaggcaactcatagcaagcactgcatagaaataattataatactcattctgacatccgtccgttgtggaaatctcttcataatataccgcatcgctctgcactgccttctgaatgatctccgatgcagcctccggatccttctgcatcagattcagatacatctgttccatctgcttatactgattcaggattgattccagtatcgactccttgatgtcactctgcctcactgtcaggctcgcatccgatgtatagatcacaccggtcacttcttcatcatttaacttccgaagtgcttctttctcactgagcacctccatgtcgatccgtttattctcgccgtccatagaaagcgtagacagcaccatcataagcgctgtatcgttcttaccatccctcacaactgcgaccgggatatctttaaacatctcatccttttccatgatatttccgaatgccatgtacatgaatgtgaataatgcgatcggaaacagtatcgtccagaacagtgtatcttttccttttatcagcattttacctgcatatttaaaattatgccaaaacatatccacccctcctaatcccgaagtgtcttcccggtaatctcaaggaacacatcattcagacttggaagctcggtatatactttcccaaataataccgcatgctccttcatatattccataacccggatcagattgtgatctccaccggagtaggtcagcttcaacattccatcctgatatgaactgtcatacacatgtggaagctgtctcagctccagcagttgttcatctgtcagtgccggagcttctatgaagatactctctgtcttctttatcatttttttcagctcttccttcgtgccaagagcgaccttccgccctttatccatgatcaatatacggctacagatctgttctacctcttccatgtaatgagaagtgtaaatgatcgttgcgcccttcttattcagctcgacaattccctctaagatcttgttcctgctctgtgggtctaccgctaccgtcggttcatcaaaaaagatcagcttcggtttgtgtgcgattccacacgcaatatttaatcgtctgagaagtcctcctgacagttttttcggcaggaacttcttatagtcctgaagctcgacaaatgcgattgcatcctctacatactgttttcttgtctctttatccctgatatacaacccacagaaataatcgatattctcatataccgtcatttcatcaaatacagccacattctgcattacaacaccgatctcccgtttcagatcgtagctcgtcgatgtcatcctcttaccaaatatgcggacatcgccctgatcgtatgtaagcagtgacaagatacagttgatcgtcgtcgtcttgcccgatccattcggtccaagcagaccgaagatctcgccctctctcacctccagatcaaaatgtgataatgctacaaaatctttatatcgtttcaccagatcttttacttcaatcgcatattccataactgtctcctcattcattttctattcggatgctattgtttcttccggcatcgcgtctgaaactcatcgcatatgttccatgttatgctgtcattctaccatataccaaaatttttgttcagtgccaatcatcacatctgtaatatgacatttgtcacattcttttaaaatccggagtttttcaaccgtagtcaattgacgctgtatttctcaacaggtatactaataccgtcacttataaatccaagccggttcacgcaattacctgacacccgcgtgacctgtctacatacaaggagaaattatgaagcaaatcctgactcgactgcttatatttgcaatatgctgtattatgtgtattcacactttttctatatgcacgcgcagcgtaatatatattctgcttgcgatcatacttgcttttggcacaatgctgattgctgacaggctcccacccacagctccggtactgatccacgtaggcatatttattctgtgctgtctgtgccttaagtttgttgtatttcttccgcttttctgcttctatctgagcagacgaccggtttgttttactgcacccatcggagttctttccatcattctggcatctgcaaaacttccgatggatactttacttctgataggtgtcctctgtctgtgcagcatattatacggatatctgactacagcgcttaccacccttcatcaacagatgaagcaccttacagatacatcggagacaaacgaacttctggcaaaggaacgaatccgtatgatccggaaggaacaggataacaggatctatactgcaaccctgaaagagagaaatcgtatcgccagagagatccatgataatgtcggtcacatgcttaccagatccattcttcaggttggtgcgatccagacgatcaacaaagaaccgatccttacaaatccgctttccgatctccgcgctacgctggataccgccatgaacagtatacgatcaagtgtccacgaccttcacgatgaatccattgatacgaaagctgccattcaggatatgttgaatgatataacaggctttcatacttcatttgaatatgatatgggcaacattgttccgaaggatatcaaatactgtcttatcagcattgccaaagaagcgatcaccaatgccgtaaagcacagcaacggcgatcaactctcgattctgatccgggaacatccgggcttctatcagttgacgatccgtgacaacggaacaggcattcaccttacaacctcccccggcatcggacttaccaacatccaagaacgagtccaatccttatccggtactttacagatatcaaccgaatccggattccgcctgtttgtcagtattccaaaatatacacaaaaaggagatagaactgcatgaatattataattgttgatgatgatgcatttgtcagtgcatctttaaagatcatattagaatcctgctcagacattaccgtacttgcaaccggagcaaatggccacgatgccatctccctgtacgatacatacagccccgatgttctgttaatggatatccgtatggaaggcatggatggtctgaccgcagcgaaagaaatcatcaccggacaccctgacgcaaagattctgttacttactacctttgccgacgatgactatatcatcaaagccatccggaccggcgcaaagggatacatcttaaaacaggattttgagacagttgcatctgcgatcactgccgtacacaacggtcaaactgtcttcgggaatgagatcatgaacaagatccctaccctgttacagactgatgatcgttttgattacctgtcctacaatcttacggaaaaggaatttgaactgatccgactggttgcagatggtctgaacaacaaagaaattgcggagcagctctttctctcggaaggaaccgtccgcaattatctcagtaatatccttatgaagcttgacctgcgcgatcgcactcaagttgcctgtttttattataagaatttattatgatctgtttttcaatatctgcattcttataagctgataatttgtgtccgttatttattggacgatttttttctgctgatcatcacatatcctgccaatattaatattcctatcacagacaggcatatgcccgccatcagatatggtgtattgtaggtcagtgtaatcacatgttcccctgcttctacaggaacacccatcaggccggttccgatctttacaggagctacttttttgccattaacaactgccgaaaatcccttattgtacggaaccgccagatataaaataccggattcttctgtcgttatgtgaccatttaaagtattatcggtccatccgtcaaatgtcatttgatgtgactctgtatattcttcaaatgctttcactacattctgatctaaggaatacagcgcaaatgctttcgttccctcctgatctttaactgccgttgtataaagacgaattcttatcgcatacattcgaatctgtacagcatccccttcttttacctgacctacatgataaaaatccgctgaatccgtgtaattcgtagacactgttacttcatcattcacctttacttcgatacactgaggcttcgtgtccgcacattccagatacagatcttcgtctttttccgcagtaagattcaccgtgattgctgaaaaaacatcattggtactgatataggaatactcaccgttcttctgtccggtaatatccataccggcacttgttactgcatcctccggtatatcaattcttgtaaaggcattctgcgtgatcttatgtccggtcacaagctttaccagttcattctgattctctgccatgctgcctttctcgaatacatccgatgtatcttccgttttcgctgttccgctccagtcaagaacatctttactcatcaaaaatcccatgcctgccagattatccgcttcgtagaaatcaatcttctcatttttccggtcgatcagacgatacccacctgcaacccctgtttcatcagtcacaacataccgtacattaaagagctggcgactgatcggagttacccctctataggtatattcaatattctgatatcttgatattccaaggctggtaaacacatctactatactgccatttgccacagatgaataccagtttacgtctgaatacggcatatagttctgtgacaccaatgcagtctttctctccccttctgcaagctgcaactgctcataatctgttaaccagtccgaagcagatatctcgctctgaagccgctcatcattatacttctgcggcatctgaatccatgcatttgcaaagatctctatacacaataatactatcatccacacatagcaggtcgtataacgaatactctttctgacatacaagatcaataagatcagatatgatataccaaagagcaatacagccgcataggaataggaattcgcatcttccttatttaagaacagctccaaaaggaatatagtaataccgatacctgacatactgattatctgccatacctttacctgctgtaatctgagcattccgatataacctgccatcaaaatgaaaaagacaaggataaatgcaaaacgatttccgagtccatgcgtaatcgtaaagccatgcaggacataatttaatccgaccatgttcaatccaatagtcaggaataaaataacggccgtatatcgaagcttaaaactacatttgattcccgctccgaataagaaaagcagaaagaacataatcaccagaataccgcaataattattgtgactgaacaaatatcccgtcgatatctgtcgcaatggataaaatgaattaacaaacattcctagattactgattctataccatggaagactatagtccccgtttccacaggatgacagattcataatggcataaagagacggaagaacaaccattcccgcaatcgataccgccataaccgaccatccgaagaaacgacatacaccggaccataaattcttagcattcttccaatcctgcataaaaaaatagcagactataaacaggcaaatataaaatgcaaaataataattaaacaaaaatgcacaggctaataacaacgtataacggagctgccatttgccttccgccagatgctcaactgcaatcgcaataaacggaagcagaatcagtccgtccagccagagcacattatgattatataccaccacataactgtttaacgcatacaggagtccgaacatcatggaaattacagttatatatttctctgacaatcccttttccgcaaatctgcgaatctttgaatgcctgaaaaagaacagtcctgccggagccaggcatgatgctttgagtacgatcatcaatgtcatagataattcaacacgatccggaccaagtactatggctataatattaaacgggctcatgcagtaatagaacatgttcagaacaatatcgattccaagcccccgttcccatataaatgaacctttatcccctgaatgcagccattcaaggaaaattttcagtataccgggatattgatcacatgcatcctgatacagaaagcttctgctgccaaacggatatacatgttctacagccatatttatcatgtaaaatccaatacatatcagaaacaacaaaagatacatcccgcaactgcgtatgtatcttctgttaaatctgtcattgtttatcgttatcgttgaagtaaccggatctgtatcgagttcccgctccccatgaatattttcatttatcttcat

SEQ ID NO: 1081 - DNA, 18518 bp, unidentified
  source 1..18518: mol_type = unassigned DNA
tgttcagaaaggattttacgatggcttgacatttcaccgcatcatctccggctttatgattcagggcggcgacccggaaggtaccggaatgggcggatcggatgagacgattaaaggcgagttctcctccaatggagtagaaaactcgatcaaacatacccgcggcacgatttcgatggcgcgctcgcaggatccggacagcgcaagctcccagttctttatcatgcatcaggatgcagactatctcgatggtgaatacgccggcttcggccacgtcacatcaggtatggaggttgtggatcagatctgtgaaaagacaccggtcaccgacagcaacggaacggtagaaaaatcaaatcagccggttattgaaaagattgagtggctggattaaggaaaaattataagaaatccccattgaaattgagaaaaagttgtgatatactaaaaaataatgatgacaaacagataggagaggaactgattatcatgaaaagaattaaaactcttacaacaaaaaatctgaaagatacaatgaaaaaaggcggatgcggtgagtgccagacatcctgtcagtctgcttgtaagacatcttgtacagtaggaaaccagagctgcgagaacaagtaagattagattgtatctaagaagtacgaaaagtggcaaagggcttgcctgattttggtcgggtaaagtcctttcttattgaattcaatggaatgaggataaaaagatgattcatcaatataaaaataatggttataatatagttttagatgtaaacagtggctcgatccacgtcgtggatgatgtggcatatgatgtgatcgggatgtatgagacaaaagaaagagcagagatcacagcggaaattttgaaaaaatatccggaagtaaaagaagaggaaatggaagaactgtatcaggatctggaagaaatgcgggaagacggcacactgtttaccgaagatacgtacaaagacggtgtcattgacttcaaaaaacgccagaccgtggtaaaagcgttgtgccttcatatcgcgcatgcctgcaacctctcctgccgttattgttttgccggtgagggcgagtatcatggagaccgttcattgatgagctacgaagtgggaaaaaaagcactcgactttttggtgaaaaattccggaagccgccgcaacctcgaagtggatttctttgggggagagccacttatgaattttgatgtggtaaaaaaactcgttgcctacggaagaagtctggaagagccgtatgacaagcattttcgttttacattgacgaccaatggtgtgcttttggatgacgatatcattgcgtttgccaataaagagatggacaatattgtcctcagtatcgatggaagaaaagaagttcatgaccacatgcgcccaaataaaaacggcgacggaagttatgatctcattttggataaatttaaaaaagtggcagaaagccgcggacagaaccgttattatgcgcgtggaacatttacacattataacctggattttgtggaagatgtgcttcatcttgccgatgagggattcaagcagatttcggttgagccggttgtggcagatccgagtgaaccatatgcgatccgcgaagaggacattccggtaatctgcgagggatatgaccgccttgcgaaagaaatgatcaaacgcgaaaaagaaggaaatggattcaacttcttccattttatgatcgatctgaccggcggaccttgcgtgtacaaacgactttccggctgtggttcgggaaccgagtatctggcagtaactccttggggcgacttatatccatgccaccagtttgtgggaaatgaagatttccttctcggaaatgtggacgacggcatcgtcaatgagccgattcgcgatgaattcaaactgtgcaacgtctatgccaaagaagaatgccgtaactgctttgccaagttttactgcagcggtggatgtgccgcaaatgcctataatatgcatggtgacatcaaccagccttatgagatcggctgcgcgcttcagaaaaaacgtgtggaatgtgcgatcatgataaaagctgcattagcggagtaaattttgctaatatgtgaaatatatgttaaatttgaaaaaaacgattgaaaaaatccagaatgcgtttataattaatgtaggtatgtttacgtaagattaagtagatagaggaatagatgatatgttcgattgactaagaagaggaagaaaggagaacgtcatggacattggaatagatttgggaacagcgagtatccttgtatatgtaaaaggaaaaggtgttgttttaaaagaaccaagtgtagtggcatttgaccgagacacaaatcgaatcaaagcgattggagaagaagccagactgatgcttggtcgtactccgggaaatattgtagccgtacgtccgcttcgtcagggcgttatttctgattatacagtaacagaaaaaatgttgaagtatttcatctcaaaagccgttggaaaacagagattccgcaaaccgctcatcagtatctgtgtaccgagcggagttacggaagttgagagaaaagccgtagaagatgctgcttttcaggcaggcgcaagagatgtgaagatcattgaggagccgattgccgcagccattggtgcgggcattgatatcgcgcgtccttgcggaaatatgatcgtagatatcggtggtggtacatcggatattgctgtcatttctttgggaggtaccgttgtaagtacatccattaagattgccggcgatgattttgatgacgcgatcgttcgctatatgagaaagaaacacaatctgctgatcggagaaagaaccgcagaggatattaagatccgtatcggttctgcatatccgcggccggaagtcgagaccgtcgatgtacgtggacgaaatctggtaaccggtctgccaaagacgattacggttacctccaaagagacagaggaagcacttcacgatacgacacttcagatcgtggatgccgttcacagtgtattggagaagacaccgccggaactggcagcagatatcgcagatcgaggaattgtcctgaccggaggcggaagccttttgtatggtctggaagaattgatcgagagcaagaccggaatcacgacgatgacggccgaagaaccgatgacggcagttgctatcggaacaggtaagtatgtggagtttttgagtggaacatccggagagaaataggaggaagcctatgttaagaggtctttatacgggttggacagggatggtcaacgagcaaaaacgattggacgtaatatcaaataatctggcaaatgcagacactctcggctataagcaggagagtgtgagcagccagtcgtttgataaattgctgacaatcaaaatacgagatggatctcaatcatatcacaatcaggcaatcgggacgatgagcctgggggtaaaagttggtgaagtatatacggattattcgcagggttcgatccgtggaacgagttcaccattggatctggcattgagcggcagtggtttttttacgatcacgacgacaaatgccaaaggggaaacggtaacaagatacaccagagatggaagttttcagttgaccaaggacggatatcttgtggattcacagggtaaccgcgtacagggaagcggtggagatatccagatcgatccgaatgccaaagatatcacgattgataacagcggccgaattaccgtggatggcgaagtaaaagacacattgaagattgttgattttgaaaattatgattacatattgaaaacaggcgataatctttaccgtgtcgtagacggagcgactgaaacgacctccaatgcttcggttctgcagggatatacagaacaatccaatgttaatgttgtgtcggaaatggtcgatatgattactgtgacgagagcgtacgaagcgaaccagaaaatgatccgttcgcaggattcgatgttggaaaaagcggtaaatcaggtaggacgactgagttgatgacaggaggatgagcctatgatgcgttcactttggactgcggcatccggaatggttgcacagcagacaaacttagatactatttcgaataacttatcaaatattaatacaacaggatataagaccgaagcggtaaattttaaatcgcttatttatcagacattacagcagaaatcgtatgacagtaaaggagaaccgaaaccggtcagtgcacaggtaggacttggtgtccgcccggctgcaattgtgtccagtttcacgcagggtgctttgttagagtccagtggagcctttgattatgcaatcgagggcgaaggatttttcatggttcgccaaaatgacggtacgatcggatatacaagaaatggtaatttcaacgtagctgtatccgaggatggactggcacttgccgattccaacggaaatccggtgctggatgtcaatggggatccgattacattcccgaagggaacggactcttctaaattatccgttgaccagtttggaaactttatgtatccggacaatacgggaaatgcccagttgatgggaatccagatcggacttgcgaatttcccaaacccggcaggactggaaagaagttccgatacgatcatgaaagagtcggaggcttccggccagccgacgatctatatggcaaatcagctgaattcgaagattgtgtccggctatttggaaggttccaatgttcaggcagtagatgaaatggtaaatatgattatcgcacagcgtgcttacgagatgaactcgaaagcgatcacagcatccgatgagatgctgcagcaggcgaataatcttcgttcttgatagaaagtaaggagggatttgatgtcattatcggtaaacgatctgtataacagccttggaagcacatcgacattgtccagtgcggctttgaaaagcaccgcgtcggcagatcagttgacaagccagatcaaagacgcaggcaccgatgacgaaatgatgtcagcctgtgaaaatttcgaagcctatctgttgcagaaaatgtttgaaaatatggaaaaatctgccaaactgtttagtgatgacgataaagagggaaatgagtacaccgatatgttcggtgaccggatgtatcagtcgatggcagagacgatggtttccagcggccagggacttggcatcgcacagatgctgtatgagtcaatggcgagaaattccggcatttccacttcgacagaaacgacgacaaaaacggaataaatataaaataacgagaaaagagcgcccattgcatcctggcaaggggcgctttgtcaacgtatacaggagagagacgatggaagagaaaaaaggatatgtggagcatatcatttatcgcaatcaggaaaatggatataccgtatttgaatttgtctcgcaggaagagggagaagaatatctggatacgtgtgtcggaacatttccgttcatcaacgaaggggagtatcttacactgtatggtgatatggtgacgcatccgacgtatcatgaacagttcaaagtgcagaaaagtgagagccgttcgccggatgacgcgttgtcgatgcagagatatctggcatccggtgcgatcaaagggattggaggtggacttgccaagcggatcgtagacaaattcggggatgaaacatttgatatcattgaaaaagagccggagcggctcagcgaggtaaagggaatcagtgagaaaaaggcgatggatattgcggagcagtttgaggaaaaacgtgaaatgcgcaatgcccttctctttttgcagcaatacggcatcagcaaccagctcgctgtaaaaatatacaaaacgtataaagaagatctgtatgggattgttaaaacaaatccttaccgactggcagaagacatccggggcgtgggattccggatcgctgacaatattgcgatgaaatccgggcttgaccgaaattccgatttccgtatccgcgcaggcatcctttatgtgttgacactggcgacggcgtccgggcatatttatctgccgaatgaggaattgtatcgccactgcatcgagtttttgggtgtgagtgtcgaacagctgatgcatgtgcaggaagagatggaatacgacaaaagccttatgcgggatggcgaaaaggtctatctgccatctttgtattatggcgaaatgaactgtgcgcggatgcttctggatatcggaagtgtgacgcacaaatcgggaattgacgaagaacggatattggaggaactgcagcgcaaatccgacattcatctggatgacagacagcggctggcagtatttgaatctttaaaaaacggactccttgtaatcaccggaggaccgggaaccggaaagacgaccacgatcaatatgatcataaaacttttggaagaagaggggcagagtattcttttagcggctccgaccggccgtgcggcaaagcggatgagtgagacgaccggccacgagacacagacaatccaccgtatgctcggttacaatggggcaggtatggattctgcggatggcgtggaagaacgtcgtgagacgccggaggcatttgaacgcaacgaatggaatccgcttgaaacggacgtaattattattgacgagatgtccatggtcgacatttatctgtttaccagtctgcttaaggccatttccgtcggaacgaggctgatccttgtcggggatgtaaaccagcttccaagcgtcgggccgggaaatgtacttcgcgacatcattcagtcggaatgctgtccggtggtgaaattggagcgaattttccgccaggcggcaaagagtgatattgttgtgaatgcacacaagattaacaaaggggaatcaattacactggacaataaaagccgtgactttttctgtatggaacgtgaggatgaacatggtgtcctgcagatgatgctctggcttgtgcgggataagatgccgaaatacacggactgtacgccgtttgatgtgcaggtgcttaccccgatgaaaaaaggggaacttggtgtgatccgctgtaaccagatcttgcagcggtatctgaatccggaatcgtcgggaaaaccggaaatgacggtgcatgataccattttccgccagggcgacaaagtcatgcagatcaaaaataattaccagatgccttggaaaatattgggatatcacggcgtagtgatcgaggaaggaaccggtgtatttaacggcgactgcggaattatcgaggaaattgacctttacaacaaagaagtaaaagtggtctttgatgaagaaaaacatgtgacgtatacgaccggtgatatggaagaattggaacttgcttatgcgatcaccattcacaaatcgcagggaagcgaatatccggcggttgtaatcccattgtttcacggcccgagggtgctctttaaccggaatctcctttatacagcggttaccagaggaaaacaatgtgttacgatcgtgggacgcaaaaagacagttcttgatatgattcacaatgaatcggaacaaaaaagatattctacattgcaaattcggctaaaggaattgcaaaatgagtagttttttgataaaataaaattggatatgtgtagtatgggaaaggaaatgcatgaatgattttttgatgactcttgtattcccccacaaatgcgcggcgtgtggaaaaacaatgcccggaaaacgcacggaaatgttgtgcgaaacgtgtgacaggcagcttcatgcaatcacggagccacgctgcaaaaggtgttccaaaccagtcgacgatctgacgcaggaactttgtgaagactgcgccaaaagagagtttatcgtatcgggcggaaaggcattgtaccgctatgatgagcggatgcagcaggtcatccgccaattcaaatacgaaggctgttttgaaattggagatttttttgcagagcgcatggcgcaggcatttggtgattggattcaaagggaaaaattggaaatgatcatgccggttcctgtacataaaaaacggcttcgttttcgaggatttaatcaggcggagattcttgcggaaaaactgggagagtgtctggatattcccgtgcggacggaagtgcttgtccggaccgaggatacgaaaccacagaaaacactagatgtgcataagcgcatagcgaacttgcaaaaagggtttgcggtgacgagaccggtggaaggaagacggattcttcttgtcgatgacatttatacgaccggggcgacgctggaagcctgtggaaatgtgttaaaaagagctggcgcagagaaaatctgttttgtcagtttgtgtattggaacagcataataagcgatgaaaatgtgtccctcagtggatgcgtggaaaaggaggacattatggacgtaacaacttgttcaagatgcggaaaattatttaatcatatcagtggaccgagaatctgcccggtttgtctgaaagaatttgatgacaaatttccggaagtgaaaaaatatgtatatgaacatcctcacacaggaattgccgaattatcggaggctatgaatattccggcaaaacagatcaaacgctggatccgcgaggagagacttagttttgcagatgattcgccggttggaattgagtgtgagggatgtggcacgatgattaagaccggacgatactgcccggtttgtaaggaaaaatttaccaaagagtttggagatgcggctggtctgaaccgtaagccggtttccgcaccgccaaggcgcaaagacggagaaagtaagatgcgctttttggactaacagattggagaaaaacagatgcagaaatatgattgtattgttgtcggctgtggttttgccggcgcagtagcagccagagaactggcggaaaaaaagggaaaaaaggtattgatcctggatgccagagatcatgtcggtggaaactgctatgatctgccggatgaatatggaatccgcattcatcagtatggcccccacattttccatacaaacagcaaaagggtctatgagtacctttcccgttttaccgagtggttttcttttggacatgaagtggtgggaaatgtatatggaaaagaactgccgattccatttaacctaaatacgcttgcgatggtttttggagaacgtgcgcctaagatggaagaaaaattgattcagaaatttggagagggcgcgcgtgttccgattcttgaactgatgaatcaagaggacgcagaactaaaagaaattgcagaatatgtgtatgaaaatgtgtttttgaaatatactatgaagcaatggggaaagacaccaaaggagatcgatccttctgtgtccggacgagtgccgattcttgtcagccatgacaaccgctattttcaggatacctaccagggaatgccgatacctggctacactgaattgtttgaaaaaatgctcgattttccgggaattgacattcgcctgaactgccaggcaaaagaagttctggctatacagccggaagcggaagacaagattttgtttgaaggcgagccatttacgggagaaattatttttaccggagcacttgacgagttttttgatgtgcgttttggcagacttccttaccgttctcttcatttcgagtttgaacatttgaaacagccgtttttccaaagccacggtgtagtgaattatactgtgagcgaggattttacgcgtattacggagttcaaatatctcactgaccagaaagagaatctggagacgacgatcatgcgcgaatatccgatgccatatgaggcaaaggacggacagattccttattatgcgatcaacaataaagaaaatgatgcactttatgagaaatatgtctcgtatgtgaaagaagttcccaatttccatcttttgggaagactggcagagtacaaatactacaatattgatgcaattgtcgagcgtgcgcttgactttgcgcaggaaatttaactgataatgggagaatgaattatgaaattattgaccgtagcaattccctgctacaattcacaggaatatatgaaacatgccatcgaaagtgctttggtcggtggggaagacatcgaggtcctgatcgttgacgatggatccaaagacgatacggcgaagattgccgatgagtttgaagcacaatatccggggattatccgtgccatccatcaggaaaatggtgggcacggcgaggctgtcaatgccggcctccgcaatgccaagggcctttattacaaagtcttggattccgatgactggctggaccgcgatgcgcttctgtgcgtgatggatcagttgcgtcaaatggtaaaagaaggaaatatggtagacatgttcctggcaaattatgtatatgagaagccgagtgaacacaagcacaaagtgatccgctatgaaggcgtatttccggaagaagaagcatttggctggagtgatatcaagcgcttcaagatcagccagaatatcctgatgcattctgtgatttaccgcacacagatgcttcatgactgtggtcttgaacttccgaagcataccttttatgtggacaacatctttgtttatgtaccacttccaaacgtaaaaacaatgtattatatggatgtcgatctgtaccgatattacatcggccgcgaggaccagtctgtcaatgaaaaagtgatgattggccgcatcgaccagcagatcaaggtaaacaagattatgattgatgcttacgatctcacgaagatccgtaataaaaaactcaaagattacatggtgaaatatcttgccatgatgatgaccgtcagctccatcttcctgatcaaagaaggttcggaagaaagcctgacaaagcgtgctgaactttggcactatctgaaagcgagcagcaagggaacatttcgtctggtcaatcaccaggttctcagccgcccgatgcagatccgcggtaaagcaggccgcaagatgttagtgtgggcgtatgcgatttcgcgtaagatttatgggtttaattaaggggaaaatttggggctggtcatgccacaggatgaaaagtagatttaggcatgaccgccgttcaggtttgggtcatgccgcaggctgaaaagcaggtttaggcatgactgctatcaaaattcttgtaacaagattcaatcgaatcaataattccattaaataggatcttatgccgaaaatgggtatatacagggaaaaatcttattatgacatttgaatcttctgaaaaggtgttaaatacaaaagaaatagactgcatcattcagacagtctttcccacaatggaacgaagttaataaaaaattcatatttttcatattgtatgttctgaaatcttgccttattattataaataagaattggtaaaaggaaagaatcaatgaaacataaaagtaaaaaatggatgcttcagaccaaacgggcagattttcgcaagatcagtgaaaaatttgggatatctccggttctggcaagatgcattgtaaatagagaagtgcaagaggaagaaattggaaattacatacacgcagactggaggcagctgcattcgccgtggctttttaaagacatggcgaaggcggtgcagattctgcgggaaaatagagaaaaattagtggcaatttcttcggattttgactgcgatggaatattttcggcaatcattttaaaaaaagggctggaaaaagttggaatacgtagtgagatttatacaccagaccgggtggcggaaggatatggggtaaatcgacggattgtggatgaggcgacagaggccggcgcggagatcctgcttacttgtgataatggaatcgctgccaatgaagaaatccggtatgccaaagaaaaagggatgacagtcattgttaccgaccaccatgaagtgcaggaagagctgccaccggcagatgctgtcgtagatcataagcaagaggaatgtggatatccgtttaaaggactgtgcggtgccggtgtggcatttcagctgatcggtgcattgtacgaaaaagagggcatctcgcccgatgagcgtgaggacttactcgaatatgcagcaatcgcgaccgttgcggatgtgatggaattaaaaggcgaaaaccgtgggctggtaaaatccgggctgcgggcattggaacatacaaaaaatacaggacttcgcgctttgctggaagtgcaggaattaagcggaaaagaacttgaggcgtaccatatcggatttattctcggtccctgctttaatgcggcggggcgaattgataccgtgacgagagcgtttgaacttttggaggaaaccaataaggaaaaagcattgcaaatggcgcggcaattaaaagacatcaacgataccagaaagcaaatgacagaagaggccgcaaagtgcgcttttgagatattgcaggaaagcggaaaagaagatgagccggtacatattgtgcttttgccggattgtcatgaaagccttgtgggaatcgtggcgggaaggataaaagaagaataccatcaccccgtaatcgtgttctgtcctgtaggagacgggcttgtaaaaggttccgggcgttccatcgagtcctatcatatgtttgaaaaattgatggcatgtaaagatctcatggttcgctttggtggacacaaaatggcagccggaatgacactgcatgaaaaagatctcccggaattagagaggcggttgaatgcagaggcgggacttacacaagccgattttgtgccggaattatggattgatgtggcgatgccggtgcagtatatatcgattccgctgatcgaagaattgcagacgctggagccattcggggtaggaaatccgaagccggtatttgcagaacaacatttccatatactggaagcgtcgaggcttggaaaaaatagaaatgtgctgagcatgaaagtggcaaatgaaaaagggtatgtcataaaggcagtatattttggcgacattgatgtgtttgaagaatttgtatgtgaaatatggggagacagtgaattgcagaaaatgtatcagaaacagcccaatgaaattgatataggatttgcctattatccttccatcaatgaatacggcggaaatcggacgctgcagatcgtagtaaccgattattgtgtggtacacaaggacaggtaaggagtgagcagatgataacgataagtttgtgtatgatcgtaaaaaatgaggaaaaagtgctggcaaggtgccttgacagcattgcagatcttatggatgagattattattgtcgataccggatcaagtgataatacaaaagaaatagcaaaaaaatacaccgataaaatttatgattttgcatggatcgatgacttttcggcggcacgtaattattctttttccaaggcgacaaaagagtatatttatgtggcagatgcagatgaagtaatagacgctgacaatcaccgaaaactagccgaattaaaggaggttctgatccctgaaatagaaattgtacagatgcgatactgcaatcagctggccaatggaacggcttataattttgatgaggaataccggcctaaattatacaaacgccagcgggaatttacgtggatcgaaccggtgcatgaaatggttcgtctggatccggttgtttatgacagtgaaattgatattttgcatatgccggaaagcgtgcacagcagcagagattttgctgtgtttcaaaagcagattcaaaaaggacagcggctttccaagagactgcatcatatgtatgcaatggaattgtatatttccggaagtgatgaagatgtgattcaggcagaaccttattttgctgcgacagcatgtgagccggaacgaagtctcgatgaagtgaaagaagcagcttgtatcgtcgtgcgggcagcaagacttcgcggggacagcggagtgattttgaagatgtgcctcaaagatcttttgagtgaaggttcttctgaaatgtgttatgaacttggcgaatatttttatgaaaagaaggactacgaagaggcggcgatgtggtattacaatgcaatgaacgagacaaacagtattttaaatattcacacttcgaccgactggccaaaggtgcgctacgcagaaatagaaaaaataatagcaggcaaatagaagaaaggagcaggcagatggcgggacaaatacagacgctgcaggaaatgatcaatcaggtggtaaagggcaaacaaaaagtggtagaaaaggtgctttgtgcgatgcttgcaggcggtcatatattgctcgaggatatcccgggagtcggcaaaacgacgttagcgatggcgattgcgaaagcgacagatctgacgtatcgacgcgtacaatttacaccggatgtgcttcctagtgatctggtgggcttttccatgtacaatgaaaagaccaaagaatttgaataccgcgaaggtgccgtatttgccaatctgtttctggcagatgaaatcaaccggacttcgccgaaaacccagtcagcacttttggaggcgatggaggaagaaaaggtgacggtggatggaattacccataatctgccagccccgtttacggtaattgcgacagaaaatcccatcggttcttccggtacgcagatgcttccggaatcgcagctcgaccgttttatgatctgcctttcgatgggatatccggaacatcaggatgcggtggatattttgaaaaacaatggtgcgaaatcactttccggcattcaggcggtggtaaccttagcagaatggaaaaaattgcaaaatatggcagaagagagttatgtcagcgaagaaatgtatgattatattgttcggctgacggaaaatacgagaaagcatccgatggtgcgtctcggagcgagtccgcgggcaagccttgcgcttcttcgtatggcgaaggcaatggctgtgatgaaagggcgcgattacgtgacgccggagaatgtgatggacatttatcaggaagtacttgcccaccgtatcaagctcaatatgcaggcaaaggcacaaggattggaagtctctgatattttaaaacaggtttttgaaggaacaaaagtggtatgcgtagagtaaaatactggattgaatttatcgtgatatttttcctgaatgccttgatgtattggtatttgggcggctattttaatctgctgcttggcgtggcaatgattctgtttcttgggtttacgctggcaatggtaccgctggtgatacctaaaacagaaccgaaaatagaaattcccgcagctgaatttaccaaaaatacggagtttttggtacgtatccgggttaaaaacagaagtatttttcctgtgatacgctgcacgttgtatcttgagattgggaacggtttttttgaacagaaaacagacaaaacagtgacgatctcacttcctgccaaaggagaagaagtgtacgagatgccgctaagctcgggactttgtggggatattgagattacattgaaacaatttggaatagaagaccttctttcttttcatgaaaagcgcaaaaaggccgggcagacagaacacatttatattctgccttccgagggggagacattggattttgagcagaatgattatgcggccggtttgacggaatcgacggaaagttctgcaaaaggaagcgatttttcggaaattggacaagtacgggaatacatacccggcgattcattgaaagatatccactggaaattatcggcaaaaaaagaggcacttatggtaaaagagagacttcagatgtcttcgcagaaactgcagattgttttttgtgtggaccgcagaaatccgcagagagcggatgaagtaatctgttttttgtacgaactgggaaattcggtgataaagagccggattcccgtaacggtgtattggtgggggagcaggagccggcagttatatgaaaaaacagcagatacaagagagggatggaaagaagttctggagcagattttttataccggaggcggagaggaagaagctgtcgaagcatttcgaatgaatgcgccggatcaggattatctgaaagtgagcgaggaaatgcttgtgatgtggcagcgatagaaagtgaggtgacagaaagtggcatggtttcgcaagaaaaaggaacaaaagacgaaggaattagtaaccggacttgtacttggagaagagcggaccgctcagcagtcccggcgttttcttacctgccttcccaaaggattattatgtttttttatcatttttggttcctttgggggctttttgtcagcgtttgaaatagaatgtaattatgtgatcgcagcccttgtacttttggcatccgcggtatattttagctttctgttttcctttcaaaaaagcagccggaaagatcttggatatattctattttttatattttatgtgtttggaattttgacatttaaagtgtatgtaaatagtggcttcgcggggattattaacgtgatccgtcagcgtggcgaggtttattttggcttaaataccgggacggaatttgcggagcagatagaggatcgaaatctttctgtcacgatgacatttatttttgtcggggtatttttgatcctgacattgaacatttttttgagcaattatatgaatttaaaattgccgctttttatatgcgttccgttctatatcattccgctttatttccgtcaggaaccaaagttattttttgtgttctgcttgtgtggaggatttctcggagttcatatgttaaaaaacggaaggcgccatcaggtggaaaaaaatgctcgtgtttatcaaggcgttttgctgactgcgcttgccgccgttgttttgaccggtgtttttagtctcgcatttaccgaggagaaaaatcgtgaaatttaccatgaaaattcttataaaaaaagtacggaacgtgccgtttccggctttgttatgatgggattttggagtttctttcccaatcctgcttcgcgaggcggtatgagtggcggaaaactgggcgatttttcaatgcttcgtccggataatgagaccgatctgaagatccggtttgcaccctatacaacggatcctctttatttaaaggggtataccgggcttcattatgaaggaaatgaatggacggatggctatcagatgctgggaggcaccgtcggacatacgcagtatttttataccgaaagcatgaaagaagaagccgatgttttggcgaaaagacaaaaaaagaacccacagcaggaagcaaaagcaaagattgaaatagaaaatgcaggagcggatgcagactacgtatactatccgtattttaccaaatttaaagactataaaaagtataccaattcaagtcagaagatttatgtcgcaaatccgatcggaacaaaaaatacatttactttttatccaaaccttaccaaggaagcggtgattcaagatgcagattcttatatttaccatcaggttccggatgaaaatacgacggtgttagatgactgtattcgcgatatggggttggttccgggaaaaaattatgggacggattccaatgtggtcaacacggtaattacctatctgcatgacaattatacctatagttaccgcccgggaagagttccggaaggcgaagattttgtaaattatttcctcgaggataataagaaaggagtctgtatgcactttgcctccgcggcagcacttcttctccgccggctgggaatcgccacgcgttatgtggagggctatgctgtcggttatggtgatattttgaaagggacactgcgcgaggacttaaattatgatgacttttacgagggaccttcggcacttggaaaaaccggtgtgatggaagtggagttgacggatgccaatgcacatgcgtgggtggaagcatattttcctaatacaggctggcaggtcgtggatgcgacaccgacaaatatgtctgaaaatacagatagtgatttttggtcgtctgttaaaaaattgattgatgattccccacagattcaacttggcgaagcgttttcaaattttggaaccgggcttatttcgtctggtgtaatgcctgtcgctgcgcttgttgtggcggttgctattattttattctttgcaggaaaacgagtgtatttgagtatacttcgatatcgttcgtggcatacggaagatgtggcgaaaaatttattaatataccttgaaatacggagccggcgatgggagaaaaaggatgctgcttacgccggtttggtaatgccgggagagcggcttcattatctggcagcaagagattccgaactaccattcgaagagacggggttggaagaactttttgaaagatgctgcttttcttcgtataaaccgacatcggaagaatacaagaaactgctaaactggattaaaagattgacttgattttcataaaagactcatgttatacttttacaaatgtaactattcaggatcaatgtatggaaattaatgaatcgtcgtgcttgcacgtaagagactttgatttccatacattgagatcct

SEQ ID NO: 1082 - DNA, 21869 bp, unidentified
  source 1..21869: mol_type = unassigned DNA
ataaaaataatccatgacttttcccagcttatgaatcgttactctcgaacttctacgataccgcaaaagacggctcttgtcaaacattttcttcgcatcaaacaaacgaatggccttgtgaacactcattgtctttttctcaaatgtaacatcttcatcgatataacgtttcatacgatcacttacacaggcaagcagctcgtcggtcacttctaccccgcgtagtgtacagtaataccctgtatcgatcgaatactctaccgagatcttttcaaatttatctttcggtgtctctttgtaaaaagccttcaacataaccatggtaagtcctctgacatacacacggcggccgtctttatcctgaaaattacaaaatgtaatatggtttccgctttctacggtttttccaagttcttttaccacaccatctacttttacgacaagcgcatccgagtgtccggtctgttttgctaattcaaaatatgtaattcctttttcacaaaccaccttttttccgtcaatttttactgaaatgttctccatggtgctcatctcctttccgctcatttcattttttctgtaagttcttctaaaagtgtacacagatgctccacttccaaacggcgcgcaccggtattcctctgctctgccaatctgtcaaggattgaatcataaaccttcttttcctgcagcaggaactcaagcatcaccgggtcctgcttctcgatcaaataggtgctgtaaccggttcccgacacattgcacccgtggggttcccccgctttttctgaccgttttgcaagcatggcaaagtaaaattttccttcgtcacgacaggctttttcctgcacgagttcaaatccaaattctgccaatttttctcgaacaaacccgatttccgactgtggctgcaacaccaatgtctgtactttttcaagcacctccggacgtgccttcaatatgtcaatcatcaaagggccacccattccggcgatcatcagggtgtctacttctcccggctcgagtttttccatgccattgcttctgcggcactcaatttgtttttccagaccttctcgccggatatgctcttttgcccgtgcgatcggtccttcattaatatccatcgcaaccattttttctgccacctgattctgaataagccagatcgccgcatatccatgatcacatccaatatctgctactctggctccctgcggcaccaaagatacattcatctgtaaacgctttgataatttcattaatccaaatagtccttcaattttctgctgcggcttggatgacgcagtttacgaagcgccttcgcctcaatctgacggatacgctctctggtaacattgaattcttttccaacttcttccaacgtacgggcacgtccatcatccagaccaaaacgaagttccaatacttttcgttctctgtctgtcaaggtaccaagcacctctgacaactgttctttcaaaagtgtaaatgctgctgcctctgccggaaccggaacgttgtcgtcctgaataaaatctcccagatgactgtcttcctcttctccgatcggagtttccaaagaaaccggctcctgcgagattttctgaatctcacgtacacggtcgaccggaagattcatttcctttgcaatttcttccggatatggctctcttccgagttcctgaagcagctgacgctgtacacggatcaatttgttaatcgtctctaccatatgcaccggaatacggatggttctcgcctgatcggcaatcgctctcgtaatcgcctgacgaatccaccatgtcgcataggtactgaatttataacccttgcggtaatcgaatttctcaaccgccttgatcagtcccagatttccttcctgaatcagatcaaggaaaagcataccgcgtccgacataacgtttggcaatgctgacaaccaatcgaaggtttgcctctgccagacgttttcgtgcatccagatctccggtttccattttctttgccagctcaacctcttcatctgcagacaacagaggaactttaccgatctctttcaaatacatacgcaccggatcttcaatgctgacaccatcaggcacagaaaattcgatattttccagttcttcttccgttggctcgtcatcgacatcaaggataatatcttcatcggcatccgtatccggcaaaatcgcgatgatcccattctgctccagataatccagaattttttccgtcttatctccatcgagatcaatatccttgaattgctcattgatgtcactgaaattaatctttccatcttttttctttcccatttccaccaatttgttcaacgactccaaaaactgtactcgttcatccactgtattcttttcttccttcatattttcctccattcttgcaaatttacaagtttcttaccatttatgtcaatgtaatgtgtaatgtctctaactgcttcttttccataatgatcttctgcagttgcgaaagatcggtgatctcccggcttttcttatccagacttgcctttttgagtgtttttaccatctcattcagtgccttttcgcgctccgaatcctcattgacctgctgtacctgcttattaaagatccccgctgccaatgactgttcttccttgctttcaaaataactgatgatctgcgccggcgagatctcaccggttcttgcctgctcgtacagcatgccggcgatcgtatgatacggttcttcaaaaaagtcatccggctgtaaccatctggaaatctttggaaacagtccaacatcttccgcgatccaggtcaaaagtacgccctgtatctttaaaataccatcttctttctgcgtctttgacttctgtctgcgttcctgacggatcttttcataatcgatgccaacccgcgctgctgcctgtctgctcacaagcccgcgaaaatcctccgcgcgtatcgcatattgtctcgcaaaggcttcgatatagttgtttctctcaatctcattatcgaaggtaagacatttctttgccgcttcattcataaaacgtgtcttttcctccggatcctccatattatatgccgtccggaggcggtcaatctcataaaagaaactgttctgcgcctgatcgatccgtttttgaaattcctccttcgaaagtgccttgataaattcatccgggtctttgtacggccgcatattgatgactttcactgtaattccggcttctttcagcatagggattgcccgcagtgccgctttcacaccggctccgtcactgtcatagcagagatacaccgtatcggtataccgttttaacagactgctctgctggctcgtaaaagccgttcccagcgaagctacggcattggtaaacccggcctgatgcagagcgatcacatccatatagccctcgcacacgatcattccgtgatcctgttttccatggacaaaattgagaccgaacaggtttcggctcttatcaaatatcatcgtctccggtgaattcagatacttcggcttgccatctcccatcacacgtccaccaaaggcaattactttattgcggcgatccatgatcgggaacatgacgcgattccaaaatttgtcatacacgccctttgcctcctggaattgaaacaatcccgtctgattcaggagcgaatcgtcatatccttttgctttcatatattgatacagatcgttgctgtatttgtcagaatatcccaatccaaaatggcggatcgtctcttccgacaattctcgtccaagcaggtactgtttggcttctctgccccgctctgagtttagtttcgcataataataatttgccgcgatcttgtatatctctaaaatttgttctctgacattgcgtcgtcgtttttcttcggttgtctccgactgttcgggcagttccattccggcccgctctgccaactgggcaagtgcctccggaaacgtaagattttcgtattccatcaaaaaagtaaatacgttgccgccggctccacagccaaagcagtaatacatctgtttgtttccacttactgagaaagatgctgtcttttcgttgtgaaatggacaaagaccaacgtaattgcttcccgaacgttttaaatttacatacgaggagatgatatccacaatatcattgcgctgcctcacttcctcaacaaagtcttcactgtaatacattcccatcttcccttttttttattcttttcccctatcagtaaatctgccatgtactcggaatcatcaatgcctgataggtggatacggcaaaccggtctgtcatccctgcgatataatcgcagacaaccgtcgatatgctctcgcccttttcccatatcatccgggtatattcttccggcatttcctcgatatgattggaataataggaaaataactggctcagcatacgttctgcctttccctcttctcgtttggcatcggagtttacatagacattggcaaacataaacttacgcaactcctgcagtgcctcatacgtttcatccgacatcataatgtcattttttcccatactatgtataacgatgtcatggatcaaagtattgagccgctccctcagattctttccaagcacctgcacacaggctttcggaagatcttcttcacagatgatctttcctcggatggcatcatcaatatccgaattcacataggcaatcttatcgcaaagccgcacgatttttccttccagagtggatggatgaccggacgtcgaatgattcaggattccatcccggacttctttcgtcaagtttagtccttttccgtttttttccaatctttctacgacacggatgctttggatctgatgcataaatccatccgggcagatacggtttaacatacgttctccagcatgtccgaacggcgtatgtccaagatcatgtcccaatgcgatcgcctcggtcagatcttcattcaaacaaagtgcttttgccacagtcctggcattctgcgacacctctaacgtatgtgtcagccgggttcggtaatgatctccctccggcgataaaaatacctgcgttttcccttttagacggcgaaatgacttgcaatgtaaaatccggtcgcggtctctctgataaaccgggcgcagatcacatggttcttcataatgttcccgtccctgtgactgatcactgaatgatgcataagggctcaggatatcatgctctcttttttcaaattgttctcgtaatgtcatactatgtctcccttccgggtaacaaaaactgcctacatttacatatttcaacgtcaaaaaggattttcctttttttcattgattatttttttaaaatattgtaagatagagaagaataaatatatttggattggaggctgttacctatggctcgtaccggaaaaaatacatggtcactctttttgctgttactggcgggcatcgttctgggaagttttatcgctcatctgactgccggagtttccgctctttcctggttgtcttacggaaagacattcggactttcttctcctattgtccttgacctgggagttttggtcctcacctttggacttaccatcaaatttacgattgcaagtatcatcggcattatcatcgctgcaatcatttatcggcttttgtaatccggacggggcagcggtgctgttccgtcttttatcatctctatcataaatggcacgattgccggatcaaactgttttccactgcaccgatcaagttctgataaaatataattttcttcatgcaattccttgtatacgcgcttgcttgacatcgtatcataactgtctgccacgcagataatacgcgctgccaatggaatctccttgccttttaatccttcattataaccatttccatcatatctttcatggtggtatctcgctccatcgctgattccctgaattgctgtgaaatcttttaaaatctcaccaccgatggttggatgatttcgtataatctgcatttcctcttcggtcagtttccccggttttttcaatatggcatcgggaattcctattttcccgatatcgtgaagcattcccatataataaatctgctcctgctcctcatctgacattcccatacgtttggcgatctcagccgaataaatcgccactctctgcgaatgtccattggtattttgatctttcgcgtcaatggcgtgggcaaaggtctccaaggactgattcacaatatcatgatactgtttctgcttcttctgcagaacgtccactttccgactcttttcgacgagcagtatcacaagccctgccacaacaacaatcaagcatcctgttactatccatattcctgtcattttcccttttccttcctacttttcctgctgacttacaattttctttaactgcgtcaacacaccgtcttcccaataaggtccacattcacgggatgcggcacgtttcacttcttctctcgcatttgccacggcaaaactgtattttgcccgctgcatcatgacgatatcattttcattatccccaaacacacaggtttcttccggcgttatctgcagatgcccctgtaaaaaagcaaccgctgttccttttcccgcttctttcggtacacagtcaagccactgaatgccggcaagatttaatctcactttattttcccattttgggcggaaccagtcttttgtcaattgttctaccatattgtgatgatacagggagattttaacaatatcatcggatatatttttctgcagatctcccaccgcctgaatgtcaaacccgtacgaatcggatatccagcgatacatctcagaatcttcacttgtcgcatacgcatgttttttcccacagaccagaatatcgcaaggttcaatttttcttgcatcgtctataatctgccgacagacttctttttgcaaaatctgtgaatatatgcactcttctttttgaaatattaggcttccgccttctgaaattatgtacaaaagatcttttaccggttcaaataatttttcaatactcgctttctgccgtccgctgcatatcacaacttgaattcctttttctgacagttttcttaccacttcataatactccggattcaacgcagaagcagatcctccatcttttaccaatgttccgtctacatcacatacaaccaatcgtatcattttcttcttgtccctctgtctaaaaaaagcccggtttatgtataattcaccaaccgggcctttacaccttattgtctgtttacaacacaaaaattagttgttgatcaacttatcttcgccattccagctgtacaatttacggatttcttctccaacaacttcagaacgatgctctgcagcgatctttctcattgcacggaagtgagcctgtccgccagcttctgacatatcaagcaggaactcttttgcaaaagaaccatcctggatgtctttcaatactttcttcatagctttctttgtatcttctgtaatgatttttggtccggttacataatcaccgtactctgctgtattggagatagaataacgcattcctgcaaatccactctgatagatcaagtctacgatcagtttcatctcatggatacactcgaaatatgcatttctttcatcatatccagcttcgcaaagtgtttcgaaaccagcctgcatcaatgcacaaacaccaccgcaaagaactgcctgctcaccaaacaaatctgtctctgtctctgtacggaatgtggtctcaagaacaccggctcttgctccaccgattgccaaagaatatgccaatgcgatatcctgagcttttcctgtagcatcctgctcaacagctacaagacaaggaacaccttttcctgcctgatactcgctgcgtacagtatgtcccggtcccttaggagccaccatcgtaacgtctacatcttttggtggtacgatctgtccaaagtgaatgttgaaaccatgagcgaacatcaacatgtttccagcttccaagtttggcgcgatagactctttgtacaatttagcctgcagctcatcgttgatcaggatcatgatgatatctgcctgttttgcagcctctgctgctgtatatactttaaatccctgtgcttctgcttttgcccaggatttagagccctcatacaaaccgataattacattacatccactttcttttgcattcaatgcatgtgcatgtccctggctgccatatccgataatagcaattgtcttaccatccaaaagtccaaggttacagtcactttcatagaaaatctttgcgtctgccattgttttcatcctcctaaaataataaattattatataaagctctgtcagataaatctaacagatgttttacaccatcaccagtgttttctgccttactcttcggtcaggcatcctcttgtcagtccagtaattccggtacgaaccagttctttgatctcataaccgtcaagcagtttggtaaatgcatttaactttgcctgatttccggtcagttcgatcatcatcgaatctgcagcaacgtctacgatcttcgcacggaagatctccacgatcgcattgatggaaggtctctcttctcttgctgctgccaccttaaccaaaatcagttctctgcagacagaagcctcactcgtgagtttttccacatcaattacattttccaatttatgtatctgcttttcgatctgctccaatacaattccatctcccgtcacagcaactgtcatacgggatacctctgtattttctgtctctccgaccgtaaggctgtcaatattataacctctccggctgaaaagtcctacaacacgcgacaatgcgcctggtgtattatcaatcagaatggataataccatcttttgcataatgaaacctcctcatcgtacttatcaaacatttattttaccaactctatcgtttcttgtcaactcttaccattcaatttatttctcataaataaaatctgacaacgcttttttattcttttccacatccacgaccagacaatctgcaccattgatcttctcactggtataagcaccatctgccggaagatggtactgcttgatatctgtcgttcccatcttaactaccgccagaacgtaagaataaatgctgtccttatcaagatctgtcgtcacatttggcaggataacatcgatcaattccatccatttgtctactgacagagattttactttcttcaaaagtgcctgtacaaccagacgctgtctctcggttcttccatagtcatccccttttccggatgctgtcagaacagccggataatgtccgtttttccactttccatgacggatacggcaatagccgagtgcctgatatccattcaaaacctgcgttcccacttttacattacgatattttttacgacggatatagtttgtatcattcaggttcgtagcttcactttccgtcaatgtcgcttcgacaccgcctaccgcattgatcacatcgataaatgcatcaaagttcacttcggcatatccatccagtttaataccaaagttagaagcaatcgttttatacaacaatttgatgccgccaaacgaatacgcagcattaaatttattttttccgtatcccggaatttccacatacatgtcgcgcatcagagaagttacctttaacttcttatgcttcatatccaacgtcgcgatcatcattgaatccgaacgtcttgcagcgccttcagaatcctgctcatccaggttcttatctgcaccaaccagcagaatattgatcacatccgagtcacttaccgtatcgtattccgatatatcaacactgtttaacgcattatctttatcctgatttaccagcgacaatatgccgtctgctttgtattttgccacagcagccatgctccccagtgccatactgagaataattccgatcaccagaaatactctgccgacttttctcttttttccttttttatttttcactttctctgccatagtttcctccggatttctcttaaatcaaaaacattaatgcaagattccgcaccagaccgctcttcaaaaaaccgtagcgcagtgctaaaactcttctttttactgcattgctttctgacatttttgcaaattcataagcacatttttttctttccggatcggtgatctgctcaccaaacatccggtaaaacgcggtcccctgagcaaacgtagcccgaagtgactctttctgttcttttatgtgacgaatacgctttgccacatactgaaaaaaactgcttgttccaatcatattatcactatgctgccgataatgcaaggtcattttatcaacatagacaacttttccaaaatgactgcagatcaaagcaagccaccagtcatgaacacggatctcttccggcagttctgtcagatagtcgcgtacttttgcattgcacattatcgtacagccgatacacttattttccatgaaaagatgcgccgtgtcaaccttttttgtatcaagatgactcattttatgaaaagaaccgatatccgttttggacacatcgtcataactctctgcatcggtaaacaccaaaatcggaccattttccttctcttctgccgatttcatggcacggtatgtcacctcgatcttatccggtttccagatgtcatcctgatcgcaaaacataaaataagggaatgtctctcgctgcactgctttcagaaaatttctggtatacccctgattttgttcattctgccacaacgtgatctgcggatatttctctgcatattcttttgcaatcgctatcgtaccatccgtggaaccatcatcgcagatatggatctcataatctttaaatgtatttgaaaggatggagtccagctgctcgcgcaaatatttttcgccattatacgccgccaggatgattccaatttctgccatattacttctcctctatctgttttcctgttctctccaaaatctaggattcatcgttactttacggataaaccacatcggaagtttttcatagcgaagccccagtttatatccaataaacttaaatccgctctgcattaccagatccggaaccaaataccattttcctttgtgcaacagatacgatgctgtctgcttgacaagccggattccctcggattccgattttacactttcaaaaatctcgcgatactgtctctgcgaaaccgccatgtcaaaatttcttgtcagctgctgccagtacgtatatttatgagcatgcacaacttttgcttctgccgcataggcaatctgatatcccgcctgcaccatattcgccgccatgatcatatcttcattgaaaatagtctttgtaacaaagcctcccattttcaggtaaatatcacgacggtacattgcacatacattggagcagaaatacgttttgatccccagtctcggaagatcctctttcccttttataagggattcctccggataattaaactgtctcgtataagtttcgatcaccccgaccttgtcatccggaagctgccttccatacgccgcagcaattgtatctttttgctgtaccgcctgcagaagcttttcgatcaaaacaggatcttcgggcacggcatcctgagtcataaagagcataaattctgcttcactcatctgagcccccttatttctcgtgccgccatgatcaaattccagtttaccaatcggaacaatcgttccatgttttgatttttccagaattttcctgacccttgtatcctctgcttcgtcctctgtcatggtctgcataaaaaagatgtgggcaggttctaccgtctgctgattcagtctttcaatcaatttttccaatttttcatctggccggtacaccggaatgataacatcaaccacgttttctctctccattttctatcttccaaggtaactattcaggatcaatgtatggaaatcaatgaatcgtcgtgcttgcacgtaagagactttgatttccatacatttagatcctaatagggctcccctccacatatgagcatttttagccttgtaaaaggcgagaaaaggacacgaagtgttcgaaatgcgaatatgtgggagggggaacctgaatagttatcttccaagcaatttatttacaagttttacagcctctctggcatctttcgaatacccgtctgctccgatctcctcggcataactttctgtcacgacggcaccgccaatgataatcttcgcttttaccccctgggcttttgccagatcgaccacttctttcatctcagtcattgtcgtcgtcataagggcagacaatccaatgatcgccgcattctcctttatcgctgtatcaatgactaactgattgtcaacatcttttcccagatcaatgacatcataaccatagtttttcagcatcagcactaccagattttttccaatatcgtgaatatctccttttaccgtcgccatcacgatcgtatccagtttctgatctccccgctcttttgcaagatacggttccagataatcaatcgccttttccatcgcctcggcactggctatcagctgcggaaggaaatacgttcccttctcaaacaattctccgacatgattgatcgccggaatcagataactatcaatgatctgccccggtttttctcccttttcaatctcttctttggcaagagcaagtgcctgtccgtcttttccttttacgacagcaagatacaacggatgtccatcttcttcgctgctctggcggtttgcactatttccggtggaaatctccgccttattcacaccattaatatagttcagatccgcattcgttttgtttaagagcagatccgtcgccaatgctgcatttgtaagaagggtctggcttggatttgcaatggccatcgtaagtccctgcgcgatcgccatcgttaaaaaggcagtatttacaaactggcgttccggaagtccaaaggaaatatttgacaatccgcagatggtagcgacacccagttcctctttacaataacgaatggtttccagcacttcgatcgccgcttttttattggctccgatcgtcgccacaagtccatctacgacaatatccttttccgacagaccgtattttttcgcttctgtcaatatcgtatggataatttctttcttttcttccagattttccggaagtcctttatctgacaacggaagcaggataaacatcgctccatattttttcgccgccggaatcaaatgttttattttttccggttcaagcgaaatggaattgatcaaagcacgtcccgggtagatacgcagcgcttcttccacgatatccacataacttgaatcgatacaaagcggtacgtctacggcaagtgtcagttcattgactgccatcagcatcatttctttttcgtcaattccattggttcccatattgacatcaagaattttggctccttttgccacctgctcttctgccatatcgataacaagatccattttcttctggcgcagttcttcctgcagatttttctttcccgtcggattgatacgctctcccacgatagagaacgctccatccagatcgatttctaaaaagtttctttcattggtaagtgcccggatctgctttttctccggaatctccgctttcacgttttccaaattttgtatcatcttccgaatgtgaagtggtgtcgtaccacagcatccgccgaggatcgtagctcccatctgtgccaatggcagcatctcttttgcaaattcttccgcatccatgtcataggtcgtctttccgtcttccagtttcggaagaccggcgtttggctttactacaagcggaatgctgctgacacggagcatccgctgcacgacctcatgcattttatccgggccggtcgaacagttcaatcccacagcatcgacgcccatggattccattacgataaccgccgtctccggattcgtaccaaacagcgtacgcatatcatcctggaatgtcaatgttacaaggattggaatcgtatctccacaagtttctttgatcgcaagaactgctccacggcattcctgcaggctcatcatcgtctctacggcaaacagatccacgccggcatcaatcaacgcatttacctgttctttgtacacgtcgatcaattcttccagcgtaagtgttcccatcggatacaactgttctccggtcatcgtcatatcaccggcgatgtaaatcttacgcgtcgtgccactttcttccactgcctgccggctgagtgcaaccagctgctgcgtcatctcatgaagtttgtcttccagtccatattcggcaagtttgatccggttacaggtaaatgtcggcgcataaagcacatcgcttcctgacagaatatactgtttctgcaattccacaaatacatccgggtggttcaaaatccaaagttccggacattctcctgcctgcattccatgttcctgtagatttgagcctgtcgctccatccaaaaatacaaatccttgttgaatatattctctaaaattcatagattctgcctttcctggttacaccatagctaattcttataactaactatccctgaaactgttttactccttcttcaatttcgtcatacagtttctgaaccaattcttttacttttgtaactgcttcctcaagaggtacctgaacctgtacggatttatctcttgtggaaatctcaacaacaccgtttttcatgtttctcgggcttacaactacacgaaccggcacaccgagcagatcggcatctgagaacatcgcaccggcacgcacattacggtcatcgtaaagcacttccaaacggtctttctgcagatcatcgtacaatttgtccgcaaattctttacattctgcatcatcggcacgcatacagcaaagctgtacttcccaaggtgcaatcgtaatcggccagattgggccgtaatcatcgcggcgtacttcacaaacagaagctgccagtcttcctacaccgataccatagcatcccatgatcggattatgttttttgccatcctgatccaaatattccatgcccatcgttttggtatatttcgttccgagttggaagatatttccaacttcgataccgcgggcaattttcaattttggttttccacagcatggacagataccaccgtcaattgctttcgcaaaatcgccatatacagcatccggtacatctcgttccatattcaagcccacataatgtttatctatttcatttccgccacagcagagattttcaatgcccttcagcgaattgtcataaaggacggtaattccttccggaagctgataagctccgataaatccggcatgaagtccgcagtcttctgtaatcacagccggatggatcgctgcaccaagataattcgtaatcttcgtctcatttgcctccagatccccacggataaacaataccacataagaatcgtcttcatttttctgataaactaccgctttcatcgaattttctaccggaagatgcaggtagtcacaaacctcttcaatcgtatgctgatttggtgtatctactaatttcaattctgttttttccaatttttggtctttattctcaataatgctctctgctgcctccatattggcacggtaatcacattcatcacaaagcacaatggtatcttctccaaccggtgtcaaaagcatgtattcatgagacaaacttcctcccatcataccggaatcggaagctaccacagccacctccggaatgccggcacgggcaaagatcctctggtaagctttgtacatacgatcataatatttttccagattttcctgtgaagtatggaaggaatacgcatctttcatcgtaaattcacggacacggatcattccggcacgaggacgcgcctcatcacgaaattttgtctgcacctgatagatcataaatgggtatttggtataactgttcgcatactcgcgcaccagatgtacagccgcctcttcatgtgtcattcccaaaaccatctgggcattgttacggtctttaaaacgaagaagttcacttcccacgctttcaaaacgaccggactcttcccacaaacttcccggaagtgctaccggaaacaatacttcctgtccatccagagcatccatttcttcacgaatgatcttttcaatctttgccgtaattcttttcaatggtggaaactgggaataaataccatttgccacgctcttcatatatcctccgcgcaccatcagcgcatggctctcaatcgcacaatccgatggtctttctttaaagcggtctccaatcattttatcaagtttcataatgttcctcctaatttaataatttaatttttttatgatacaatcttttaaataaaattgcactaaatgtcaatgaacatatctccgcaatcgggaaagcccaccatatagcattcagtccaaacacatgtgccaagataaaggctgccggcaaaataacaatcaactgccgaagcgcagataccatcaaactggcaattccttctccaaacgcctgaaatgtcgacatcaatatgatagagcatcctgcaagcataaaatgtgtgcaaataatacgcaatgccgtttttccgatttttaacatttccggtgaggcatcaaacaaaagcagaagcttgtccggtattgcgagaaaaatgcacattccgacaaacatgatcgatacggatatcgcaataccaaaccggatcgtctgcaggattctttccttctttctcgccccgtagttgtaagcaatgatcggaatgattccattgtttaatccaaacaccggcataaagataaaactgttcaatttaaagtaaacaccgaataccgcaaccgctgtcgtcgaaaacggtgccagaatcttattcatcccatatgtcatgatcgagccaatcgcctgcatgataatggacgggattcctacccggtaaatggaaccgatcgtcgcaccatgcggcttcatttttcgaaaactcagcgatacatctgtatttttcgtgatattaaaaaatacggcaagactcatcgcaatgatctgtccgaccacagtagctgtcgctgcgccggcaattcccaggcgcggggcgccgcacaatccaaagatcaagatcggatccaggataatatttaccactgcaccgacaccttgcgtgatcatggtaaaaaacgtctttcctgtcgcctgcaaaatacgttctaacatcatttccagcatgataccaaaggaaaagatcaaacagatctgaaggtacgatgtaccataacttacaatttcctttgcatttggcagggaggcatccacctgggattcaaaaaacatccgtgaaccaaagattccaaatacggcaaataccacgtaactgatcagcataagcaaaaatcccatgttggccgccctgtctgcctcttcaaacttcttttctccaaggcttcttgataacaatgcattcactccgactccggtaccacctgccacagcaatcatcaatgtctgtatgggaaaagcaagtgatactgctgtcaaagcatcttcactgatacgcgacacgaaaatactatctacaatattatacaatgcctgcacaagcatcgatgccatcatgggcagcgacatcgtaatcaataatttctttacgggcatcgttcccattttgttttcttttctctctgtcatctgttccatataaagttctctttcctcactttcttgtctccggttcttcggatatcagagatgtcttccaatatttccgaagcagttccggtgctgccatcaaatgctcataatcatttagccgctccaaataaaaacgcccggtcttctcatcgtataaaatctctgtaatacttgtattttccaagtctactgcaaactgcagtttatgtttcatcggcatatgtaaaagaaaggcacacagtgcacggatcacaccaccatgtgtcacaatcgccaccttcttttcgggtgcttcacatatctttttaaaatcgttcccgatgcgatcaatgacatcttgtccattttctccaccgggatacgccagatcactttcctgtgcggcacgctgacggacaaattttccatagtgggactcaatctcttcgtttgataaccccgtcagttctccaaactcaatctcatgaaatgcttccactgttcttaccgaaagtcctgtcgtctctgaaattgcctgtgcagtctcctgcgcccgctttaagccacttgcatataaagcttccaatccatacgaagcaagcctgtctgccacaagatgtgactgctgtcttcctgcgtcatccagacttacatcgacattacacaatttcgatgactgccttccatgacggatcagatagatttctttcatctgttatcacctctgcaatctcttattatataacggatataaatttttgtaaagaaactttctttcaattataatgcatattttccaaaaaactcttacgataatgccttcccacggatacatttccaaaataatttttcaaaatgatgacatttcgggaacggataaactgctcgacatagattggatttacaagataggatttgtgacactgacacaggaaatcattccccagtctctcgtgaatcgcacacaatgtcatataagggatcaaaaacacaccccttactgtatgtaaaaaaatggtacggctgtgatgttcgatataaataatatcatggatatccaacaatataattcttccgtcttttcgaaagaataccgtatttttcctgcgggatatagatgtttgcgtcacatcgtctcctcctctttctccacgattttctgctcttttctttcccggtagatttcttcacagttttccaaaatctggcgcatcataaaaaagaattcttccggtgacatttcaaataaagcattggcaaaatcctgttctcttaccttaccggttatcaaatagttcagatccattccatatagtctgtgaagcatgtccaatcccaccaaactgattgcgtggtcacctctttcccatttacgaaaatgtcctgtcgtcactcctagagaatctgccatttcagatacagatatatccataatacatcgaagatggcgcagcctttttcctacttgttcattgtcaaaaaaatccatattttttctcctcactcgtttattccgcttagtcaatttgtgtatggtctcattttaacgtatttctttttaaaaataaagtgcggaaaacggatattttatccgattttcgaatctacccctgaaaactatgctttacatctccctttaatacatctgcaattacttttgccaatggtgcggctgcattcatcgcctcctctacggtattattttcgtttcccaactcaatcaaaagtgcacgttctttcaaatgcagattataccggtatcctttgagatagattggtttggtaaacccgtcaaaaagttccattgcatggcattttaactgcaggctgaatgcgagatttgcctcccggttcgggttcgtaagataggcgatctctccggattggtttcggctcattccattaaaaaacatggcaatcgccgtccgttttccatcaattgtcgtatacgtatgcctattttttccgacagaatcccggtgaagatcgataataacctgaatgtccggatttttctccaactgtttttgaacccccgccaacgacacattatacgccttactccggtcaatttttccatccatccaatcatatttggtcgtatcatgaatcactccgtatccatttttttccaattcctttgctaatttctctcctactccgattacaccgtcggccactttcccggaacggctgtccgaaaaactttccgatgccccatgagtatgatagatcaaaatctgctttttcccgttttgaaccggaagcttcatatctcttttcagaagacgttctaccggaaatagttttcgctttaccgatgttgtagaatctactatgtaaaaatgatcccagagataatggacatctttcgtctcccataattttttcacaaacgcctcctcccctgtattgcttgtcactccggacgccggcacagcggcgacattttcactctgcaccgctgtatcctgctgaagagccaatgtttcctgcgaatcattttcctcctgcagaagctcttcgttttctttttgcagctgctccggatcgtattctatttttgctgtcacatttctttttttgacagggtacactgccagtacctccatcggccattctacctttttttcgacagcaagaagatagcagaactgcgctcccacacttctttttaattcagtttttacattattatccataaaaccaccaaggagcaaaagcaccaatgccgcgcacacgccaagccgttgttttccacgtttttccatctttgtcccccttttgtgcactctttacaatgtatccgtattttcttcgaaatattcctcactctttttctgaagacaataattcattactttggcaagtccttttgccagtattctgaccgactcatccacatttttcggtgtcacaaacagattttttgtttcttcctgtaagacttcccggataaactgctcccgctcccattcgcggtagccttgtttggtaagcacctgctccaaatggtcgctgatgatcgtgcgggcatccactaccgtcggaatccccaccgccacaaccggcacgccaagcgtttcctttgacaacgctttcctaacatttccaatgccggatcccggactgattccggtatcggtcagctgaaccgtcgtacacacacgcgacagacttctggctgccagcgcatccaccacgatcaccagttccggatgtgttttttccacaacccctttcagcacctctccggcttccatcccggtctgccccataactccgggggcaatggcgcttacatttccatactggtgctttttcatgaaatccctgccaaattcattctcataatgccgggtaacaaaaatctcctccaccatgcgcgggccaagagaatcgctcgtcacatgacgatttccaagaccggcgatcaagacccgttttttccgtagtccttttaccatccgctcaagttctttgcagatgcacagcagcagattttcattgtcctcttcatcatgcagaagttcttccgattctatcgtaatatacgtacccttcggctttttcatggctttgctgcctttttcatctttgatctcaactaccgtgatctttgctccactcttttcatccctctttttttccagcactactcccttgatttctacattatccctaggaaaactttccctgacttccatcgccagatcggtctttcgctctgtcatcctgccgtcactcctatcattcattctttccccattattccccatatttttttaattatgtattgacatcttccgttttttgtactatcataaatgagtatgtttatgttaatgtccgtgtccgtttaacgaaacatcataaaaaatatatgaaaatacacaatggaggtgttagaattggcaaatattaagtctgcaaagaaaagaatccttgtttcccagaaaagagctgacagaaacaagtctatccgttctaaagttaagactgcgatcaaaaaagtagaggttgcaatcgaggcaaatgataagacagcagcaacagaggcattgagagcagctgtttctgaaattgataaagctaccaaaaaaggtatttatcataagaacaacgcagcaagaaaagtatcccgcttgacacttgctgtaaataaactttcataatttgacttaagtatgtagaaggcagtc

SEQ ID NO: 1083 - DNA, 18167 bp, unidentified
  source 1..18167: mol_type = unassigned DNA
caggtcaagcagaactacaccttcggctgccgcacgccctgggcgctgaacgacgagcacaactggcagcgcacccagcgcatgggcgggtacacctttgtcgttatgggcattgtcctgttggtgcttgccttcctgggcggcctgctgggcgacattgctacgctgatcgtgctgctggttgctgtttttggcggcagcgcgtggatttatttgtattcgtatctggtatatatcgggaagatgaagtaaacttgctatgtaggggccgggcacgccggcccggccgtgtaaggcagacagtcgtttcccgttaggctgcgggccgcacatgtgcggcccctacacctctgccttacggtttgtaggggacggcggcctcaacgccacgcgggggcaatctccctccctaccctaccataaaacgcagcccgcgcttcaaatcgaagcgcgggctgttttttattcccctaattcttttgcaatgaactccggcacttcgtttggttctatgcccatgacataggcgaactcactgtgcaggacgttctgggcgtcgcgcagggcgctgtcctcataggcggaaagctgctttcccttggcgcggcgcagggcttgttcggtgcggatatcccgcaccatgcgcaccagcgcgtgcagattgccgcttttcagtgcctcgcggtaggccagcttgcgggcgtcggggtccgggtcgtggtcgggcaacggttcccgcagcagggccagcaggtcgtcccgggtgggcaatgggcgcattcgctccaaaagcggtgcactgtcgcagggcacacagattttcatactggcatcgtagaccggttttaagataaaacaatcgtggggctggccgcccagcgtgacacgcttttgctcggcaatcgtgcagacgccgctggtgccatagctgaccgtatcccctgctttaaacatgacgcatactcctttttctctcatgaaatgatttctttcctatacaagtatacgccttttcgtcaaaaaatgtcataggcgatttggacaaaaatgccccggcgcagttttgtacaaaatgtacgagattgcgccggggttagggcaataccgcataattctaagtgccgatacggtgagcgaggtgcggcagccgccggagcggtgcttaagccgtcaggcgggaattgtgcggtgttgccttaggttttacttatacagatcgaccaggttcagcagaatttccacgccctggtccatcttttcggctgtgatgcactcacacgggccgtggaagttgaagccgcctgtgccgaggttcgggcagggcaggcccatatagctcagggtcgcgccgtcagtgccgccgcgcaccgggctttcgatgggttccagccccgtcgcacggatggccttgcgggcattctccaccaggtggaagtggggctgaatcttctccagcatattgtaatagctgtccttgatgtccaactccaccgtgcccgcgccgtaacggccgttcaggcagtcggcgatgtgctgcatctgggctttgcgggcggcaaacttggcggcatcgtggtcgcgcacgatgtagcccagatgcgctgtggtcacgtcaccctgcatgctcgtcaggtggaaaaagccttccctgccctcggtgtgctcggggcgggagaaggccggcaatgcggcgtggaactccatcgccacattctgggcgttgatcatcgtgtctttggcactgccggggtgaacgctgaaaccgtggacggtcacgaccgcggcggcggcgttgaagttctcatagctgatctcgccgacgtcctcgccatcaacggtgtaggcgtaggccgcgccgaagccgggcacgtcgaagaggctcgcgccctcgccgatctcctcatcgggggtgaagccgatgcagagcttgccgtggggacggttttcggcaatgatgcgctccagtgcggtcatgatctcggccacgccggccttatcgtccgcacccagcagcgtggagccgtcggtggtgatgagggtctggcccttcatcgtgcgcaggaaggggaaaacctctgggtccagcaccgtgccggtggcgggcaggacgacggcctcaccgtcgtaattctcgtggatctgcggctggacattctcaccgctggcgtcgtccgccgtatccatgtgggcgataaagcccaggggcttggcgttctcctgccccggggtggcgggcagcgtggcgtagacatagcagtgctcgtccacatgggcatcggccaggcccagttctttcagctcctcgacgaggattttggccaaatcaaactggcgcagcgtgctggggtgggtgccgctgttggggtcggaggtcgtgtggacctttacatattttaatagacgttcataggcgcgcatgggcgtgtcctccttcaaaaaagcatttaatagcgatttctttgtcattataccacaaaaagcagcattttccaaccctgcggccttttcaagacgcgatttttgtgctagaataaataggattataaaggcaaactgcgccctgcgcgcggtcaaatataaggaggccatcatggcaaacagcatttttaaggataagaccctgctcatcaccggcggcaccggcagcttcggccataccgtgctcaagcattttctctccaccgatatcggcgaaatccgcattttctcccgcgacgagaagaagcaggacgatatgcgccacgagctgcaggcccagtaccctgagtacgcgggcaaggtcaagttctacatcggcgatgtgcgcaacccgcagtccatccgggacgccatgcccggcgtcaactacattttccacgcagcggcgctgaaacaggtgcccagctgcgagttcttcccgatgcaggctgtgcagacgaacatcatcggcaccgacaatgtgctgcacgccgccattgacgcgggcgttgagcgtgtcgtctgcctgtccaccgacaaagccgcctaccccatcaacgccatgggcatttccaaggccatgatggagcacgtcatctttgccaacgcccgcgtggcggccgagcgcggcggcacgaccatctgctgcacccgctacggcaacgtcatgtgcagccgcggcagcgtgattccgctgttcatcgaccagatcaaggcaggcaaccccatcaccatcaccgaccccaacatgacccgctttttgatgaacctggacgaggccgttgacctggtcatgttcgcgttcgagcacgcgaacccgggcgacctgttcattcagaagagcgacgcttccaccatcggcgacctggccaaggccgtgcagcagctgttcggcgacaccggcacgaacatcatcggcacccgccacggcgagaagctgtttgagacgctgatgacccgcgaggagcgactgcgcagcgaggatatgggcggctactaccgcgtcgccgccgacaatcgcgacctgaactatgataagttcgtcgtgaagggcgaggtccacacgatggccgacgactcctacacgagccacaacacgaaccgcctggacgtggagggcaccgtgaagaagattttgaccaccgagtacgtgcagaacgccctgaaagagatggaggccgagaaaaaggcatgaaaatccttgtaacaggggcaaaaggctttgtgggccgcaacctctgcgaaaatttgaagaacatccgcgacggcaaaaatcgcacccgcccggcgctgacgattgaggaagtgtttgagtatgaccttgacacgccgcccgcagagctggaccgcttttgtgcagaagccgactttgtgttcaacctggcgggcgtcaaccgcccgaaggacaacgatgagttcatgcagggcaactttggctttgcttccaccctgctggacacgctcaaatctcacggcaacacctgcccggtcatgctttcgagttcgatacaggcaactttgcttggccgctatgcgggcagcgattacggcaaaagcaagctggcgggcgaggaactgttcttcgattatgccaagcagaccggcgcggcggtgtatgtctaccgcttcccaaatttgttcggcaaatggtgccgtcccaattacaacagcgccgtggcgacgttctgcaataacgtggcgaacgacctgcccatcacggtgaacgaccgcgccaccgagctggagcttttgtacattgacgatttggtcgaggaaatgctcgatgcactggaaggccgcccccaccgctgcaattacgacggcctgacgcctgttttttgtgcagggggccgctactgtgccgcgcctgtgacgcacaaggttacgttgggcgagattgtagacttgctggaaaagttcaaggcacagcctgcaacgctggtggtgccggaaatcccagtgggcagttttgcgaagaagctgtactcgacctatctttcctatctgccgaaagagaaagtcattttcgatttgaagaaaaacgaggacgcccgcggcagctttaccgagctgctgaagaccgagagctgcgggcaattcagcgtgaatatttccaagcccggcatcacgaagggccagcactggcacaataccaagtgggaatttttcattgtggtggcggggcatgggctgattcaggagcgccgcgtcggcagtgaggacgtgctggaatttgaagtgaccggcgacaagccccaggccatccatatgctgcccgggtacacccataatatcatcaacttgagcgagacggaaaacctcgtcacgctgatgtgggcgaatgaaccgtttgacgcacagagaccggatacgttttttgagaaggtgtgacaccgcgttgcagggcgcggcgtccccgaagccccgggctgatgcaggcatcggcccctgcaatgccatgtgtggcagcattcaacaatattaagggaggaacctatggctgattacagcaatgtttcttttaaaaataacggcaagctgaaattgctgattatcgtcggcacgcggccggaaatcatccggctggccgccgtcatcaacaagacgcgcaaatattttgacgtcatcctggcccacaccgggcagaactacgactacaatttgaacggtgtgttcttccatgacctggagctggccgatcccgaggtctacatggacgccgtgggcgcggatctgggcgagacgatgggcaacatcattgccgagagctacaagctgatggccgccatccggcccgacgccgtgctggtgctgggcgataccaacagctgcctgtctgtcatcggtgccaagcggctgcacattcccattttccacatggaagccggcaaccgctgcaaggacgagtgcctgcccgaagaaacgaaccgccgcatcgtggatatcatctccgacgtgaacatggcttactccgagcacgcccgccgctatctggccgacaccggcctgccgaaggagcgcacctatgtgaccggttcccccatggccgaggtgctgcaccagaatctcgagaaaatcgaagcgtcggacattcacgcgcgtctggggcttgagaaaggcaagtacatcctgctttccgcccaccgcgaggaaaatatcgacaccgagaaaaactttacctcgctgttcaccgccatcaacaagatggccgaaaagtacgatatgccgattctctactcctgccatccgcgcagccgcaagcgactggagcagagcgggttccagctggacaagcgggtcattcagcatgaaccgctgggcttccacgattacaactgtttgcagatgaacgccttctgcgtcgttagcgacagcggcacgctgcccgaggaatccagcttcttcaccagcgtcgggcaccccttccccgcggtctgcatccgcacctccaccgagcggcccgaggcgctggacaaggcggactttattctcgcgggcatcgacggcgaccacctgctgcaagctgttgacgtggccgtcgagatgaaccgcaacggcgatttgggtacgcctgtgcccgactacaccgacgagaatgtctcggacaaggtggtcaagatcatccagagctacaccggcgttgtaaacaagatggtgtggcgcaaatactaaaacgacaggaacacgatacctatgcgcatactggtagtgacccagcatttctggccggaaaatttccgcatcaatgatattgtcgagggctttgtgcaggacggcctctccgtggacgtgctgtgcggtctgcccaactatcccaaaggcgaatggttcgacggatacagcgccgacggcccttttgaggaagtgtacaagggtgcgcgggtgttccgggcgcgggagataccgcgcaagggcaacaccggcaagacgatttttttgaactacgtcagctggccgctgtatgcggcaggggcgctgaaacgcctgcccggcgggtatgacgcggttttctgctttaacaccagcccggtgctgatgtgctggcccgccatcaaatacgcgaaaaagcacggtgttccgtttacgaattatgtgctggacttgtggccggagaatctgtacagtgtgcttccgatcaagaacaagtttatgcgttttgtggcccaggcggtcagcgacggcctgtacaagcggtgcgaccggctgattgccatgagcgagccgctgcaagaacggctgtgcgcccgcaccgggaaaacggcagcggaagtggcgatcatcccgcagtactgcgaggatttctacgccgtgccgcagcctgatccagcgctggaagaacggtttgctgggcggttcaacctggtatttaccggcaccttcacccctgcgcagagcttggacatggtcattaacgccgtgctggacgcccgcgccgccggggcggaagcgctgcacctgctgctggtgggcgacggcatgagccgcgaggccctgcaaaagcaggtggctgatttgcgcgccgaggacgccgtgacattctacggcagcgtgcctgccaccgatgtgccgaagttcacggcgctggcggacgcgctgctgatttccctgtccgactcgcccgatctggggctgaccgtgcccggcaagctggccagctatatggccgccgccaagccggtgctggcctcaatgaacggcgcagggtatgcggcagtaaaagagagcggcggcgggctggtcagcccggcctgtgaccgcagggcgctggcggataatatgctggcgctgtaccgcatgagtaacgacgagcgggcagcgctggggcagaaagcctacgcgtattatgccgcgcactaccgccgggccgagctgctgaagcggttggaggaatttacgatggaaggaaaatgaggaagccctcgcagccttgccgttaccgcctctatcccacaaaaacgcaacacacccaaaattgagaggtacacccattttggataaaaaaattcttgtcattatcccctgctataatgaggaagacaacatcgtcaacacggtggaaaatctgcgggcggtctgcccggaggtggactatcttgtggtcaacgactgctccaccgaccgcagtgcggaaattttgaaagaacaccactatccctttctcgacctgccggtcaacttagggataggcggcaatgtgcagtgcggctacctgtatgccgtacatcatggctatgatgtcgccgtgcagatggacggcgacggccagcacgaccccgcctacctgatggagattgtgcagccggtactgaacggcgaatgtgatatgtgcatcggcagccgttttattaaaaaggaaggattccagaccagctttatgcgccgggtcggcatccgctggctgagtgggatgatccatctgctgtgcggcaagcgggtactggatgtgaccagcgggttccgcgccaccaacgccggcatgaccgcgtttttctcccggcattacgctaccgactaccctgagccggaagccattctggctgccagcctggcgggctaccatgtgggcgaggccccggtcatcatgcgggagcgacagggcggcgtgtccagcatccacagcttcaagagtgcctactacatgatcaaagtcacgctggcactcatcattgaccgactgtccatccgcaaggagaaagggggctgcgcatgaccgcacatttgcagctgtttatgattctgggcgcagtggtgctgctgctcatcatctttgcccttttaaagcgcgggctgatgagtgtaaagtacagcctgctgtggctgctgctggccgtggggctggtaattgccgcggcgtttccctatgtggtgtatgttctgcgggacctgctggacattgaaatgccggtcaacctggtatttttgctgatgttctgctttgtgctggtggtactgctgtccttgagcattgccatcagccagctggccgacaagtgcaagcggctgacccaggcgaacgcgattctggaaaagcgtgtccgcgacctggaagataccctgaagaaataaccctgcggcgaaacggagagaggaatcatgacaataacctgggagcaaatcctcgcctttttgtgcgaggatcagtcaatggcgatcacctcgctgttgtttcttgccttttttgcggcggtggcgctcatcaactatgccctgccccgcgtgctgcggccgtattttctgctgatcgccagctatggcttcttctgctatgacccggtcaaccgcccgctggtctgggtcattgccgccgccacggtcgttacctggctgtgcgggcttatcatcggcaaggtcaaaaacaaggccgtgcgggtgctggccctactggtctcggtagggttcggcatcggtattttgatttactacaaatactggaacctgctggcggattctctgggcggcagttttctctcccaccgggagaatctgctggcccccctgggcctcagctacttcacctttgcggccatgagctacaccatcgatgtgttcaagcgccgttgccgggtcgaaacgaacccgctgcactatgcgctgttcgtcagcttcttccccacgctcatcaacggccccatcgagcgttacccccagatgcggccgcagattcaaaagagccgccggttcagctatggccgctgcgcaggcggcgcattccgtatgctgtggggctacacaaaaaaaatggtcatcgccgacaacctgagccagtatgtttcgctggtctacggtgatgtttccggcataagcggcccgaatctcgttgccgccaccgtgctgttcgccgtgcagctgtacatggatttctccggctgctgtgatatcgccctgggcgcggcgcgtatcctggggtacgacctgattgaaaacttccagtccccctttgaggcccgcaccttcaacgatttctggcggcggtggcatatctcgatgaccagctggttccgggattacgtctacttcagcctgggcggcagccggtgcgcaccatggcggcactacttaaacatcgtcatcgtgtttgtctgctccggcctgtggcacggcgcggactggcgctacctggcctggggcctgttcaccggcattctggcggccttcggcgtcatgacagccaaactgcgccgccgcatcaatcgctggaatccgctctaccgcatgggctggttcaaggcactgtggcagacgattgtcacggatgggctgttttgcctgacgctggtgttctttgcatcggccatctataataccgaccccttcgccgtctacggttcgctcctgcagggctgggatggcctgtctggctcctgggcacaggtgtctaacctgatttacagcagcggcattgatggccgtctgccggtggtgctgctgttcggctgctttgtcgtttttgcggcagagcacggcggccgcagcgtcgccaaatggattcgccagcaggtctggccgctgcgctggacgctctactacggcgcggctgcggcgatcttgttcttcgccgcgttcggtcagtcggcgttcatctaccagcaatactaaggaaaggcggtgtatgttatgcccaagtcccctaccccgatccccgcaccgccggtcaaaatccagcgcggtgcccccagccgcgccccggccaaaaagcgccgccgcaagaaaaagcgcagccccttcctctggtttttgcaggggcttgtccgccgcatctactttggcctgaaaaccgggttcaagttcctgctgttggtgccggtgcttgtgtttatggtggcgttcagctataacgtcgaccgcagcggcctgttccagggtgcgctggccccccgccgcatcgtggatttgatgctgcaagggtacgatgtaacaaacttcgagcagatggacgagcgccaggtggtacagttgtatgcacaggatgtgcccgagacgcccgaggctatcggtattggctccagccgcgttttgcagttcaaccgcgagaacaccggcgtggagagcttcttcaacatgggcgtcaccggcgcggatgtgcgtgacaatatgacgagctactacaaaatggtcacctacggcaaagcgccaaaggtgctattgtggagcctggatccctgggtcttttacggcagcgaggccgcctttgacgcccgtgctgacgccgatttgtacaatgaatttttgacaaaagtcctgaacgtacccaccgactatgaagagccgaaccaggtcgagctgtggaaggcccttgccgacccggcatacttccagggcaacgtggactattatttcaagaaccgcggccaggccaccgtcaccgacgacgaaggcaacaccatcgagtttaacccggtggagggcgacccctacaaccagcccacgaccatcaagcggtctgacggcagcgttttgtacgatgtagcgttccgcagccagactgaagaccagatccgcacgctggctgccgaagcctgcatgagcttcaacagcgtacatatggaaggctttgacgagatgagccagacccagattcaggcgtttgactccttcatcaaatacgcccagtctcagggcaccacggtcattttggtgctgtcgccgtggcatccctatctgtacggttacctgctgaccgagccggagatgcacaagggtttcttccaggtggaaaactggctgcgccagtactgcgccgacaacaatattccgctgtacggcagctatgaccccgcatgtatcgagggcttgcaggaaacggatttcttcgacggtctgcactgcggcagcaccggcattgcccggttcttccccggtatcccacaggcattggccgatttgcagaacggtacactggcgaacccgctggacgtacacccccgcaccagtcttgaggaccccaacgcgcagcccgccgagggcgagacccccgacggagagacacctacacaggagggatgatctatggcattcatcgagatcggttttaacgcaaagcggccgctggttctgggccgcggcggctttggcacccagctgaacgactggctgatggacgaaggctggggcagcgcggactttttggacgacaacgcccccggcgccgtgggcggcctgcgggactacgttgaccccgcgattttgaaacacggccgccccgcctttgtggcgctgggtgacaacgccctgcgggtagaactgctgcaaaagctggccgctgccgggtacgcgacgccagtctttatcagtgatgccgcgtctgtcagccccagcgccgtgctggagccgggctgcatcatcctgccgcaggcctacgtgggtgcagacgcgcacctgggcgtgggctgcatcgtgaacgccggagccatcgtggaccacaacgcccaactggggcgcggcgtacacgtggcaccgggcggcatcgtaaaggccggggcagaggttgccgagttcgccaaggtggattccggcgagatcatccgctccccctgggagagcaaatgactcagcgccgcgattatattgacgagctgaagggcctgggtatcctgctggtggtgttcggccattttatggagcagtaccgcatgggatattccttcgtcagtgcgtcatttttctgtatctatgcgtttcacatggcgctgttctgcacctgcagcgggctggtggcgcggttcaatccgcgcaagctggtcacgcagcagctgtggctgtatctggtggggcaggtcatcatgtttgtgttccgcgcggcagtgctgcgggaaaattttgccgagagcggcggcgcactggccgcgctgctgctgccctggcggcatatgtggtacctgtacgcgctggtgttctggcacctgacgctaccggttttgtgctggctgcgggaccgctggcggctgcccggggcctgcctggggctggcgcttgccgtggggctggcattggcgggcggcctagtggagtggccgttcacgctggtacgcgtggtagcgttctatccgttctacgcttttggagtgctgttccgcccccaactggatgccttggctgccgcagcggcggaaaagtgcagcctgcggcgggcggccctggccgcgctgttgatggggtatggcgcgtatttcctgcgcgtgctgctggctgacccgattttggacaacagcccacagctgttccatgatgtgagttatgcgggcggcgacacggtgggctaccgcgttgtgttctacctggcgggcatcctgaccacagctgcactggcggtggtgttcagcagccgccaccggctggaagggctggggcggcacacgctggcgatttaccttttacatatgccgattctggcggcactgatcgagttcaagttctatgacttaatgcgcggcaagccgctggcagtggtggtgctctggtttaccctgctggcctgtgccacgctggccctgctgaactggcagcccatgcagaccgcgtttgacaagctggcaaattgctggtataagaggaaataagtaagggcggcagcccccgtgggaagggggttgccgtttttgttgtagggggcggtgcctgcgacgccccacggtcggatgcaagcatcccctacgctccaccttacacgagcgggccgggcatacccggcccctgcaattatgcttgacaacgccactactttgcattacaatataggtacagaacattgcattacaaggtagtcaggagggtagacgatgtttgatcgcgcgcagctgcgcaagggaacgctggagggctgcattttaaaaatcatctcgcgtgaggcggcctacggctatgccatcgccgtcaccctccgggagagcggctttgacgacctgaccgagggcacgctctatcccctgctgctgcggctggaacgcaagggcctgattgctgccgagtaccgcgcgggatccggcgggccgagccgcaaatactaccgcctgacccccgatggggtgcagtatctttccgaatttgcggccgcctggcaggaggccagcgccgccgtgaaccgcattttgcacgacaaggagggctgaaccgtgaaaaccatccgcaacgagtaccgcgaactgaaaaaggaaaatgacctgattttctcgacactggccgagtatgaccgcgacaccatcacggaaatcatcagcgtggtggacaacacacgcggcatcggatatgagatcgaactggtgcgcaaagatctgattgccatggcggcacaggccgaggcccggcgcgactatctgccgtcggtcatcggggacgtagatgtttttaaacggaatttgctggcaagcatgcccaagccgaagtttgcggattacatggcagacagccttgtgtggctgtgcacgtttgcgttggcctccgccgcgacctatacggtgatgggccgcccgtgggactgctattatgacgcggtctggcttgtgctctgcattgccattatgatgcccagtgcgtggctgctgcagcgcattgtccccgccgagtgggcggcctctaccgaaaaaggtgtgcggtacggtgtcattacagccgccatgctgtttttgtggttcgtggtgttttggttcgtcgacaaatggatcacgccgctgctgcccgtggtgggcctgcccaaccttgcggcagtcatcctgttcggcgcggcactggcaacgctgcttatctggcgcaaccaccgccgcaacgagcttgccgagaagaaaccctggcgagaggttatggagaaataaaaagtgcccccaacggcatcacagccgttgggggaattttgtgttgtaggggccgcacatgtgcggcccgcggctttctggcagacggccgtccacccttcttgcgcgggccgggcatacccggcccctacaatatcttttttaaatatgctccaaaatcttgttgcccatctcggtgcagcctaccctggtgcagccgggagccatcatatcggcggtgcggtagccctcgtcgaggacggcgttgactgccgcctcgatcccatcggcctccgtcggcatatcaaagctgtaccgcagcatcatagccgcagacaggatacaggcaatcgggttgacgacgtcctgcccggcaatatcgggtgcagagccgtggatcggctcatacaggccgcaggtcccctgccccagtgaggaggacggcaccatgccgatggaaccggtcacttcgctggcttcgtcagagaggatatcgccgaacatattttcagtgacgatgacgtcaaactgggcgggattcttgcagatctgcatagcgcagttgtccacaaacatttcactgtactcgacctcggggtactcgacctgcagacgatgcatgacggcgcgccacaggcggctggtgtccagcacgttcgccttgtccacgcaggtcaactttttgcggcgcttcatggccgtctcaaagccgatgcggccgatgcgctcaatttcatgttcggcgtagggcatcacgtcgatggcgaccttctcgccgttttcctcaatcgtcttatgctcgccaaagtagacgccgccaatcagctcacgcacgacgataaagtcaatgcccttgtccacaatggactttttcagcggggaggcatccgccaactggggccagatcttggccgggcggttgttggcatacaatcccatgccggaacgcaggcgcagcaggcccttctcagggcgctggtcgccgggcaggccctcccacttggggccgccgatggcccccagcaggacgctgtcggcgttcttacacttttccagttccgcagcgggcagcgggtcgccgaatttatcaatggcctcgccgcccatgtaggcgcgggtatacgtaaacgtatggccgtgcttttctgcaattttatccagcacgcgcaccgcctgggtcacgatctccgggctggaacagtcgccgtagatcagagtgatgtttttctgcatagttctgttctccctctcgttgctattgtaggggcgggacatgtcccgccctcagcctttccctcacagcacttttgccgtaaagccgcgggccgggcatgcccggcccctacagggcatcagtccttcaagctgttcatcagaccgcccttggcgataatgttctggatgaacggcgggaagggcgcggcctggaaggtctggcacgtggtttcgtcggtaatgacgccggtgtcaaagttgatgctgactgtatctccctcgttgattgcttcgctggcggcggggcattcgagaatcggtaaaccgatgttgatggcgttgcggtagaagatgcgggcaaagctcttggcgataacgcagctgataccggacgccttgatggcaacgggggcatgctcgcgggaggagccgcagccaaagttctcaccgcccaccatgatattccccgccttgacgcgggtaacaaacgttttatcgatatcttccatacagtggcttgccagttcggcggcactctgggtattcaggtagcgggccgggatgatcacatcggtgtcaatgttgtcgccgtatttaaaaacaggacctcttgcgttcatagctcaaacctccctcgggtcagtgatgtagccggtcagggcgctggccgccgccgtggcagggctggcgaggtagacctcggactccacgtggcccatgcggccgacgaagttgcggttggtggtggagacacagcgctcgcccgccgccaggatacccatgtagccgcccaggcaggggccgcaggtgggcgtggagacgatgcagcctgcgtcgatgaaagcctcggtgtagccgcgcaggatgcactccttgtagacggccatcgtggcggggatgatgataccgcgcacgcccttggcgatgtgcttgcccttcaggatctcgtaggcggcctccatgtcctcaatgcgtccgttggtgcaggagccaattacgatttggtcgatcttgatgtccttgccctctttggcaagatgcgtgttctcgggcagatgcgggtagctgaccgtcggctcgagcgcgtcgaggtcaatcacgatggtgcgctcatactcggcgtcggggtcggcctcgtacttggtccacgggcgctggctgcggcctttgaggtaggcctcggtcacttcatccacggggaagatgccgttcttggcaccggcctcgatggccatgttgcagatgcagaggcgatcctccatcgtcagggtcttgacgccctcgccgacaaattccagactcttgtacagtgcgcccgagacgccgatttgaccaatcaggtgcagaatgacgtccttgccggtgacgggcttgtgcagctgacccttcagttcgaccttgatggcggcggggaccttgaaccaggccatgcctttcgccatgccggcggccatatcggtggagccgacgccggtggagaacgcgcccaccgcaccgtaggtacaggtgtggctgtccgcgccgatgatgcagtcgcccgcagtcacgatgccctgttcgggcagcagtgcgtgctcaacgcccatgcggcccacgtcgaaaaagttgaggatatcgtacttgtcggcgaactcgcggcactgcttggactgggccgcgctcttgatgtccttgttggggacaaagtgatccagcacgatgttgacgcgggtgttatcgaacaccgagtcgaacccggctttttcaaattcgttgatggccaccggggtggtgatatcattgccgagcaccacatcgagcttggcgttgatgagctggcccgccgtgacggctgcttccccgctgtgggccgctaagattttttgggtcatggtcatgcccatggttgtgtacctccgttttaggatcatctcaccgtaggggcggggcatgccccgccctcggccttgtctttacgtgccgcctgcccttatgttgagggccggacatgtccggctcctacccggcagtgcgttgtagggtgtttacttattgttgatcgcgcttaccagtgccttaatgcccgccacgataatatccgtatgcgtgccgcagccccaactctcctcgccggaggcccatttcaggccgacgtaggagcaggcgcgggagttcgtatcggaatcgagggcgtgctcactgtaatgcacaagcgtgaaatgcatcccggtctgctgctcgatggccgttgccacagcgtccaggcggccgttaccggtggcggtgcatttgatcgtgctgccgccgctggtgatgacgacgcttgccgtgatactgccgtctgagttctggataaagtgcgcttccggcacattgagtggatgggtgtggttgaggtagctgctctcaaagacgcccagcacttctttcacgctcaactcgcggtgctcgtggtcgctgacgtccttgacgcggtagcccagatcctcgcgcattttcggcggcgggttgtaaccgtagttctgctgcagcaggaagccgatgccgcccttgccgctctgggagttgatacggatgacgtcggcgtcgtaggtgcggccaatgtcgtgggggtcgatggggatgtaggggcaggtccactggtggagctgcttttccttgcgccatgtcatgcccttggcgatggcgtcctgatggctgccgctgaacgccgcaaagacgagggagcctgca

SEQ ID NO: 1084 - DNA, 16211 bp, unidentified
  source 1..16211: mol_type = unassigned DNA
cgccctgtccagctacggtgacacggccaagaagctggaaattttgaaagacccacactgcggggcgttcgcggtcatccggctgtgcagctactttgcagcgtattttgcgctgtgcggctgtgtgcagtttaccccgcgcgtcggggcgctctgggcgctggcgctggtgggggagcgggcgctgtcgggcttggctgtggcggcattcccgctggcgaaaaacaccggccttgcccacacctttgccacagcggcagacagggtgaatgtgcgccgtgcgctggcgctgctgtgcgctgcggtggcggcagcgctgctggccctgggcggctgggcactggtgctggcggcggcgggcgtgtttgtgcggtattatttcgtcgccaaaaagcagtttggcggcaccacaggcgatttggccgggtggtttttgcaaaaatgtgagatctggatgctggcggcgctggctgcctgccagtggctgggggtgctgtaaatgttgttcatcaccggaccgctgtacagcggaaaacgtacctacgcgcaaaagtttggcgggcggcaggtttatgaggtgcagacacgcgctgccgatgccgccgacctggcggtgctggctgacgaactggctgcctgcgacgtggtgactgccaccgaggtgggcggcggtgttgtgcccattgaccccgcagaccgcgccgcacgggaggcggcgggccgcctggcctgcctgctggccgcgcgggcagactgcgttgtgcagatgttctgcggcctgcccacggttctgaaaggagaacttcccgaatgctgatttactttttacggcacggtttaacggactataatgcccagaagcgctaccagggccagcgggatatcccgctctcggcgcaagggctggcccagctgcgcaaagcggatatcgacccaaaggtcgtctatatttctaccttacagcgcacaaaacagacggcggaggtgctgttcccgcatgcaaagctcgtgccggtggacgccctgaaagagatgtgtttcggcagctttgaggggcgcaattatgtcgagatggagcacgaccctgattacctggcctgggtcgccgccaactgcgaaagccaatgccccgacggcgagcgcaaggccgaattttccgaccgcatctgcaaggcgtttgccgcgctggtggacaaggctctggccgacggcgaggaactgctggtcatcctggcccacggcggtacccagatggccgcactggaacgttacgccctgccgcacaaggactattatgagtggtgcggccccaatgcaggcggctatgtgctggacgcccgcgactggccgacgcagcatattttgcacctggtcaaaaccgtgcagtacaccaaggagggcacatgttgattttttgggcggtgctgggcggttttttgctggatgccgctttcggcgacccggtgtggctgccgcacccggtcgtgctgatggggcggtgcatcacggcgctggaaaagcgcctgcgtgccgccctgcccaaaacgccgcagggtgagctggcgggcggctgcattgtggcggcggtgctgccgctggggacactggctgtgaccgggctttcctgctggggtgcagcaaaaatccatccgctgctggggctggtgctgcaaatgttctggtgcgcccaggcgctggcggcgcgtgatcttgtgcgggagagcatgaacgtgtacaggaaactgcaaaggggcgacctgcccgccgcccgcaaggccgtggcgcgtattgtggggcgggacacccagaacctgactgccgagggcgtgacgaaagctgccgtagagacagtggccgagaacgccagcgacggtgtgatcgcgccgcttttgtatatgcttatcggtggtgcaccgttggcgctgacctacaaggccataaacacgatggatagtatgctcggctacaaaaacgagagatatctctattttggacgctgtgccgccaaattggacgacgctgccaactggctgcccagccgcctggccgccctcttgtgggtctgcgcggcggccttgaccggcagcagcgcggcgggggcatggcacatctggcggcgggatcgctgcaaccacgccagccccaacagcgcccagaccgagagcgcctgcgccggggccttgggcgtgcagttggcagggccagcctactattttggcgagtattacgataaaccgacgatcggcgacccactgcgcccggtggaaccgcaggatattctgcgggctgaccgaatgatgtacgccgagagcgtgctggcgctggccttggggctggccgtgcgggcgctgtttgtgtttggattgtgaggcaacaaaaatgaagttggtacatggcggagactgggcgggctaccgggcagaatttggccgcgatgcgctggatttttcggccaatgtcagcccactgggtctgcctgcgggcgtggcggcggccatcacggcggcgctgccaatggcagaccgctacccggatccgttgtgccgcgacctgcggaaggcgctggcagaggctgagggcgtacccgccgaacaaattttgtgcggcaacggggcagcggatttgattttccgcctggcgctggccctgcgcccgcgccgtgcgctgctgcccgcgcccacctttgccgagtatgccgccgcgctggataccgtgggctgcacggtgcagcgtgtgtttttgcaggaagaaaacgactttgccgtgacggatgactttgtggatgccgtgaccgacgataccgacgctgtctttttgtgccagcccaacaaccctaccggacaggtcacaccgccggaactggtgcaaaaactgctgcgccgctgtgtcgcctgcggtgcggtgttggtggtggacgagtgctttttggactttttacccgaccgcgatgcactgactgctaaacgatttttacacgatgcatcgaatcttatcatcctaaaggcctttaccaagctctacgccatggcgggcgtgcggctggggtacgcgctgtgcaggaatgccgcgctgatggaaaaaatgcgtgcggcggggcagccgtgggcggtgtccagccttgcgcaggcggcagggctggcggcgctgggcgagactgcctacgccgactgtgtgcgggacctcattgccgaggaacgccccaagctggcagcgggactgcgtgccctggggttgtacgtggtagggggccgggccaactacctgctgttccaggcccctgccgactttggcgaaaccctgcgccggcgcggtgcggtcgtgcgcagctgcgccaactacccgggtttggatggcagctggtaccgtgccgctgtgcgtaccaacgccgagaatcaaaagctgttgcaaatcatgggggaggtgctggcgtgagcaaagcaaaatgtatcatgatgcagggcacgatgagcggtgcagggaaaagcctgctctgcgccgcactctgccgcatttttgcccaggatggctacaagacggcaccgttcaaaagccagaacatggcgttgaacagctttgtgacccgcgacgggctggaaatgggccgcgcccaggtcgtgcaggcccaggccgcgggcgtggagccggatgtgcggatgaacccgattttgctcaaacccagcagtgacattggtagtcaggtcatcgtcaacggcgaggtgcgtggcgatatgcccgcaaaggaatacttccgccgcaaaaagtcgctgattcccgatattctgcgcgcctacgacagtcttgccgatgaatttgacatcatcgtcatcgagggcgcgggcagtcccgccgagatcaacctgaaggcagacgacattgtcaatatggggctggcaaagctggtgaacgccccggtgctgctggccggggatatcgaccggggcggcgtgtttgcgcagctgtacggtacggtggaactgctggaacccgatgagcgggcacggatcaaaggacttatcatcaataaattccgcggggatgtggagatcctgcgccctggtctgacgatgctggaagaaaagacctgcctgccggtggtaggcgtagtgccgtatctgaaagtggatatcgaggacgaggactcgctctcgacgcggctggagcaaaaaaataccgtaaaaccgttggatatcgccgttgtgcgattgccgcatatctcgaatttcaccgattttataccgctggagcagcacccactgctgagcgtgcggtacgtgcagaccgcgcgggagctgggtgcgcctgatttagtcattttgcccggcacgaaaaacacggtgggggacctgctttggctgcggcagtccggactggaggccgcgctgctgaaattggcggcaggcggcacgccggtgttgggcgtctgcggcggctaccagatgttgggccaaacgctggacgacagccagggcaccgagagcggccgcccgcaaacgctgcgcgggctgggactgctgccgacgcagacaatttttaccgccgataagcgccgcgcccaaatcgaagccagcgccgccgcgccctttgcgggggccgcgctgaccgggtacgaaatccacacaggccgtactgccgtgcagggggcaccgttctgcacccacgccgacggcacatccgagggctgcgtgcagggcacggtgttcggaacctatctgcatggcctgtttgacagcggtgagctgaccgagcggctggcggcgtacctctgcgcacgcaaggggattgcccccgaggccgccgcgcccattccgatggccgcctaccgcgaacagcaattcgacctgctggccgacggtgtgcgccgcgccctggatatggacgctgtctacgcagccataggtcttgtaaacccgaaaggagacaaaaaatgacgccgcagcatcatttgcccgctgatattgagcgcacgagcatgggcatcatcacggcggaactggccgcgcggggattgcaaatcccggaggaaagcgccgccgttgtcaagcgggtcatccacaccacagcggattttgactatgccgaaaatctgcacttcacccccggcgcggtggcggcgggcatggccgccgtgcgcagcggagtgacgatcatcaccgacacaaatatggcgctggcaggcatcaccaagcccggactggcgcggctgggcgggcaggcactctgctttatggcggaccccgctgtggccgcagcggccaagcaggcaggcacgacccgcgccgtggccgccatgcacaaggccgcacgggactgccccggcgcggtgctggctgtcggcaacgcccccacggcgctgctgaccatcgtggaagaaatcgaaaacggcctgcgcccggcgctggtcatcggcgtgccggtgggctttgtgaacgtggtggaaagcaaggaacgccttttcgccgtctgcacgcagtatggcgtgcccgccatcgtggccatgggccgtaagggcggcagcaacgttgccgccgccatctgcaatgcactcatctactccgccgccgagatgctcgaccctgcggcaagaggatggcagtaataaactttctacccccggtgtttccctacagccgaaaattttggcgcggaggaggcgttttgcctcctccgcttttttgtttccctataaaatccgtcagcgtttctccggcttcctgcctgaattttgcagaaaggtgctgccggataaagttggacacgggaatggtactttagtatcctgctgctgcgggtctttttgtttgtaaagagcttgcactttgtaaaatagaattacggaaatatcaggtcagatcagggcccaagcgcccatcagaatggccagaaacactacattggaaatagtaaacatcgcaaaatagtgccctttttcagcaggtacttcatttgcaatctgtcgataagaaattaggcttgccatggatgcaattaatgtgccaaggccaccaaggtttgtgccaataatcagcgcacggaaattatcggtaaatccagaaagcaggatggcagcaggcacattactggtcacttgagaggccagaactgatacgaaaacctcatggccggccagaatattctgcaaccatccagagaacgcttccatccgacctaagttcccgatgaaaatgaacagtgctacaaaggtaagaatcagagaatagtctacgtggccaagagtggggcggtcggcaaagaaggtgcacaccaagatagcggcgaatgcaacaccgtatgggagaacacgcaatacaaccaataaacaggcgacaaacagaataccgtacaacgcaatgagtttcttgtctggttttgagtttaccgcagaatgagttacaacaatgtcggattcttcacggcacagccatactgcccatatagcaataagcactaatgatatgatggaataggggagcatcaacagaacaaaagagctcatatccatcccgctcttgccatacaaatacaggttttggggattgcccagtggtgtaagcatactgccaaggttggcagctatcgtctgcatgcagacgatagggaggagcagtttgctacgaacagatgcgttcaaactattcagaacgacaaacgcaaatggcacgaatgttagcagcgatacatcgtttgttatcagcatactgctgaagaagcacaggccaacgagaacaactgttagctgcaaagtggtgcgggtatgagataggagggcatggccgagtctatcaaatacgccttgccctctcagtccggccataactgtcattagcgaaaacaggattgcaagagtacggaaatcgatatatccgaggtattctgcgtccggggggacaaagaaagcggaaatgatcgccaaacaagtggcaatgctcaggacaggttctttctgaaaaatgtgcttaatcatcataaataagattctctttccgaccattcgttatctcttccggacggcaaaaccaaaagctgtaccgcaaataccaccgacaatgtgcataaagttagctacattatcttgtataaagaggatactgtatacctgctggcttaagtacagcacgccaaccaagatgaaggtgatagggatacctccattcttactgccggccaaactggagagcatgatgagcatgaatacgataccggatgcgccaagcaatgcagaagtggggaacagcacacactgcaatatgccggataccagcgcggtcataaggataccgcttagaagtgttcggcttccatatcgttcttccaaaggtggagcgataacaaggaagaggagcatattgtttataaagtgattccaaccgccgtggccaaggacatgaccgaacaaccggacatagaatagcggatccgtcatcgacgagcgatacacactaaacaggtgcgaggttgtccagttgtttgttaagtagcccaataccagagaggcgagggacaaaaagaaaaaggtcagtgtgacgggggcattgtattggagtcggatgccgctgcgtttcatagaagttcctccatcattattggatattattagtatagcacattagagcgaaatatgttgcagaatagaaaataatctgggagagtaaaagagaaagtaaataaaaaccatttaaagacgattggatatttcacaggaaagatacgcagcagtggtcaaatagtagccagcaagggctgccccagcagcgggataatttgtgtactatccttttataataccggaagaggagcacaatgacgcttcaattagataaatatttttatctaataatattgacattcgaagcaaatgtgctataatgacctcattgacaattacgtcaatttatttagttaaattatgtgaggtacgtagtatgagctttgaagaattgaaagaagtatttgttgacaccctgagctgcgatgctgacaaggtcacaatggatgccagcctgaccgaggacttgcaggcggacagcttggatgctgtagagctgaacatggcgtttgaggacaagttcggcgttacaatcgccgacgaggatctggggacgcttaaaaccgtgggcgatatcttcaactatctggctgcacgggcagcctaaagggtattgcggaatgagtgccattgaaaagctgttcccgaccagcccgcaggagcgcagctttcagatgaaagcccgccgcgatgccggtacggctgcgcccaactgggtgccgccgcaatttgtcgagtgcaaaaaatgcggccgccgtgccacgcggcaggtttgggtcaagagccagtatgtctgccccaactgcggggtgcatttggcaatcggcgcctattatcggctcagtacggttctggaccacggaacttttaaagagctgaacccggacattgcgcccaacgatgtgctgcattttcctgattatccggaaaagctggccgctgcttcggtcaagaccggcctgaaagaagccgccgttacagcaaccggcaaaatcggcggtgtgcaggcggtggtcgctgtgttggacagccgcttttttatgggcagcatgagcaccgctgttggtgagaaaatcacacgtgcaatcgagtacgctgccgacaagcacctgccgctcatcattttttctgccagcggcggcgcacggatgcaggagggtattttcagcctgatgcagatggccaaaaccagcgctgcgctggaacggttcaaccacagcggcgggttgtacatcagcgtgctgactcaccccaccacaggcggagttacggcaagctttgccagtctgggtgatattacgctcgccgaaccgggggcactcatcggctttgccgggccgcgtgtcattgaacagaccatcggtgaaaaactgcccgacgggttccaacgcagcgagttccagctggaacacggctttgtggatcaggtcgtgccgcgcaccgagttaaaagaggtcttaacacggctcttgcagctccacacacaggggaggaagcgcagatgatcaaggaagttttgcagcaattggaaccgctggacgcgcagatcgacgcgctgtgcagtcgtgccgatgacgccgaaatggcgaacacgaccgcccatgcggccgaactggccgagctttccgcagaggaaaatgcgcttttacagcgctgcacctcgctgacagcggaggaccgtgtttttctggcccgccgccctgaccgcccgcacattaccgaaataatcgataacttgtttactgacttttttgagcagtgcggcgaccgacaatgcaaagaggatgcggctattttatgcggaatcgcacggttccacgggatgcccgttaccgttttggggcaccgcaaagggaccacgctggaagaaaacctgcgctgcaactttggcatgccgggaccggagggctaccgcaaggccctgcgcgtgatgaaacaggcagaaaaatttcaccgtcccatcatcacttttattgacactcccggtgcttaccctggcaaggatgctgaagaacgcggtcagggggaagccattgcccgcaacctgatggagatgagcggcctgaccgtcccggtgttggccattgtcacaggcgagggatctagcggcggcgcactggggctgggcgttgccaaccacattttgatgctggaaaatgccgtgtactcagtgctcagccccgaggggtttgccagcattttgtggaaagatgcttcccgcagcggtgaggcctgcaccatgatgaagctgacggcacaggacctgtacgcagatggcatcgtggaagagatcatccccgaaccgctgggcggcgcacagcgtgggcggcagctgcttttcagccggttggataccgccattgcggtacaccttgctgccttatgcaagatgagcggcaaggccttggccgaccagcgatacaaaaaataccgccgcatcggagaaatgaggggcgcatgaaaggtttacagctgctggctaccggtggggcattgcccaaccgtgtggtgacgaacgaggatctgcgccggcaagtggacaccagcgatgaatggatcacgacccgcaccggcatctgccagcgctattgctgcaccgaaaacgaggatgccgccacgctggccatcaccgccgctcgtcaggccctgacccacagcggtctgacggcaaacgacattgactgctgtgttgtggcaacgctctcggccccaacggccaccccaagcattgcctgccgcgtacaggctgccttgggtctgccggaagaccggcctgcctttgatgtgaatgcggcttgttcgggctttatttatgccgccgccgcggcccacgggcttctgaacacgctgggcgggcggtatgcgctggtcattggctgtgaggcactctcccgtatggtggatccgaccgaccgcacgacctgtgtattatttggcgatggcgcgggtgcggctatttttgaactggccgaaaatgtaccgttcgccgtaactttaggcgcacggggcagtgaagcgatccgcgcaggcggccctgcggcccgcgataccgcaccgatcacgatggacggcaaggctgttttccgctttgccgtggaggctatgccgcgctgtctgcaagccgtgctggaccgcagccaaaagacattggctgacctggactgggtagtctgccaccaggccaacagccgcataattgaccattgtgtcaaaagcttacacgcagaaccgtcaaaattttacaaaaacataagccgtcacggcaacaccagtgctgccagcatcccgattgccctgcatgaaatggcggaaagtgatttgctgcgccccggccagacgctggcctgcatcggctttggcggcggtctgacatggggcgggatgctgctgacgtatgagggtagaaaatgaagctgctcaatgaaattttaggtacaaaatatcccattatacagggcggcatggccaatatcgccacgggcgagtttgccgctgcctgttccaatgccggggcgctgggactgatcggctccggcggcatggacgcggattccctgcgggaaaacatccgccgctgccgcgccctgaccgataagccctttggcgtgaacatcatgctgatgcacccgcaggcggatgaatttgccaaaatcgtggtggaagagggcgtaaagatcgtcaccaccggggcgggaaatccgggaaagtacatggccgcctggaaagcagccgacatcacggtcatccccgtggtggcggcagccattttggccaaacatctggaaccgctcggcattgatgccgttattgccgagggcaccgagagcggcggtcacgtgggtgagatgacaacgatggcacttgtcccgcaggtcgtcgatgccgtccatgtgcctgtcattgctgcgggcggcattgccaatgggcgcgggttggctgcagcgctggcattgggggcgtgcggtgtgcaggtcggtacctgtctgctggcaagcactgagtgcccgatccacgaaaactataaagcggccctgttgaaggcccgtgacagcgataccatcgtgaccgggcgcatcagcggcacccctgtgcgcgtactgaaaaaccgcatgagccgcgagtatgtccgccaggaaaaggccggggctgacaaaatggcgctggaacgctttactttaggcagtctgcgcaaggctgtgtttgacggcgacaccgagagtggcagcctgatggccggacaggccgcagggctgctacacgaagtccgctcggtggaagaaatctttgccttgatggtaaacgatgccaaaaactgcattggtgggctgcacaaggagatcaccttatgaaactagcatttttatacgccgggcagggcagccagcacgtcggcatgggccgggatctttacgagactttcccggctttccgcgccgcttttgacgaagccgacgcggcggtggattttgatttgaaagaagtctgctttaccgacgcagcaggcgtattgaacgagacccaatacacccagccctgcatgacggcgtttgccgctggccttactgccgtactgcgggaggcaggtgtcacaccggattatgcggcggggctgtcgctgggggagtattccgccctgacctgcgcgggggtgttcgatgtgcagaccgcagtcgctttaaccgctttccgcggtaaggcaatggcggcggctgcggctgggcgcacctgcgggatgacagccgttttggggctggacgaagctcccctccaggcatgctgcaatgcagctaccgacaaaggcgttgtgcagatttgcaactacaactgccccggccagctggtcattggcggtgacaaagccgccgtggacgaagctgccgcgctggcgcttgctgccggggcacggcgctgcctgccgctgaatgtcagcggccctttccatacctcgttgatgcacccggccggggatgcactgcgggaaaaatttaaggctacccactttgcgccgatgcagtgccctgtgctgttcaactgcttgggacacgagagggaggcagccgacaccattgccgcgctgctggaaaaacaggtgcagtccggcgtgcgttgggaagcgaccgtccgccgtctggcagaattgggcgtggacaccgccattgagatcggccccggcaaggcgttgaccgggtttgtcaaaaagactgtgggaagtgccatctcgtgctacccggtggaaactgccacgcagctgcaacagctactgcgcaccctgaaaggagcctgaccatgccgcaaaccgaaaacttgcgccgtgccgccctgattacgggcggggccaaaggcattggccgtgccatttgccgggctttggccgaaaacggcatgaacattgccgtcaactatgccggcagcgctgccgctgccgaggaaacggccgcagcctgccgcgcccttggcgtgcaggctatcacactgcaggcggacgtgcgcagccccgaagcatgtcagaaactggtagaagacaccgcggccgcttttgggcggatcgatgtgcttgtcaacaacgccggcattaccgccgacaaattgcttctgcgcatgaccgaagccgattttgacaaagtgcttgccaccaacctgaaaggggcgtttttctgcaccaaagcggcctgccgctttatgatgcaccagcgatatgggcgcatcatcagcgtcagcagcgttgtcggtctgcacggcaacgctggccaggccaactacgcggccagcaaggcgggactgatcggcctgacgaaaagcactgccaaagagtatgctgcccgcaatatcaccgccaacgccgtggctcccggctttattgcaacggatatgaccgccgtgttatcagaaccagcccgtgccgtagcggaagcagccatcccggcaggcaaaatcggccatgccgaggatgttgcggcggcggtggcttttctggcaggggagcaggccggttacattaccggccaggtcctttgcgttgacggcggaatgggaatgtgaggtgtgcaatggacacaaaaaagaaacgccgggtcgttatcaccggccttggcacggtaaatcctaccggcaataccgtggctgaaagctgggccgctgttaaggctggccgctgcgccgttgggccgatcaccgcttttgatgcgaccgattttaaggtaaagctggccgcagaggtcaaggattttgaccccgccgaacgtatcgacaaacgggaagtccgcaaaatggcgcgctttacccagtttgccgtggccgccgctgaggaagcggttcgggacagcggtcttgcactggaagaaatcgaccgcgcacggttcggtgttatcctttccagcggcatcggcggcctgcccacgatcgaggaagaacacacccgcggccagcagcgtggctttgaaaaagtcagtccctattttgtccccatgtccatcggcaatatggcggcggggcagattgccatccgttttggcttgcagggcatgtgcagttgccccaccaccgcctgtgcaggcggtaccaatgcgatcggcgatgcgttccaccgtatccgcgatgggtacgaggaccgtatgctctgcggcggcagcgaaagctgcatcagcccgctgggcgtgggcggctttgccagcatgaaagccctttgcacggcggacgacccggcccgggcctcgattccttttgatgcccgccgcagcggctttgtgatgggcgagggcagcggcgtactgctgctggaagagttggaagctgcccgggtacgcggtgccaaaatttatgccgaggtcgtaggctacggtgccaactgcgatgcttaccactttactgcccccgccccgggcggcgcaggcggtgcggcctgtatgcagctggcgctggccgatggcgaggtaatgcctgaacagatcggctacatcaacgcccacggaacgtccacccacctgaatgacagctgcgagacagcggccatcaaaacggtgttcggcgaccatgcgtacaagctggccgtgtcttctaccaagtcgatgaccggtcatttgctgggcggcgccggcggggtagagggcgtattcaccgcgctggccctgcacgatgcctttttgcccgccactgtcaatttgcaggagccggacccggagctggatctggactatatccccaaccagggtcgcgcggcacaggtggagtatgccatgagcgatagtctgggctttggcggccataacgcctgcgtggtattcaaacgctgggaggaatgaggatgaactgtacgccaaatgaaccgccccggaccatgaccgcggtagaaatcgaaaagattctgccgcaccgctatccgtttgctttggtggataagattctggactacacccccggccaatgggcgcggggcgtcaaatgtgtgacccgcacggagccgttttttgaggggcacttcccgggacaccccgttatgcccggtgtgctgattctggaagcgctggcccaaaccggagcggtagccgcgttaagcctgccggaaaaccgcggcaagctcgccctgttcggcggagtaaaaaacgcccgcttccgccgtcaggtcatacccggcgatgtgctgacattggaatgcgagctgatagaacagcatggcccggtaggcatcggcaaggccaccgcatgggtggatggcgtgcgcgcggccaacgccgagctgacgtttgttctcacggatgcctgagggctggttttgcatggcggaatgtgctataataaaaccactaacctacagggggattctcgctatgctggaccagacattcggacgggtatataccaaattcaaactgcatttttataagcagatcttcagtcgattcgaggaccgcgaagccacgctgacgacggtagaatctttctgcatggaagtcatcgtggcattgggcgaacctacgattgcgcagttcagccacatgatgaatctttctacccccaacgccgcctataaaatcaactcgctggtcaaaaaaggctatgtagagcgcatccagtccaccaccgacaagcgggaataccgcctgcgcccgacccaaaagtacattgattactataacatcagctattcctatttgcacctggtcatggagcgcgctaaacaacgcttcactcctgatgacttggctaaattggaggaaatgctgcaagtcgtctccgatgaactgatgccggagattcaactgcctgaataattataccaattctaaaatcgtctgcgatggcgacccaaacccgtgattgataagccgggcagaggaaagttatctgccggtcagcttacaaagcggcgagcaagttgttgcaggttccgaagaacagcagccagcagaaaaagcaatataaaaatagccacctgagattccgaaggttcccggatttcagatggctatttcttatatttgtttagcactcccgcattcttgcaaggagggaaaattttgcattggtttcagtgcatttttgcggtattgatgatcctgtgtttatcaccgcaactccttataggtttcttcctgcaccggctcgcaccactcgttagaggtgccttcgccgggcacttccactgccagatgagagaaccagcaatcgggtg

SEQ ID NO: 1085 - DNA, 9329 bp, unidentified
  source 1..9329: mol_type = unassigned DNA
ttatcgttttaattttcgatattcgctcggagtaattctatagcgttccttaaacgctctattaaatgttctctggctatcaaagccactatccaaacagatatcaagaattgtatctcccgaattcactagccttgtacatgcatagctcaatctggcatcattaagatactgattgaaattacgatgaaatgttttagaaaatactcgtgacaagacatacttacttactccaagatcatgcgccatctcctctagagaaaattttttcctaaaatttcccgacacataagatactgttctgtatatcaaatcatcactccccacgcaacttttttccaccaattccatttttcctatacatcttgccagcacaatttgaacataagcttgaacaatcataggttcgttttcttccatttggataatcgcctgaattgcattataaacatctggttcaatctgccccgcacgaataaccggatatttaggagcatatccttgtattttatctttaaatactcctgcaaaagaagacggaaccaagatataatccgctcggctcgttttttctgaaaacacttgataatgatgaataatatcagaaaagacaaatccgatatcacccttttccatatgatataattcctgccccactcccatctcaagtgttccttccgttacgcacacaatctccaatgcattatgtaaatgtggagatacatgttttgacactctttgcgccgcatatacctcttcctttgtttccttaaacgtcaaatgcattgatgcatctcccctttattacttaattgttgatttcctctgcaacatttgtctacattttcttttaatttggcaagcattcttatccagcctgtcctataatgaacttgcaaacaaggaaaggaggaatacaaaatgagcagattcaaaaactatatgaacaaccttttagctttctatgaagaatactttgagcatgtatatcatgcataatctggctaaaaggactatttgtgaaaactgaatactgaaaaagcagaccacttcacaaatgtgaaatggtcctttttttatatgcagtccaaaaatcgctgaaaagctgccttaccttccggtgttctcttataaacacctgcacattccaaaacttttgcaaaaacaattcctatttccttttgcacgattgcatgaatattctcttctgtgatttcatagtttggcatccatttctctgcccactctgcatgtgattttgtcaaatcgctttcccgcagatcctcattctgcagaattctacgttccagctccgccatttccatttgcaatctagccgggagaactgccagtcccatcacttcgatcaaaccaatattttctttttttatatggtgatattccggatgtggatgatacacacctaacggaaactcttctgtggtaatattatttcgtaacactaggtctaattcaaacagatctcctctctttcttgcaatcggtgtgatcgtgttatgtggtactccattggtttcgctgaaaataaatgctttttcatctgtatatccacgccagcaagacaggatgcagtcagcagcccctaccaatgactctgtgttattcccttgtagacgaatcacaaacataggccattttacaattcctgcatgaacgtccggaaattgttttaatgaaaattccgtctcatatggagcctttgccattgcaaattcgtatccgcctccttgaaaatgatcatggctcagtatagaaccacctactatcgggagatctgcattcgatcctgccgtataatgtggaaactgccgcacaaaatccaacaatttggcaaaaaccgctttatcaattttcattggaatatgtcgatcattgaaaacaatgcaatgttcgttatagtacacatacggcgaatactgtaaattgtactgttctccacacaatgtaatcggaataattctgtgattttgtcttgccggatgagaaatatgtccggcgtaaccttcattttctttgcatagcaaacaactcggataccccgatttttttgcttttcctgcctttgcaatatcacgaggatctttttccggttttgataaattgatggttatatccattgcaccaaattctgtatttgctgtccatttctcatcctttgcaattcgatcttttctaatataatttgttgcctggctaaactgataataaaaatcggttgcagctttaggagatatattgtatttatcccaaaactgcctgcgaaccacagagggatggggtgtcaatattcccataatctttgtatcaaacaagtccttttccgtaattgtttcttcctccagcatcccctgccgacatgcatattccaacatatcatttaaaatctgtgacaattctctttctgatctaacctctttcgctgttccttcatgctctgtcaattgaaataattccagaaggcgattcgtcacatatacttcatcttccggatcaaccaatccctggttcaatccatacgccacaagttcattgatatactcattaatcatgacactcccccctttacacattctgatatccatttggatgacttttatgccatttccatgccgtaccgataattgtttccaaatctgcatattgtggattccatcctaacacttcccttgcttttgcactggaagcgatcaacatagatgggtctcctgctcgacgtggttcttccttcgccggaattggatgtcctgtcacttttctcgcagtttccacaacctcttttaccgtaaaaccaactccatttccaagattgaatatattgctgtcatttccatcacaaagatacttcattgcaagaatatgagcctgtgcaagatcgtttacatgaatatagtccctgacacaagtaccatcctttgtgtcatagtccgttccataaatagaaatatactctctcttttcatttggcacctgcaaaattaaaggaataagatgtgtttccggattgtgagcctctccaatccttccattaggatgagccccacaagcattaaaataacgcaaggacacaaatcttaagttatgtgcatttgccgtccatttaaacattttttccatagacaattttgtttcaccataacaatttgtcggaagtgtacgatccgattccataataggaattcgctccggttctccatatgttgccgccgtagaagaaaacactatcttatctacgctatgtgcaaccatactctccaacagcacttctgtaccacaaagattattactataatatttcaatggttttatcatactttcgcccacttgcgaattagctgcaaaatgaataactccatcaatattttctttatcaaatacagagtcaataaaagcccggttacgaatatctccttcataaaactttgcttccggatgaaccgctgctcgaaatcctgtttcaagattatctacaaccaccacattctttcctgcctcgatcaactcataaacagtatgtgagccaatatatccagctccacctaatactaaaatgctacccataaccattcctccttgtcttttttgagtatcttacatcacttgaattccaccatatttgcgaattttaagtacatcacaagcaccatctccaaacaccttttccatctctgttttatataatgtaacaatatcatttggtacaaatgcctgtattgttccggcaaagccaccaccatgcaccctgtttgctccctgcacgcctaaaatcatatcactgaccgccaatgcaatagaaacattctgatgttccacatcatggcacacatacacattctgcaaatacttataagaagaatcacctgactctttaactaatcttaaaaattctccaaatctattctctctcaatgctgccacttctttttgcactcgctcattttcacacacatagtgaattgctctaagtgctgcccgatctcctgtctgttctctgatgcgcggaagattagtaagtacttcttttctcgtaacctgtccaagcacttcttttcccaaacaagctgctgctcttttcatttcttccggaattgctgcataatccgatgtcaaatccgcatgtgagccttttgtatcggtaatacaaagactatatccgtatccatccaagtcaagctcaatccgctccaccaatggtgccgccggattctgaaaatcaatatgtgccaaacttccaacggaacacgccatctgatccatcaatccacatggtttcccaaaatatacattttctgcaaattgcccaatcatggctatttcaataggcgaaatctttccatcattaaacaattctgacaggattgttcccatcaatgtttcaaacgctgctgaagaagacaatccagctcctatcagcacatcactggtaacaacagcctgaaaaccacctatctgatatccatattcttttgcttttgccaacacccctcgaattaatgcagttgttgttgcttcctcatcctctctcctacatagatcatccagatatatcgtgatcatctcatatcctgcagatataactctgacacacggttcttccaaattttgtacaatagctattgcatcattgttaatggaagctgccagcacctctccacattgatgatctgtatgattcccaccaatttcacttctgcccggtgcgctaaagacaaagacttctccctctccaaaatgttctgtataactctctatcgccttaatataacgctctctttcatacgctattttcttctcatccacataaatatctttcaatgtttcatcatacattccattttttattttttttatcaaatcatgtgttaccacaaccccatctccttttcttttttgatctttacatttgtctcctccacattcattctggaaaggataaacataataagtacatcaaagatcagtggcagccaaagatacataaactgcatcatattcaacgcggactgtggctgaacagcatgtgttcccacatagccactaagttctaagagccatcctacgaccgccgttccaatacctccgccaatcttaacgccaagtgaagtacaggaatacatcgtaccctccacatgctttccctgtgtcaggtaggtatactcggaacaagatgcgatcactgcattcatgtctccctgccaaggtccctgtcctaatgctgctaatgctgtaaatgccatcatcaaaggaatacttcccatatatccggcaacaactacaagagctctgccaatcacggcaaggatgtaacctctcaagttcagcttatacataccattccactttccaaccagtgttggtgtaaagattaatgcaatgataagaggaatgtttaccgcccaggcaaattgtccaaacagatttttgtttttcaaaacccaggtcatataataaataccggcaccgatcattgcactgtataactgctgtaaaatataagtaccacagatcatcagataaaatttattctttaccagcagcttgaatgcctgaaccagcccatatttttcctcttcacctgttgtgtctccttcatttaattcctcttccggaagttctttaacagataatgcggaaatagtattcacaactaatccgatcactgcataaataattgcaaccatacgccatgcggctgcatctccaccacattttgcaacgaatccaacagtaactgcttgaatcagaagactggttgaaaaagcaaaaatgaaacggtaagaacccatctgcacacgctctttactgttcttggtaacaagtgatgtcagagcagaataagcaatgttatttgccgtataaaacacgccattcaacagcgtatacgcaataaagaaccacgcatactgtgccgtcctgccaagacttgttggaactgcaaaacaggctaccaatgtaattgcacaaccaatgtaaccatacagcatccatggtcttgcctttcccatcttactatgcgtcttatcaatcatggatccaaaaaagatgtctgtaaatccatcgagtaatttggaaacggcaatcagtgttcccactataccggatgccaatccaatcgtatctgtcagatataccatcacaaacgatgtcaggaatgcatacactacatttcccgcaatatcaccagatccgtatcctatcttgttgtaccattttaagtatttcttttcctccataagaatcgctccttcactatttgttatttagaaacaattttaccctcttacaaacggaattaattcaaactgaaactgaaatgcttcctcatcaaaccgatatttatccatgacatccggtccgcagctatttgaaccaattccattcattgcataatccatacagaatacggtgctatccgattctttcaattcataattgtgcgatacccgttccaactcctcctgtgtataaacagaagcgttaaacgaaaatggattctttgaaactgctgcaattccaaattgaccatttgtaagctctacataatcacagtcataatggcttccattctcctgtggacgaatataatcttcatgcatctgagccaccttcgaacggaacaatccatgacaggaagcctggtgtttatcccggtagctttcctgtggtcccattccaaaataagtaatctgatccattttcttattcaaaaacatccgaattccaaaccttggcagatccgggaattctttatcttttactgcctctataaccgcctctattttcccgtcttcattgatcttccatgtcatttccacatccaaaatcttttgtacggtatcagctactactgccagatgctccatgatcagcacaccgtgcttgttctgaagcacctctatacggtatgctctggtataggcagcatcataatgtgccttttcccattccagttttatatacatatcgttatccgtcggagcccgccaaatattcaattccattggatggttaatataacttcttccggcaaactgcatgtcctcaaacaatccggtacgcttatctaaaacataagtaaaatcttttgcctgtaacacgatctgcttatcgttttccttaacagcaatggttccgattactttttcctgctccagccactttacagcctgtctgtttctatcatcctcatttgcaagcttcatttcatcaaaacctaattcatacccctgttcaagcaacggcatttcctttttcaaccggtaaataagcttcagataaatcttaccggtatttggggcctgcagcttcaactccacttccgcatcgctatggggtgatgcaacaacatttgccagttttcctttttccacagtcaagccatcctgtgtcatttcatagaaaacatccacataatccttcaaatcatcaaaatccatataattgtgaagaaccatctgtccgttttcctggtcataagatacgattctcaccggacgatagacatttttatattccagcagtcccgtatgcggcgtacgatccggatagaccagcccgtccatacagaaattgccatcatgaattgtttctccatgatcccctccataataatatctggtctttccattttctgccgttccatgtgcgattgcatgatcacaccactcccagacaaacccgccacacatccggtcatccttatgaatcatctgaaaataatcttcaaaatctcccggtccgtttcccatactatggcagtattctaccagcagaaacggtttgcttccgtcttttttcagataatcctctatctcctgcagtgacggatacatccggctgtaaagatccaaattgtcataatcataggtaatatcataattacggtatcttgcactttcgtactgcgtgattctgtccggatcaaacttctttgtccatgcaagcgccttttcaaaattacatccatacgcactttcatttcccatagaccacattacaatgcttggacggtttttgtctctctgtaccataagctggacacggtccacaattgccttttcccatgccggatcatctgcaatcttttcattccaatggtgaaaacggttctggtctgtatcctccttccggtacagcataaatggtccatgcgcctcaatatctgcctcatcaatcaccataaatccatattcatcgcacatctgataaaaatatggtgcatttggataatgactggaacgaatagcgttaaagttatgctgcttcatcaacattaaatcctttttgatctgccggacatcgatcacaaatcctgtctccggatcagaatcatggcggttgactccacggaatttaatcttttctccgttaaaataaacaactttgtccttaatttcaatcgtccggaaaccaatccgatcaacgatcacttcatccggcattgtcaaaataacctgatacaaataaggattctccgcattccataaaaccggatttaacacggtcagttctaacacaccattctctgctgtttcccctcttgctacgactgctccatatttatcttctatagtaactttcgtttccaccggttctgcaaaatgcatatccaatttcacaacaacgctgtctttttctacatctgtcgtaatgtaataatctctgattgtcgtttccggtcttttcagcaaataaacatctctgaaaatgccactcatccgaaacttatcctgatcctccaaatacgatccatcacaccatttgagcaccaaaaccgctaatgtattttccccttcattcaacaagtctgttacatcaaattcactggtagcgtgaggcacctgactgtatccggcataagcaccatttacccatacataaaaacagctatcgacaccttcaaaattcagaaatgcttttgatgcctttttttctctgtgatattcaaagttatgaacatatgctccacatggaatatcctgtggcacatatggtggatcgaatggaaacgggtaacgaatattcgtgtactgatgcgtgtcataaccatccatctgccatacacccggaacagttacctgatcaaacccggaaacatcatagcctttctcataaaatgattccgttacgtcataaatgctgttataatactgaaacttccactctccgtttaacagctgaaaacgatccgatctttcccgatgctccactagatcattcatacgaactgatgccggaatgtaatatgtccttgccggcattgtcttgtcatgcataacattcaaatcttcataaaagcgtggtacgagcat

SEQ ID NO: 1086 - DNA, 8457 bp, unidentified
  source 1..8457: mol_type = unassigned DNA
atgacattcctcattcagcagacgctcatttatgccgtccctctgatgatcgtggcgcttgcgggcgtgttcgccgagcgcagcggtatcatcaacctggcgctcgaaggtatcatggtcttcggcgcattcatcggcgtctggttcgtgcgcattttgcagacgagcgacgccatcctctccctcaagcagagcggcaactgggtcgcacttcagggcgtggagcttctcacgatgctggtcgcggcggccttcggcgcgctgttctcgctgcttctgagctttgcctctatcaacctgcgtgccgaccagaccatcggcggcacggcgctgaacctgatggcccccgcactggtgctgttcttcatccgcatcatcgccaaccagaatacgctgcagatgctcacgggcgacgcggcgagctggttcatgatcaaaaagtctacgctcggcatcgacaagaacaccgacctcggctttttcggcgagacgttcgtcaacaaggtctaccttgcgacctacgtctgcatcctgcttttcatcatcctgtcgatcctgctctataagacgcgcttcggcctgcgcctgcgcgcctgcggcgaaaatccccaggcggcggattcgctgggcatcaacgtctacaagatgcgctacgcgggcacgaccatttccggcgcgctcgcgggcatgggcggcttcgtctatgcgctgacgaccgcaaactgcgcctcgaacggcgacgtggcgggcttcggcttcctcgcactggccgttatgatcttcggcaactggaagcccgtgaatatcgcggtctcctcgctgctgttcggcctcttcaagtgcatcgcggcgagctacgcgagcatcgacatcaacggcgacggcgtctacatgctcgccgagatcggcatcagcgcccatctctaccgcatgctgccctacatcgtcacgctgcttgtgctggcgtttacgtccaagagctcccgcgcccccaaggccgagggcatcccctacgacaagggccagcggtaacgtacatcaaaaagcggtatggcagtgccataccgcttttttgcaaacgaaatctatggagagaactatggagatcagagaaattacgactcccgatgaaaagcggcgcattacgcgcttgattttagaatcgctgcccgactggtttggtattccggaggcgcgcgaggaatacatcgaaaagagtgttaagcagccgtttttcgccgcgttcgacggcgagaacgccgtcggcttcctttaccttgccgaaacggggaaggatacggcggaactctatgtcatgggcgtgctgaaagaataccaccgccgcggcgtcggcaagatgctctttgccgcagcgaagcagcgggcgaaggagcttggctactcgtttttgcaggtcaagaccgtgcagatggggaagtaccctgagtacgacgcgacgaaccgcttctatctcgccctcggttttggcgagtttgaggtattcccgacgctctgggacgagcggaacccgtgtcaaatctacgtgatgagcctgaaataagaaaatgttggaactttttcccgccgttttgcgtctataaaagcagaaaaacaggggagggaagcatatgaccgtccgcgaaccgaaaaaacgctctaatttgcggctgaagctcggcggtgcgtatttcagcgcgcagcgaaaactcagatggctttcgatgcggaagcattttgcgcgcgagcgcagcggggaagacttagcatatcaggcgttttcccaccatacgccgctcatgcgaaagctcaaggacgtcgacatgcagctccagcgcaacaaggtgacgaatctccgcctcgcctgtgcgcggctcgacgggcttttgctgcgccccggtgaaacgatgagctactggtatctcatcggaaagccgacggcggggaaggggtatctgcccggcatgatcctgcgcaacggcgggtatctggccgcgacgggcggcgggctctgccagctctcaaacctcatctactggatgacgctgcacacgccgctcacggtcgtcgagcgccaccgccacggctacgacgtctttcccgacgcgaaccgcacgcagccattcggcagcggtgcgacctgcttttacccctatcttgacctgatgatccgcaacgacacacaggacacctatcagatgcgcgtccgcgtcggcaaaacagaccttgagggcgagtggcgcgtgagcgccgagccgaccgagcgctatgcggtcgtagagcgcagccacgagatgcgcgcgcagtactggggcggctacatccgtcacaacgagctctaccggcagacgtttgatttgcagggcaagctgctcgcggagacgcctgtcgccgtgaacgacgcggtgatgatgtattcgccgtatctggaagaaagcaaaaaggaaggctgacaaagtcaaccttccttttatcttattcagccgtttcgtccgcctcttcgggcgtatcctcttcctcgggctcttcccacggctgcatcgtggcgacgcagcggttgatgttcttgccctcggcatagaatttggcctcgtagtcggtcatcacgccgcgctgtccgttcgcgtgcagatcgcgtgtgacctcagagagttcgaagccgaactgcgggatctcctcgatcgaccactcaaacagcgggtcgttgtcggtcttgaaatgaatttggccgttgtccttgagcaccttgcggtagagcttcaagaaattgccgtgcgtcagccggcgcttggcctgccgcttgggaggccacgggtcgcagaagttgacatagatgcggtcgacctcgccctgatcaaaaatctcagggagctggttggcgtcgatgtcgatgaagaagacgttgtgcagctctgccttcgccgcgcgctccatcgcgacgaccatcgcgtcgggcaccttttcgaccgcgatgagcagcacgtcgggctccgccgcggccgtctcgacggtgaagcggcccttgccgcagccgagctccacgcggacctccttcgcctcgggcatcaagtcgtgccagcggcccttgcgctcgtaggggtccttgatctgatacgccccgcaccgctccatgcgggggagcaggtttttctttttgcgcattcgcatagaatgaacctcgttttcctataattaaagcctatcatatcgaaaattggtgcaagagacaagtcattttaaaaattttatacaagagttgctgcattgggagaaaagatcattaaaaatgcaacgtttcttgcaatgacatcggaaaagtgtgaaacttttttgaaaaaagtgatttttctcttgcaaatatgccttgccgcccatataatagggggcagttgaagaagacaggaggagacacacgatgtcttttgtcaaatatgaacccaagggcaacattgcctatctcatcattgaccgcgaaaaggcgctcaacgcgctcaattctcaggtgctcgccgatctcgatgccgcgctcgacgcggtggacttaagcgagatccgctgcctgatcgtccgcggcgcgggcgagaagtcctttgtcgccggcgcggacatcgcgcagatgaaggagctcagcaaggaggaggccgaggccttcggcaagcagggcaacgacgtcatgcgcaagctcgaagcgttccccatcccgacgatcgcggcggtgggcggctatgccctcggcggcggctgcgagctcgcgatgagctgcgacttccgcatctgctccgataccgccgtcttcggccagcccgagacaggccttggcatcacgccgggctttggcggcacacagcgccttgcccgcctcgtcggccccggcatggccaagcagatgatctacaccgcccgcaacatcaaggcggacgaggcctaccgcatcggccttgtcaacgcggtctatccgctttctgacctctacgccgcggcggaaaagctcgccggccagatcgctggcaacgcgcccatcgcggtgcgcgcgtccaagcaggccatcaacgacggtcttcaggtcgacattgaccgcgccgtcgtgatcgaggagaaggccttcggctcctgcttccagagcgccgaccagcaggagggcatgggcgccttcctcgaaaagcgcaagcacgagccctttatcaacaagtgattccatagaattatctatttatattgtaggaggatacacacaatgaaagttgcagttttcggcgccggcaccatgggcagcggcatcgctcaggtcttcgcggccaagggccacaccgctctgatgtacgcttccagcgtcgcttccgctcagcgccacaaggataagctcgccgcttccctgcagaagcgcgtcgagaagggcaagatgaccgaagaggccaaggacgccatcctgaacaacatcctcgtcgaggagaagtctgccgcggcggacgccgacctcgtcatcgagtgtgtggcggagaacatggacaccaagcgtcagctcctcggcgagctcgacgcgatgtgcaaggagagcgccgtcttcgcgaccaacacctcttctctgtctgtcaccgagatgggtctcggcctcaagcacgccgtcatcggcatgcacttcttcaaccccgtgcccagcatgaagctcgttgaggtcatccgcggcgccaacaccacgcaggagaccttcgacttcatctacaacctctccaaggagatcggcaaggagcctgtcgaggtcgctgaggctccgggcttcgtcgtcaacaagatcctgatcccgatgatcaacgaggccatcggcctggtcgagaccggcgttgcctctgtcgaggatatcgacaaggccatgatgctcggcgcgaaccaccccatgggccccctcgccctgggcgacttcatcggccttgacgtgtgcctcgccattatgaacgtcctctacagcgagaccggcgatccgaagtatcgtcccgctctgctgctcaagaagatggtccgcggcggccagctcggcaagaagtccggcaagggcttctacgattacagcaagaagtaatccgtccctaaaaggataaaaaggagaggcagtttacaaaaactgcctccctttttctcttttggaatggaaaggattcctgaaaatgacagaaaactgtcataaaaggaacggaaatgtcaaaaagactttaatgaattcggcgaaaagcacgaattccaaaaaggaatgatagttcctcttgcgaaaataaaacgcacaggatataatgtaagtcacggaactgatttgtgaaaaattagacaatccaattatttttatagtgaaggagcaaaagactatggatttccatctgtccaaagaacatctgctggtccgcaaaatgtatcgcgaatttgcagaaaatgaagtcaagcctttagctgaggaactcgatgaggaagagcgcttccccatggagaccgtcgaaaagatggccaagctcggcatgatgggtatttacttcccgaagcagtatggcggcgccggcggcgatgttctcagttatgccatgtgcgtggaggagctcgctaaggtttgcggcaccaccgctgttatcgtttccgcccacacctccctctgctgcgctcccattttcgagaacggcaccgaggagcagaagatgaagtatctgcctgaccttctgtccggccgcaagatcggcgcgttcggtctgaccgagcccggcgccggtaccgatgcctccggccagcagaccaccgctgtcaagaacgagaacggcgactacgtcctcaacggcagcaagtgcttcatcaccaacggtaacgttgcctccactttcgtcgtgttcgccatgaccgacaagagcaagggcaaccacggtatcaccgccttcatcgttgagaaggacttccccggcttctccaccggtaagcacgagaagaagatgggtatccgcggcagctctacctgcgacctcgtcttcgaagactgcgtcgtccccaaggagaacctgctcggtaaggaaggcgaaggcttcaagatcgccatgaagaccctcgacggcggccgtatcggtatcgcctcccaggctctcggtcttgccgaaggcgccatcaacgaggctgtcaagtacaccaaggagcgtatccagtttggtcgccgcctgagccagttccagaacacccagttccagctggccgacatgcacacccgcacgcaggctgcccagtacctcgtttacgctgccgctatgaagaagcagaatcacgaggattactccatggacgctgccatggccaagctcttcgcggccgagaccgcttccgacgtcacccgccgcgctgttcagctcttcggcggctatggctacacccgtgagtatcccgttgagcgcatgatgcgcgatgccaagatcaccgagatctacgagggcacttccgaagtccagcgtatggtcgttgccaagtatcttggtgtgaactaaaaaaggaggtaaagatataatgaagattcttgtttgcgttaagcaggtccccgatacctccggtaaggttgccgtcaatcccgatggtaccctgaaccgcgcttccatgcagaccatcatcaaccccgatgatatgaacgccgttgaggccgctctcaagctcaaggatgagctgggctgcaaggtcaccgtcgtcaccatgggtcccccgccggcagaaggtatgctgcgcgagctgatggccatgggcgctgatgacggctatctcgtttctgcccgtgaattcggcggttccgatacttacgccacctcccagatccttgccgccgctctcgacaccatcggtctcgatgacgacgacatcgtcttctgcggccgtcaggctatcgatggtgataccgctcaggtcggtcctcagatcgctgagaagctgcacctgccccagatcacctacgccgccgatgtgaagaaggaaggcgacaccctgaccgtcaagcgcatgctcgaggacggctacatgaccatcaaggctcagactccgtgcctgatcacctgcatcaaggagctcaatactccgcgttacatgagcgtctccggtgtgtttgagtgctactccaagcccatgaccgttctggactacaacgccctgaaggatcaccccctcatcgacgctaccaccatcggcctcaagggctccccgaccaacatcctgacctccttcacgcctccccagaagggcgccggtcagatgctcgagggcaacgacatggctacctgcgagaagctcgccggtatcctgctcgaaaaacacatcatttaaggaaaggagatcaatacgatgcgtaacgaagtgaaacttgctaatcccaactatgactcctccaagatcgaagagttcaagaacgtatgggtcttctgcgaacagcgtcagggccagatgatgtccacctcctatgagctgatctccgaaggccgcaagctggcggacgagctgggcgtgaagctctgcggtctgctggtcggcgacaatgtcggcgatctcgccgagagcattggcggctacggcgctgatgaggtcatcgtctgcgaccaccccctgctcaagaactacaccaccgacgcttattccaaggtcatctgcgacgtcatctccgagatgaagcccgaggccttcctcatcggcgcgaccaacatcggccgtgacctcggcccccgctgcgcagcccgtctgcacaccggtctctgcgccgactgcacccacctcgacgttgacatgcccatctacaaggacttcctgcgcggcgcttccacgctgcccgaggccaagatcgacggcatggccaccgcgaaggtcatgggtaaggaccacgatgtctctcgcgacctgaagatgacccgtcccgcgttcggcggcaacctgatggctaccatcatctgcccgcgcttccgtccctccatggcgacggtccgtcccggcgttatgaagaaggctgcttacgacgaggcgaaggccaaggccgttaagatcaccaagtacgacgtcaagctcgacgccgccgatctccagaccgaggtcgtcgaggtcgtcaaggctgccaagaagctcgtcgacctggttggcgctgactacatcgtctccgtcggccgtggtatctccaaggacgtcgagggcggcatcaagctcgctcacgagctcgccgatgtgctcggcggcgttgttggcggctcccgtgttgccatcgactccggctggctcactgccgaccatcaggtcggtcagaccggtaagaccgtccacccgaaggtctacgttgctcttggtatctccggctccatccagcacaaggccggtatgagcgagtccgagtgcatcatcgcggtcaacaagaacgacaccgcgccgatcttcgagatcgccgactacggcatctgcggcgacctgttcaaggtcaccccgatg

SEQ ID NO: 1087 - DNA, 9031 bp, unidentified
  source 1..9031: mol_type = unassigned DNA
tcagatacttgtatcttcaaacttatacaattcccattctccggctttccggcggaaataaaggatattggaaaaaccattgccgatacctttcaacgccaaaattttcgtgggcgaatcatcgccattccgctgtccgtaattaatattagaaaggcggtcgacaggaagtaccggtttgaaggcaaaccactgattaagatcgagggttgtctccaaaatggagaaatcatcgtccggatcgctggttacaaaagctaacggatccctcacacgctgactctgaaaaagactatccgttgcaaaatgtccgaaaaactcaacaaagttctcattatcactttgctcaataggccgcaggttgattgcctccagcatccatgcacctttgatacgttcaaaatagtatcttttcaccattcgcgttttcacgaacatccactctacctgcacagaagtgagggaggtatctcctactaaatccatgtcttcttctctatcaaacagcagagtataataatgctgcttggtaaacaagtcatcatgcttccagttgcgttcctcgatgtttgatttcttatctccattgtagtagggcaatggaaatttcacacgctgacgctgtaacacttcatcggaagcaaaattgtagataaaatcatcgaaagattcatctgcctgtataggctgcggatcttccggcgatttatcatggtggctagaatcggctatctgccggattgaatccacctctttagtaatagatgcgaaagggtcaatatttgttttcttgtttccacaagagctcaatataccgagcagtatgacccctgcaattagttttttcattatttcagtttctctcttaacttttcaagcatatctaccgtcatgctttccaaattgtaggccggcttccatccccactcttcacgagcgcaggtatcgtccaggctatcgggccagctatcggctatacgctgtttcagaggatctatatcatagatcatctcaaactgcggcacatgcttcttgatagcctgatatatcgtttccgggtcgaaactcatggaagcgatattgaaagcattgcggtgtatcaatcttgccggatcggcttccatcagcgtaattgctgcgttcagcgcatccggcatgtacatcatatccattaaggtgccttgcttaatggggcacacaaacttttctcctttcactgccgagtagtaaatatcgacagcataatcagtcgtacctcctcccggaggggtcacattcgaaataatgcccgggaaacggacagcacgggtatcgacaccgtatttattaaaatagtaatcactcaataactctgtcgttactttggtgactccatacatggtacgcggacgctgaatggtgtcctgcggtgttttcgtgtgaggcgtactagctccaaacgaaccgatagaactcggagtaaacactgcgcacccttgttcacgtgccacttccagcacattccacaatccgtcgatgcctattttccaagccaacttgggtttcgactcggcaactacggacaacagagcagccaaattataaatcgtatcaatgtgatactcttttactacagatgcaattgcatcgccatctgttacatcagcaattgccgacggtcccgactcctttaattcccctttaggttctgcacccggaatataacctgctactacatttgcatttccgtaacgtttccgtagctccatcgttagctccgaccctatctgtccggtagctccaataatcaaaatgtgttccattttttcttctgacttagaatatcaagcttaaatagtgcgcaaagtaagcacttttttttcagattttaatcaaaaagacattgttattccaagaaaaattgtgtcctttgcaatataacttaatcacccaaacactatgtacggtaaaatgcaagaatatctccgccaaacattggctgaaatcaaggaagccggactttataaagaagaacgactgattgaaagtgcgcagcaagctgccatcgctgtaaaaggtaaggaagtattaaacttctgcgcaaacaactatctaggattgtccaatcatccccgattaatcaaggcttcacaggaaatgatgaataaccgtggatacggaatgtcgtctgtccgtttcatttgtggaacacaagatatacacaaagaactggaagctgctatctcggactatttccagactgaagacacgattctgtatgctgcctgcttcgatgctaacggcggtgtattcgaaccgcttttctccgaagaggatgccattatctcggattcgctaaaccacgcttctatcattgacggggtacgtctttgcaaagcgaaacgttaccgttatgccaatgctgacatgaaagacttggaaagatgtctgcaagaagcgcaggcacaacgcttccgtattattgttacggacggtgtgttctcaatggacggcaatgtagctccgatggatcagatttgtgatcttgccgagaaatacgatgcgttggtaatggtggacgaatctcactctgccggtgtggtaggtgccactggtcatggcgtaagcgagttgtataagactcacggacgtgtagatatttacacaggaacgttgggtaaggctttcggcggtgcactgggaggatttaccaccggacgcaaagaaatcattgatttactccgtcaacgcagccgcccgtatttgttctccaattcattggctccgggtatcatcggtgcaagtcttgaagttttcaagatgctgaaagagagcaatgcactgcatgacaagttggttgaaaatgtaaactatttccgtgataagatgacggctgccggatttgatattaaaccgacacaaagtgctatttgtgcggtaatgctgtatgatgcgaaactgtctcaaatttatgctgcacgcatgcaggaagaagggatctatgtaacaggtttctactatccggtagtgccgaaagatcaggcccgcatccgtgtacagatttctgcaggacacgaaaaagcacatcttgacaagtgtatcgctgcctttatcaaggtaggtaaagagcttaacgtattgaaaacggaataactccgaagcaaggtttccttgcagaatccatttttaggcacggattacacggattacgctgttgctttatgcaagcatatttctaaaaaccgtgtaatccgtgtaatccgtgcctaaaaaatctcttttatttaatgaattttgaaccgctgcttaactataaaaagattatggaagaattaaccctcactactcctaccctgcttttctcggcagtttcattgattttactagcttataccaaccgtttcttatcgtatgcccaacttgtgcgccaactacgtgaccgctacgtggaaaacccttcggatatcactgaagctcaaatcgagaatttacggaaacggttgaatctgacccgtacaatgcaaggactgggtattgcaagcctttttctctgcgtagtcagtatgtttcttatttatatcggactgcaattattttccgcttacgtattcggactggcactgattctgttgatagcttctctaggcgtatctttccgcgaaatacagatttccacccgttcactggagatttacctgggaacaatggagaaagggaaaaacaagaaataatacggttgacattcccttccattagtttttatcaagacactacccagcaaggaaggatgaccgtaaagcgacttcccttgcctacttcggatttgagttcaatccttccacccaacttttctataatcacctgacaaatagaaagtcccaatcctgctccctgtgagaattcgttctgtttgtaaaaacggctaaaaatcatccgttgttcttcacgtggaataccctttccggtatcttctacataaatccgcacgttaccttcatccggcagataaatataccctaatttgatatacccggtttccgtaaacttactggcgttattcaagaagtttgttagaacttgtatcaaacgctctctatccacattaatctccaaaggtatattatccacttctttcaggaattccagacgtggagcaatcaatacctggtgagtcatataaatgtcatcaatcagctctctcaccctacatttcttgaatgagaaagacatatagcctgattcgatacgggaaagctccagaatatcgttaatcagtttgagcagcaactcgctgttcttgttaatggtaccgatgtattcttcgcgttctacggaactcaacccatcttccaatgccagaatattggcaaaaccaacaatcgaattaagcggagtacgtatctcatggctcatatttgccaggaaggattgtttcaattctgccttttcagcgagcaagcgcgcagcttccagttcctcttcacgatcctttatatcttgtatgttgagcagcaaacctgctgttttatattcgccacccggtagctgtttagtagtataacggaactcccaccactgatatcctttaccgtcgaagttacaaagctcccgtactactttcttttgggctgttttcagattttgccagttgaacttcactccttcccaatgatcgggatgaataaagctcatgaattccttaaacgaaagttgtctaggattcagcccttgcgacgaccagaatgcatcttcaaaaacaaaacaaccgttatccaatctccaagcatacgtcattccaccctcaatagctaatgacaatgtttctttttcatcagccaatgctataagcgcctgtttttttctcgtctgttcccgaaggtataaccaccaaagcgaagcaaaaagaaatgtcaggaaaagaattagtgaagcgactaaagttccccaaagaaatggatacttgtctctgaacggaatattaataatgctatattttgcaggaatactttccttgcccaagccaatttgtttcattgtattccagtctacgacatactctttccgactttcaacaatgggtatatccgaggggcttgtaccatgtaatatgcgaacggcagttttcacttcttcttctacctgaataggtagcgaagtgatgtatccacccaacaacttctcaccaaacccaaaggcttcattaatggctgtcagactgggactaccgcagatgcttccaatattaatagtggtgtaatcacgtttcaactgaatataacattggtcgcggtagctcctgtttaaaacccacataaaagtggcatccgaatgatttctggcattacgcaaaggaatagccatgaagcgggtataaccttcttcctgcaccaaacgtatctgttcttccggagaaagttcaggattatctatgaatccggtcactttacatcctttaaactgctcctttgcatctcttctgatttgtttgtcgatataggtagtgtcgagcatggtaaacaaacggacgtgctcaccgaagagctcttttgccacactgatattctcattaaaggctatcttgtcatgaaaacctgtcacgttgggatgatgtttcaacaatccccaattcggataattgacaccaccaaaaaccacaggcacttctttcgccaactgaattccacatttcatcaatgaataagtggcttggtcttcattcaccagaatcacttccggtcgccagtctctcgaaacggaatcaaccagaaagcgcatccgttccagttccggttcctcccaataagattcacagtctaaataaacggtacaaatatcagcatcaattttctctttttcaaattgctccgctatcatccggttaaattccggataagctgcataagtttcctcataagagtggacaactaaaatacgtcgttcctctttttgagaacaactactcacccctaaaaggagcgataaagataaaaggagcaatcttacaattcctctgttcaaaccattcatttataataaccgggattaatttctctctgactcgtaatacaaaggtagtttattttcgaacataagccaaataagtgaaaaaaaagaagctgcccgaactggaattcaggcagcttctataatatattaaagaactattttcagagtaacatcattaacgctgtcccaattgtgagtctacaaagaaaattccggtatcaccggctttcttgatcttgtcaacaatgccttgtgctgtagcttcttcttctacttgttcacgaacaaatccccacaagaaatcctgtgtcgctttatccttttcagcagcagctacgtctaccagcttgtctaccaattgagaaacatgacattcatgtttgtaaacgtgttcgaatacttccaaaggagtaccccatccgttaggaacaacatctattttatcaactttagcagctcctccacgcttgataatataatctgccatggcataagcatgtcccatttcttcttgagattgctttttcatccaatgagcaaatccactgaaaccttctctctcgaaatagaaagacattgctaaatacaggttagcagaccatatttcagcagtaatctgttcgttaattgcattctgtaatttttctgaaatcataatcgtattttttattaagttgttaatgtagtttctttttgaactcattacaaaaataacaagctttcagttaaaattgttccacgcaccctacatttttaaactacattcacactttgattgtagcggttcactttttacttacaccagttcgtcagaggtatatcctttcggcagttcacggcagttatatccggaagccattatttcaccataagcaccggcagagcgaagggctatcaagtcaccacgcttcactttgttcaggtcaatcgcttttccgaaaacatccgacgattcacagatcggtcctaccacgtcgtatgcttccaatggttcttcggaagtaatattttccattttatggaatgcctgatacagagccggacggataagatcggtcatgccagcatccaagatggcaaatttcttccgagcaccttgttttacatacagaactttagaaattaaggaaccgcactgtcctacaacagcacgccccaattcaaaatgtaacgtctgataaggacgcaatttcagttgcccggcataggtagcaaaatagtctttgaagttcgggatagcctgacggttgggatgtccatagtcaatacccaaaccacctcctacgttaatatgttctaccagaattctgcgagcttccaatttatcctgtaattcattaacacgattacagagagctacaaaatcgcccatatccagaatctgcgaaccaatgtggaagtgaaggccgataaactttacgtttttcatctcctgtgccacatctatcaccttgtccatatcctgcatactgataccgaatttgttttctgccaaaccggtagtgatatttgcgtgagtatgtgcgcctacatccggattgatacggaaagcaacattagccaccttattttgagcagcagccaattcattgattacttccagttcgggaatagactctacattgaaacagaagattccgtactccagcccgaggttgatttcccagtccgctttacctactcctgcaaaaacgactttattggccgggaatcctgcacggatagcggcgcggatttctccaccgctcacacaatcgactcccattccgctctcacggatgatagtaagtactttcgggttggcatttgctttgacagcgtaatgcactgaataattaggatatttggcaacctcatggttaatagccgacaatgtatcacgcagcactttggtatcgtaataatagaaaggtgtctgcaaagtgcggaatttatcgattggaaatattcccttcataattcgaaaaacttgtttagttggttaaaaaagagcgcttttatcagttcggtaaaagcgctcgtgttatttatggaattacttgccgttgaaaagcatatcgctcaacgattgtaaagctactttcttatcgcactcccgaatgaggaaggagatattgtagttacttcccccaaacgaaatcattcgcaccggtatatcacgcatcgcatcgagtgcttttgcttcaaaaccgacattttcccattcaaggtcacctacaacacagatgatacacattcctttatcaacggttactgttccgtatttcttcaggtcatccagaatctcattaagatgtttcgtgttatctatcgtaacagatacaccgacctctgacgtacagatcatatcgatggatgtctgataactttcgaagatttcgaacaccttacgcaagaaaccgtgagccaataacatgcggctggatttgatcttgatagcagtaatgttatcttttgcagctactgccttgatcttacctttttccgtatcgttggagattagtgtacccggagcttccggatccattgtgttcaacagacggacagggatattggcatatttagccggctggatacaagtagggtgcagaatttttgcaccgaagtaagccaactcggctgcttcctcaaaatgaagctgacgcaccggagcggtcttgtcaacaatacgcgggtcgttattgtgcataccgtcgatatctgtccagatctggatttcggaagcgttcactgctgcgccgatcagagaagcggtgtagtcgctaccaccacgttgcaggttgtctatctcaccgtaagcattgcggcagatgaaaccttgcgtaatgtagatctccgtatccggataaagatcgagttgagcacgtaacttatccttaatatatacggggtccggttctgcattcttatcagtacgcatgaattccaaagccggaagcaacacggacttcacaccacattcctgcaggtagaagtttaccatcgccgtagaaataagctctccctgtgccaaaaccactttctcttcgaacaaagtgaaaaggtc

SEQ ID NO: 1088 - DNA, 7210 bp, unidentified
  source 1..7210: mol_type = unassigned DNA
ttatattttctctctcaagtattcgtaaaagctatattgcgaccgtaccttctccttttgcggtcgcgacgacttccagcggtttcgcaaccggtcgtccacaaagcaggctttccgtttgtccgacagttgtatggatagcatatcgatgagctcttgcttcaagtccgggtccagaatgggggtgacggcttcgatacggcggtacaagttacgccgcatccagtccggcgagccgaggaagagcttgggtgcgccgccgttgccgaagtaccacacacgggcatgttccagaaaggtatccacgatgcgtgtcacgcggatgttgtggctgtactcctgcccggggatgaggcagcagatgccgcggacaatgaggtctatctctacaccggcttgcgaggcttcgtagaggcggtctatcatggcggggtcttgcagggcattcatttttaggataatccgtccttgcttgccttgccgggtcagttctatttcgtgattgatgaggcggttcagttcaggaatcaggttgaagcgggccacaagcaggcggtggaacactggattttcctttccctgcagagtacggaacaagttgtgcaggtcgtttacaatcaccgggttgcaggtgaatagtccgctgtccgcatagagggtggcggtcttttcgttgaagttgccggtgctgatgtaggcgtagcttgtcagtttgcgcccttccttgtcgcggcgtagcacgagggctactttggcatgtacctttagtcctggtatgctgaaaatgatgttgatgccggcggctttcatcatctcggcggtggcgaggttgttttcttcgtcgaagcgggctttcagttccacaaagacggtgactttctttccgttctgtgcggcggctattagggtgttgatgacggtggagttctctgccacgcgatactgggtcaccatgatttcacgcacggtgggttcgtggacggcttcatatagaaaatggatgaagtggtcgaaggagtggtagggataatgcagcagcaggtccttcttctccacatagcggaagatggattcgcgttcgtccaggcaggtcagcttcatgggctggggtttcttgatgggacgtacgctttggttgggattaggcagatgccgcaaatcctccatgttgaggtgcttgtctcccggcaccagctcccggcggtctatgcggtaggcatctaccagaaagtcgaggaagtcctggggcatggcgcggtcgtatacaaaacggcacacggcgcctatcttgcgtttctttaccttcttcttcacctgctcgatgatttcggaggtattggcggcatcgtctatcagaatatccgcatcgcgtgaaatcttgatgcaataactgctgtccacttcataaccggggaagatggtatccagattggccttgatgatgtcttcaatgaacatcagataatagtctttccccaccttgggcagctggatgaagcgcggcactttgctgtacggcagtttcatcacgaaatactggatgcggtttggagaactggcgggagctcctttcagatgaagccgtacggctagatagagacggttgtcgcgcaggaatgaaatcaccttgtccttgcttacgggcaccggggccagataagggaatatctcttcgcggaagaagttgcgcacgaagtcgcggtgaaacggttctacgttgcggctttgatagaatatgatgtgatgtttccgcagggcgggcagtatcttctgttcgtagatgcggatacgttcctccagttggcgattgacttcttggttgatttcatctaccagttcggcggcagactgcatagtctcttcatcgctttgcgaggctccggtggctatggccttatggtcggctacgcgtatcttgtagaattcttccagattggaagagtatatagaaataaagttgatgcgttcgtatagcggcaatgtctcgtcttccgcttccagcagtacgcggtagttgaaggaaagccagctgatgtcacgtttgaaatatctgttgtccatggtgttaaggtgttaatgtggcatattagcacattaccacattgtattcttcccaaatataattacctttgtcttaataaacaaaggaaagatgacaaaagttggtttattatcggatacgcatggctactgggatgaaaagtacctgcaatattttgagggctgtgacgaaatatggcatgccggtgacatcggttcgctggaagtggcacagaagctggcggctttccgtcccttccgtgccgtgtatggcaatattgacgggcaggagatacggcagctctatccgcagattctccgtttcacggtggatggggcagaggtgctgatgaagcatatcggcggttatcccggcaactacgacccttccatcaagggcagcattctggtgcgtcccccaaagctgttcatcagcgggcactcgcatatactgaaggtgaagtatgacaagacgttggatgtactccacatcaatccgggcgctgcgggcattcaaggtttccataaggtgcgtacgatggtacgctttgcggttgatgggggaacgtttaaagatttggaggtgatagaacttgctgaccgatgatgtagtttgtttattttcaatggattgtatttaccgattgcttgcgctatagtgtaaaagccgttacatgctaatgtaaaggttgttacgctattgggtaaaggccgttacactatttggtaaaggtcgttacacgctgaggtaaagaccgtttcatcaaggggtgacggccgttacgcactgaagtaagcaaaacaatgtaccggagtaagcaaagcaatgaagtaaaaagatgaaaccaagccttcacttaatcgaatttttccattatctttgtacccgaatagcaagtagagccgtggggcatcgtcctccttcttattttattctccattttgaagtatcaccgaaaaagaactgaaatatgaaaggaattattcttgcaggtggcagtgccactcgtctctatccgttgtccaaggctatctccaagcagataatgcccgtctacgacaagccgatgatatactacccgctctctacactgatgttggcgggaattcgcgaagtgcttattatctctactccacgtgacttacccatgttccgcgaactgctgggaaccggcgaagaactcggcatgtccttttcctataagatacaagagaatcccaacggactggcacaagcctttgtgctgggtgcagagttcttggacggcggaccgggctgcctcatcctgggcgacaacatgttctacggtcaaggcttctccgccatgctgaagcgtgccgcttccatagacaagggtgcctgcatcttcggttattacgtcaaggacccccgtgcctacggtgtagtggagtttgatgccaacggcaaagccgtctcgctggaagaaaagcctgccaatcctaaaagcaactatgccgtccccggactgtacttctacgactccaccgtgacagagaaagccgcctccttgaagccctctgctcgcggcgaatacgaaattaccgacctcaaccgtctctatctggacgagggcacgctgaaagtggagctcttcggccgtggctttgcctggctcgacaccggcaattgcgacagcctgctggaagccagcaattttgtcgccaccatccagaaccgtcaaggcttccgcgtgagctgtatcgaagagattgcctggcgcaagggctggatagatgtagaccagctgtatcgcttgggtgaacagcttggcaagaccgaatatggcaaatacctgatggaactggctgaatcgaagcgatgaactctttgttccccaaaaagagaaggagaatagttctcctataaaggcccgctgactttaatttttaatttataatttttaattctcatgaagacttatctcgtaaccggtgccgccggttttatcggcgccaactatattaaatatatcctggcaaaacataatgatattaaagtggtgatactggatgccttgacctacgcaggcaatctgggcaccattgccaatgacattgacgacgaacgttgcttttttgtaaaaggtgacatctgcgaccgcgtgcttgccgacgaattgtttgccaagtataaattcgattacgtagtgaattttgctgccgagagccacgtagaccgtagcatagagaatccccagcttttcctgatgaccaacatcctgggtacacaaaacctgctcgatgccgcccgccgtgcctgggtcacgggtaaggacgagtccggttatcccacttggcgcaaaggcgttcgttaccatcaagtgtctaccgacgaagtttacggctcacttggtgccgaaggctacttcacagagcaaaccccgctctgcccgcacagcccttacagcgccagcaagacgagtgccgatatggtagtgatggcctatcacgacacctataagatgcccgtcactatcacccgctgttccaacaactacggtccttatcacttccccgaaaagctgattccgcttatcatcaagaatattctcgaaggcaagaacctccccgtctatggcgacggcagcaacgtgcgtgactggctctacgtggaagaccactgcaaagctatcgacctggttgtccgcgagggtgtggaaggcgaagtctacaacgtaggcggtcacaacgaaaagaccaatcttgaaatcgtgaagctgactattgccaccgtccgccgcttgatggaggaagaaccccgttaccgtgcagtgctgaagaaacaagtaaaagccgccgacggcacgattgacatcagctggataaacgaagaccttatcaccttcgtcaaagaccgcctaggtcacgaccagcgttatgccatcgaccccacaaagattaccaatgccctgggctggtatccggagacgaagttcgaggtcggcatcgtcaagaccattgaatggtacctgaacaaccagccgtgggtggaagaagtgaccagcggtgattatcagaagtattacgaacagatgtatggaggtagaggttaaggtttagggattagggtctaaccgctaatccttaacctctaacctctcaattcagcgccaccgctaacagtaatcctaagaacagcatattgcgcgacgtctcgcccagtatgctgttcagctttttaccgctacctatctgtatcattttgcgccacgtcagtgcgtgcatatagagatagacgcagggagcccagataaattccagcggagtcagcttgcccgtgtagacaaaccagaagcagagcagcacggcggcgatgcccagtgccagatacatattctcaccgaacttcttgccgtagcgtaccaccagcgtacacttgccgctcacggcatcctgctcgcggtcgcgatagttgttcaccatcagcaaggtgtctatggcgaggccactgacgagcgacagcaccaccacatccatattcagcgtataggcctgcacgtagtaggtgccgcatacgggcacgaagccgaagaacaccagcaccagtacgtcgccccagccccgataggagagcagcgtggtatagaggaaagcaaacagtatgcacaccacgcccagcaccaccagttcccagcctccgtggggcagctgcccccagacggtgaacagcactgccagccctgccaggcacgacagtgtcagtgcgatgccgatgccggttttcatggctgccggcgtaatccaaccttcggcgcaggcgcgctgcggccccagccggtcttcccgacggtcggtccctttctggaagtcgaagaggtcgttgataaagttggcggcaatctgcatgccgcaggcaaagagggcgcacagcagggcgggtgcggtcttgaactgtccgtcgctgaaggcaagggcactgcccagcaataccgggatgatggctcccgtcaacgtcttggggcgggcggcgagaaaccatgcgtagggtgaattctgtttaatctcgttcatcgtagttccaatttagttcggcatctgccagcaaaaatactgaaaatccctatatttgtacccacttatgatgaagaagttagtctacatatccattctttctctgctgctcttgtcttcctgccgttccaagcggatgattaccgtgtcgttgccgcagccagtcatgcaggcagacagcacgcagcttggcgatactatcgggttgcctgcccgcctttcgccgatgttcacctttgaccagtctgatttgcgtaatgtccgccgccagccggcgaagggcgaggtaaagaaacagcagataaagaaaacggcaccggtacaaaaggtaattgtgcagcgaggtacaagaatcacatcgaaaaccacccacgtaggctcggcctataagggcgtcagccgcattaagacgtacgacttcacgcatcgcgacgtgcctgccgccttcgagggcttccgcatcgcctttgtctccgacctgcactacaaaagcctgctgaaggaggagggattgaaggacctggtccgcctgctcatagaccagaaggccgacgtgctgctgattggcggtgactttcacgaaggctgccagtacgtgccgcccgtcatggctgccctggcgcaagtgaagacgccgttgggcacctatgccgtgcttggcaacaatgactacgaggcttgctatgacgacatcgtgcgcgaaatgaggcattatggcatgcatctgctggagcataaggtggacaccctgcggcgtggcggtgagcggattcttgtggcgggcgtgcgcaatcctttcgacttgggcaagaacggcacatcgcccacactcggcctttcgcccgacgatttcgtaatcctgctgacgcatacgccggactatgccgaggacgtcccggtgacaaactccgatctcatcctggccggacacacgcatggcgggcaggtgacgctgttcgggctttatgcaccgatagtcccctcgcactacgggcagcggttcctctccgggctgaagtacaactcaaagaacatcccgatgattgtcaccaacggcatcggcacttcgcagaaggccatccgcatgtttgctcccgcagaggtggtgatgattgtgctgcaccggctgacggactga

SEQ ID NO: 1089 - DNA, 8846 bp, unidentified
  source 1..8846: mol_type = unassigned DNA
tcattttctgctgccgcagatatcaagtagtggacactcgctacagcgttctccccttgccttgcagtattcacgtccgaacagtacaaggcggtgacagaaatcagaggatctctcagggggaagtatctttctcaaatcctcttccacctttgcaggctctttattttttgtaagcccaagtctgccgcatatccttatgcagtgggtatcagttaccaccgcaggcttatgaaaaacatctcccataacaagatttgccgtctttctgcctatgccagcaagggtagtgagcttttctatggtatcaggtatctcaccaccaaagttatccattatctgtctgcacattgctacgatagagcgagcttttgttttatacagaccgcatgggcgtattatctcctcgatatcagcaacatctgcgttagcaaaatcctcaatggtcttatattttgcaaaaagttctttcgtgacgatattcacccttgcgtctgtacactgtgcagaaagtctgcctgctatcataagctcgtggggctttttatagtcaagggagcatatgccctcggggtagacctgctccagcctttccactatcatttgtgcacgttctttctttgtcatcggtactgctcctttgtttataagtgctttattattttatattgtacacttttttgcaggattcgtcaaccaaaatttcatatcagggacgatattccagcgggtttgtgcgttatactggcataaaaatgcgttttgtcatttttgcaggctgaaacagctttggtcacagtgcaatgatttgtcgacatttcacggaaattttacacgaattatgaatttataatcgtgattttacttcacatttcaaaaaaaggctatgatttttatacaatttcaataaaattatgaaattttgcattttactacttgcaaattgcaaaatagtgtgttataataagtaggtgatgtgcggaatgagtaaaaaagccgtgcacaaattataatttataagatgggagttttaataatggctttgaacaatgcgtatcttgaaagcgtttatgagaaggttgagaagagaaatcccggcgaaaaggaattcctccaggcagtatatgaggtactggaaagcctcattcctgttgtagaaaagagacctgaccttgttgaggcaggtataatcgacagaatagttgagccagaaagacagatcattttccgtgttccttgggtagatgacaatggcaaggtacaggtaaacagaggtttcagagttcagttcaactctgctataggaccatacaagggcggcatcagacttcacccttcagtatgtgcatcagtaatcaagttcctcggcttcgagcagatcttcaagaacagccttacaggtcttcctatcggcggcggtaagggtggttcagacttcgatcctaagggcaagtctgacggagaggttatgagattctgccagagctttatgacagagctttgcaagcacatcggtgctgacacagacgttccagcaggcgatatcggtactggtgcaagagagatcggctatatgttcggtcagtacaagagaatcagaaacgagttcacaggcgttcttacaggtaagggcctttcatacggcggatcacttgcaagaacagaggctactggttatggtctttgctactacacatctgagatgatcaagtgcatgaagaatgaaacattcgcaggcaagacagttgttatctctggttctggtaacgttgctatctacgctacagagaaggctactgagctgggcggcaaggtagttgcactttctgactctaacggttatgtatacgatccaaacggcatcaaccttgatgttgttaagcagatcaaggaagttgagagaggcagaatcaaggagtatgtaaacagagtacagggtgctgagtaccacgagggttgcagcggcatttggactatcaagtgcgacatcgctctcccatgcgctacacagaacgagatcaacgaagagtcagctaaggctctcgtagctaacggtgtatttgctgttgctgagggtgctaatatgccttcaactccagaggctatcgctgtattccagaatgcaggcgttctctttggaccagcaaaggctgctaacgcaggcggtgttgctacatcagctcttgagatgtcacagaacagcgagagactttcttggacattcgaggaagttgacgctaagctcaagaacatcatgacaaacatcttccacaactcatacaatgcagctaaggagtacggtcttgaaggcaacctcgttgcaggtgctaacatcgcaggtttcctgaaggtcgctgacgctatgaagtggcagggtatcgcttactaatataagcgtataaacaaagctatatacgaagcggacagtcaactgactgtccgttttttttatatcatgccagacttatgggaatattcccgtaggtctatttcacctgattttcttttattatcctgccacgctcaaaagcacaagcattctcaagcgttgtgcggcttatggcggctagggcttcttcggtgaaaaagccctgatgagaggtgacgataacgttaggaaaagacagaagccttgcggtcacggagctttctaggatatcctcctgtcggttttcaaagacgttctctgtttcttcctcataaacatcaagacccactccgtggaattttctgcttctgataccttttataaggtcttcggtattcacaagcgcacctcgggaggtatttacgaaaacaacattctctttcataagggagatagtttcagtattgataagatgatagcttgattctgtcagagggcaatggagcgagataaggtcgctttctctcaggacttcgctaaggggataatatttcacaaaatcaaggtcggggttttgataaacgtcataagctataacacgcataccaaagccgtggcatatcctgcacattgccgcacctatcctgcctgtgcctattataccagcggtcttgccatggaaatcaagtcccataagaccattcaggctgaaattgttctctcttacctttatatagcccttgtgtattcttcttgtgactgcaagcgcaagcgccatggcgtgttctgccacggcttccggagaatacccaggcactctaagcactgttatgccgtatttatcggcggcttttatatcaacattattatagcctgcacatcgcataagaagaagctttacaccgtgttcatggagccgtctaagcactgaacctgttatcgttgagcttacaaaggcacacacgccctcacagccctcggcaagccttgctgtgtcttccgtcaagtcagcttcaaggtagatgctttctatatcgggatagttttttcgctgcttttcaaatgaatctatatcatactgctttgcgtcatagaatattattttcatgaaaactcctccaaattttaaagtatttcattttacgcttgtattttttgcagctgtttataaaaatatacggtttttgccttaataagataaaattatcaaaggttgacaattgtgcgtaaataggatataatataggtgtcggtatgtaaaaatatactttaaatatactttaaatgcctgttttctacagaaaggatatgatgccaatgtcacaattttcggaacttctcagagaatacataaagaaaaaagatattactataaaagcccttgccgaaaaatgtggtatcgacagaacatatcttcataagatactcaaaggggaaaggaaagtgccaagcgtagattttgtagaaaatataagcttgcagctcatgctttccacagaggataaaagcaggctcatggagctttataacatttctgagatgggggaagatgtctacaatcgccgtaagcaggtgtcaaagataatacacgatatggcaaacaccaacatggaagatcctgacgctctgactttcaagacagaagttgatattgactctgtgcctgagatatccatctacaccgacaaacgtgagcttagaaaaaacctgcaggtgcttatatgcagcgatgttcataatggttctgacattcaggtcatcgctcagccaacagagtttcttaccaatctgctgtccattgccgcagaaggcagcgagtctgccataaaccatctgttcttctttgacaacacctcatacgaaaaaaacaccgcaaaatacaatctggatatttttccgttcatatgtcaccttgcacaaaagcatgaaaaatatgaggctttttattattatgagggtgcgtcggcatatttcaactccacgaacatcatgccaaacataatgataacgaataattttctgatcagaacagacagcgattattgtgagggcgttatatacagatctaagcctatggtagaattttatatgcggcagtttgaaaagttcaagacaaaatgtgcaaagcttctcgaccacgccgtggatatcttggaatatgtttacttttggtacgatgacaacgcaaatttcatcggcgtggattttcagccatgcaccatgctttgtcttacagaggatatatacaacgcccatgcacttttgccagctgacgcaaagaaatttgtaaaagcaaagctcaccatgggcaagaaggctctttctgaacacaaatttgtaaatctgttcagtgaaaagggccttgcagagtttatgacgacgggagagatttttgagcttccgagaaattcatatacttttcccactcttgcagaacgcaagataatgctacagataatgatatcgctttgtgaaaacggcatggcagactacaggataataaagaacgactattttgcggtgtcgaaaaatctttgtatcaacatttctgacaacacaagtcttaacatcattgccagaaacaactgcttctctgatttttcttatttgaagataagcgaaacgagccttgttcaggctttctgggattattttcagcactttatagattctgacgctgtttgctcacatgaagaaactatcgagatactcaggtcttatttgtaaaaaatgggcgaccaaaagccgcccactgtaatgatattatttaagctgttcacgcattaaagtgagcagctttttttctcgccttgacacctgcacctgcgacataccaagttgttttgccgtttccatttgagttttattctgaaaatatctcaggtatataagctttctatcctccgcttcaagggaagctatgacctggcggagagagagcctgtcagcaatttctatgtcaggagcatcaacagggatatctatttgtccgtggcggtcgtcttcatctgagctttcagtaagactaacagggggcagggcgacgttcatggctagagtaacggcttcttcgctttctcctgacagctcacaaagctcgcttactgtaggttctctcccctgctgtatggaaaatcgctcacgttctcttacaaggcgcatggaaagctcttttatgcttcgtgacacttttatcgtgccaccgtcacggaaaagcctttttatctcccctaatatcactggcactgcataggtggagaatttcacaccacggtcgctgtcaaaggctttcgcagcttttacaagacctatacagcctgcaccgtagaggtcgtcatactctatgccacggttgcggaagcggtttgcgcacaggtgaacaagccccagattttcttctgcaagaggggtctcgactatgctgctcattttatactctttctttcaaggttttttcaaggataagggtagttccttctccaagcttgctacgcaccttcactttatccataaagctttccatgaccgcaaagccaaggcctgctctttcctcctcaggtgcagtggtgaaaagtggctgcatagcctgctcgatatcagcgataccgcagcccttatcccttatttttatgtagatgtgtctgttctcgaatatccttatttgcatgaatatctcccctagggtgtttcggtatccgtggacaatggcgtttgtgactccctctgacactgcggtcttgacatctgcaagctcgtcgatctgagggtcaagctgagtaaggaaaccgctgactgcaactctagcaaagcgctcattttcagaatagctgggaaaactgactttcatttcattaaggggttttcgtttcaattttatcactctcctttgttttgtcatcggggctttcattctgttcctgagctgctttcttctcttgtatatacggggtcatatccgtgactatctttgtgagtctgtgcatacctgcaagctgcaagacctttcggatataagcaggaggcgacgccactatcacctcgccacccatttctgacattatcctgtatctgcccataacaagtccgatgcctgagctatccataaaagtcacctgagaatagtcgaggataagggtaagagggttatggcttctaatggctttatctatctctcccctgaaatattttgctgtatggtggtcgatatcgccgcatatctctgccacaagagttctggctgacggatagttttttatctccacattcatgctttatcattcctttcatcttttcgttttatccgctgaaaatatattatcacttacagtgggatttttttgtcgcattatcgtatgggtgaaaaaagcaggaacacacttttttgtgtgtccctgcctaggaaaattattatgttctatgcttatgtattaaagtccgttaggattattcttaatgaagttccagctatctgctgtcatttcatcaagaccatattgagcttcccagccaaagaccttctttgcctttgctgtatcagcatagcaggttgcgaggtcgcctgcacgtcttggctttactacatatgggagcttctttccgcaggctttttcaaagctgtgaagaacgtcataaacgcttgagccttttcctgtgccgaggtttacggcttcaacacccttgttttccattacatacttaactgcgcaaaggtgacccttagcaaggtcaacaacgtggatataatctcttacacctgttccgtcaggagtatcgtaatcgtcgccaaacacaccgagcttttcaagctttcctactgctacctgacagatgtaaggaagcagattgtttggtataccgttagggtcttcgccgataagaccgctcttatgtgcgccgatagggttgaagtatctcagaagtgaaactgaccaatcgttgtcggaaacataaacatctctcagtatctgctctatcattacctttgtatagccgtaagggtttgttgctgatgtaggcatatcctccgtatatggagctttgtttacagggccgtaaactgttgcggaagatgagaaaactatcttcttacagccgtattttctcattgccttgataagcatgagagtgcctgtgatgttgttgtggtaatattcaacaggcttctgaacagattcgccaaccgctttaagacctgcaaaatgtataacagcgtctatcttgttttcttcaaatatcttttcgagcgctgcaaggtcaagaagatctgcctcataaaaagcaaagtccttgcctgttatcttctttattctgttaagagcctccggctttgagtttgaaaagttatcaactataactacttcatagcctgcttcaagaagctcaacgcaggtgtggcttccgataaatcctgctccgcctgtaacgagtatttttgccatattctttacctcccaaatatgtcaggttttttcttacacttacattataccatattttcacgtttttgcaataccatttttgtttcaaacacatggatttttgttgcaaagagaataaaaatatgctatcatatctataacagaccatctcacagaaaggaacacacagaatgaacacagaccgtcattcctttaaatcagatcagacggacgcactttcactgtcagtatacaacgtgggctatgaaaaatgtcaggggcttcacagttggggaagcggcgttcgtgaccattatcttatccaccacatcataagtggcaagggcgtatacaaaacaccgcagggagagtatcaccttagcgcaggggacacttttctcatttacccctacactgttataacatacactgccgacaagaacgacccatgggaatactactgggcaggcttcaacggctctgacgctgaatttatccttgatcgtgcaggcttcacaagagagtgtcccgttatctccgcagactttggaagcgagcttaaagacagtcttgaacgcatttatcgtcttagtggaaacagaagctcagaccttgtgaaaatgacaggtcagctttacatcacgctaggcattcttatggaacgctcgggaagtcaaagccgttcggggagcaccgcaaagggatatgtcacaaaggcgaaaaactacattgcacacaactacacccttgggataggggtcgagaatgccaccgatttcgttggcgtgagccgtgccacgctatatcgagctttcatggaatacgaggggatttctcctgcacagtatataactgatttccgtgtgaatgccgcctgccgtttgctggaagaaactgagcttcctgtgtcagctgtggcaaggtcggtagggtataatgacagcctttatttttcaaggatattccacaagacaaagggtgtgtcacctacggaatacagggctgacgctttgtgtacaaaaggtgaaaacaaggcgttttcggttgacaagggtatataa

SEQ ID NO: 1090 - DNA, 14059 bp, unidentified
  source 1..14059: mol_type = unassigned DNA
atgaaagaagactggaaacccggaaccatgatttatccgctgcctgccgtattggtgagctgcggaagcactccggaggaatataacattctgactatcgcatggacggggacgatttgtacgaacccgcccatgtgctacatctccgtacgccccgaacgccactcctacgacatcatcaagcggaatatggaattcgtcatcaatctcaccacgaaagatatggcacgggccacggactggtgtggcgtacgctccggaaaggactacaacaaattcgaggaaatgcatctgacaccggggaaaagcaccgtagtcagcgcgcctcttatcgaggaatcaccgctttgcatagaatgccgggtaaaggagattatggctctcggttcgcacgacatgtttatagcggatgtggtaaatgtccgtgccgatacccgtaatctgaaccctgaaaccggcaaactggaactggcggaaacgaatcccttggtctatgtgcacggtggatattatgagctgggagaaaagataggcaaattcggatggtcagtagagaaaaagaagtaataatgcgataaaggttttaagagatggagttgcgacgaatcttgatgggcttatatctgttggccttccccgccatgatgtggggacagactccggttgtgcccggtactgccgacgaagagcattccggacaccgcaaggaaactccggtcaatttcggtttcaaaggcggtttcacctcttccttgttccttgtatcccagttcagcgtcaacggagtgcccattgacgaagtgcagaacaattacaaaataggatatttcggttcccttttcatgcggataaacttcgaccgccacttcctgcaaccggaaatatcctacaacatcaaccggtgcaacatcaccttcgagaaacctctgcccgaagacgccgcatcaggagcccggccggaggaagcctccattacatcgtccatccacagtatagacatccccgtcatctacggatacaacttcatcaaggaggggccgtacagccttgccgtctttggaggacccaaagtgcgctatatatgggacaggaaaagtgacatcgacttcgagaatttcgaccaggtgaatatccgtgaaaggctgcgtccgctcaatctcagtttcaccgtcggcgtatccgtcaccatctcacgcgtctttttcgacttccgttacgacatggggctgcacaacatctccaagagcgtgacatacgatattccggccgacaacaacgctgctgacgaaaacacgaaaaacgaaatccgttttcaccgcagggacaatgtgctgagtttttctttcggagtgttcttttgacagtaaatttcttccttttctttcaatttattcatttatttcccgtaaatttgtgcgcttaataagagaacacagatttatcaaacttatctaataagcagaatgaaaagagatgatttaattttcgaacttatcgaaaaagaacaccaacgtcagctcaaaggcattgaactgattgcatcagagaactttgtaagtgaccaggttatgcaggcaatgggctcctgcctcaccaacaagtatgctgaaggataccccggcaagcgttactatggtggttgtgaggtagtagaccagagtgagcagattgccatcgaccgcttgaaacagattttcggcgcagaatgggccaacgtacagccgcactccggtgcacaagccaatgcagccgtattcctcgccgtgctcaatccgggcgacaaattcatgggactgaaccttgcacacggcggtcacctctcccatggctcactggtcaacacttccggtattatctatactccctgcgaatacaatctgaaccaggaaaccggacgtgtggactatgaccagatggaagaagttgccctgcgcgagaaacccaaaatgattatcggcggcggttctgcttattcccgcgaatgggactataagcgcatgcgcgaaatcgcggacaagataggtgccatcctgatgattgacatggctcatcctgccgggctgattgcagccggtgaactggataaccccgtgaaatatgcccacatcgtgacctctactactcacaagactctgcgtggtcctcgtggtggcgttatcatgatgggtaaggacttccccaatccctggggcaagaaaactccgaagggagaaatcaagatgatgtcccagttgctggattcagccgtattccccggtatccaaggtggtccgctggaacatgtcatcgcagcaaaagccgttgccttcggcgaaatcctgcaaccggaatggaaagaatatgccaagcaggtgaagaaaaacgccgctgtcctggcacaagccttgatagaccgtggcttcaccatcgtttccggcggtacggacaaccactccatgctggtagacctgcgcagcaaatatcccgatttgaccggtaaggttgccgagaaggcgttggtatctgccgacatcaccgtaaacaagaacatggttccgtttgacagccgctcggctttccagacttccggtatccgtctgggtactcctgccatcacaacccgtggtgccaaggaagacctgatgctcgaaattgccgagatgattgaaaccgttctgtccaacgtagacaacgaacaagtcatcgcagaggtacgtgcacgcgtcaatgcgaagatgaaagaatacccgctgtttgcttattaataagcaaacagaattaaaaattaagaattaaaaattaaaggctgcgcaatgttcgctttgaactgcgcagcctttaatttttaattctaaacgcgctccgcgcgtttagctcagcccttctatatttccgtccacaatatcaatgtgttcggcttgtggtttcttgggtaatcccggcatacggagaatttcaccggcgatggctacaatcatttccgcaccgttattgaccacaatatccttgatgtggaactcaaagttgttgactgcaccgtatatcttcgggtcggcagagaaggagtactgcgtcttggcgatacagacggggtaatggctgatacccatctgctctatcagtttgataaccttgcgggagtggagactgtaagtcactacgcttgccccgtagaggttgcaggctaccttttctattttacgttccacgcaatcgctctcttcgtaggtgaaggtcagcggttcggatggtttgttctcgatagtatctactaccagattggcaaggtcaacggctccctctcctcctttggcaaaggcgttgttcacggcaaaacctacctcaagcttttcttcgcaatggcggcggatagcttccacctcctcgtccgtatcactggcaaaacggttgaatgccacgatgacctgctggccgaatgaacgcaaattgcgtacatgcttgtccagattgccgaagccctctttcagtccttccatattgggttccttgatgcggtccagactgacgccgccatgcatcttcaatccttgtgcggtagcaacgattatcgtcaacttgggctgtaggccgctcttgcggcacttgatgttgtaaaacttctccgcacccaggtcagccccgaaaccggcttccgtcactacataatcgccgaatgtcatggccatttttgtggcaagaatggagttgcaaccatgggcaatatttgcgaacggtcctccatgaacaaaagcagcagagccttcggtagtctgtaccaggttggggttgatagcatctttcaacagtacggtaatggcaccggctactcctaactccttcactgtgaaaggagtaccatcgaaacggaatcccagaataatattttcaatacggcgacggaggtcatcgaggtccgttgccagacagagaatagccataatttcggaagccggggtaatatcgaagcccgactcctcggtaatgccgttggtgctcggtcccaatccggtgacaatgctccgcaaggaacggtcattcacatcaagtacgcgccgccagatgatttctttcagtccgaagccgtccgcctgatgctggtacaagtaattgtcgagcaaagcggaaatcatgttgtgtgcggaggtaatggcgtgaaagtcgcccgtaaagtgcaggtttatcttctccatgggaagcacctgggcatatcctccgccggcagcaccgcctttcatgccgaagcaaggacctaacgagggttcgcgtaaagccacaatcgctttcttgccaatcttgttcagccccaatgccagcccgatggacacggttgttttaccgatacccgctttcgtagccgtgatagccgtcaccagtatcagattgctcttcttcactttctcttcatcaatcagatgcgtaggaatcttggctatgtaacggccatagttctctacttcgtcacgcgggatatccacactttcagccacctgctttatcttcttcagctctatgctgcgggctatttcaatgtccgatttcatacagagtcttttctttaaataacaactttaatgttttgaaagttgcaaaagtacgaaagatgtggcaaagtacaaaagaataccgtattttcacctgaccacctgcatcttctatctatttgaaccgcgacgtatccactgcctcccgttgcttctccttatatccaccgaatttataagtaaacgatacgccgaattcgcggaagcatgagtaatgattcgtcacattctgcgtcttgaaacggatgcggggagaaatctgtcccgtctcaaaaatatcgttgcagtagaggttgaggatggctttgttcttggcaaagccgtaacgcagggcaatattcacattgcccgacgtaggcaggtcgtagatgccctgaatggctttactatgcacaaatccggtcaccgtcagcttcaagtcgggcttggtggagagagtaaaagtattgttcatctgggcaatgccatagcattgctttctgtcgaaaggaatatcccagaaatcaccatccttttcgcggtgccacaagccgatgagggtaagacgagaattcaaccaattcttcaccttaaacggtatagaggcttgtatacctgcttgttgctgataatcaaaattgagtgtcttgtagatttcaaccagacgttcggaagattggtagagcgtctgtacggagtagtccttggtatggttgaaccaagcgctgaagatgtatttgctcttcaaaatataggtcattttaagctcatactcttgtgccggtttcagcaacggattaccatgcagctcagagtatccgccgccgatgtaagagacggcatcctgcaccgcccagtagtcgggatagtccttgtcgctgctcagagagagctgaaggatatgtcccggtgctggcatatagttcaagttgacgatgggataccagtcccactggttccagacgggagtcttgtaatgctccacagccagggaagcgtccaaagcgagtttgtcgccgaaactcttgctggaacctgcatagatattccaggtctgctcgcggcggcgggacttcatattgctcaaggcatccgatgaggtcagttgtccgccggtttcggggtcataataatattggtagctgttgtcgatgctggtagtatagatggctccgtaattcaaatcccaaccttttcccagactgtgctcctgggccagaaagaatttccagcggttgatgcgctgacagtcttccgtgtagaaatcgagttcctcatcctgcatacggctatgcagtagttggttggacggagagcggtagtaggtcagttcggcaccggctttgaggccgaaaggggtacgatagtccagacggccgttgtgcagccagtcggtgctattgctatgagttgtggacacctgcgtgcccgtcacgcccttccagttgtgggaggtggaatagccaccgttatagacgaaactcagctgatggttcttggcgatattatagtccgcccctaccctgaaattatgggtatggctgcggccacggcccacctcatctgttgtcatggggtgaaccgagccgtccgccagggtgtgcacagcctctttgtcggtagtagagtagccccggccatggctgtgcgagtaaagaaaatctgctgagaatttatttttgctgaagagcaggctggcgcgttcctcaaagccttcgttgtgcttctggcgatacttgacgtagagttcgccttgccaggagccggggccgcctgccgattgtttcaaggtgatattgataagtgcgccacgcacctggtagcgtgcaggggcgttgtacatcacttccgccttctctatgcggctggcagggatgctgcgcagcaaggcatagagctgccctgtgctgagggtggttactttgccgtccaggataacggtgactccctgacctgccaactgcagccctccattcatctcgatgacgccgggaagctctttcacggcatcgtaggcattgtctacggggaggttctggataaggcggggcaggtcgtacaccagcttgccttgcgctgccttaacgatggggcgttcaccggtaatcatcacttccggcaaggtctgataaagactgtccagacgggcatcggtcgtgataaggctgtcggcgctgaggatgcggttgtcgtccgcaccggaggtggttgcagtgccgttgttctcttgtgccgaaagactgatgctcaaagcacagcatacaatagggagtaaatagaatcgtttcatgttcttctttttatttatgtttatattcttcttctgcaaatcttcgtctgcaaagtacggcagaatcagcagaaacttgtgttatcagcggcttaccaagtgttatccagtgttatcgggagtgttatttagtcttatcggatgatagggttcacaatattaatcttacctttgtatgtataaaagtaaccggaaacaaacatgaaactgccattcaaatatattgccatacttgtcatcgtctccctggccggtatcttcgcctaccaagcctactggctgacggggctctaccataccatgcacagtgaaatggaaagggacatcaccgaagccatgcgcatgagcgactataacgaaatgatgatacgcgtggataaaatgaagcaggacgacataaaccacggtgaagtcagcgtatcagccggatacagcgatgacggaaaatcatttgtccgtagcagtaccaccatctcccgtgaagattctttggacaacaccaccctgcacgaaaccttcatgcccaaaggagacagtgtttacgtgacccacccgaacgattcaacccgcgtggaagtcagtgtcaaggactcggacagctctccccaatccgcattgagtgccaaagggggactggatgtgattttgcgcgaccaaaacagtatgctggaactcgccacctacttccagcgcggactgcattcgggactggacatcatttccgaccccgacgtagtgctttatgacagcctgctgacttcattcctgcatgaccgtaacatcaatcttccccataggctgctacatcttcacaaaggcagtaaatgggactctaccattctctatatagatacattggtaaacatcggtactcccggctatgtgcctacctcaaaagctgtggaatataattattctttcgacatcaatacaagtcaaagctaccgtctcatcatggaaccggtcggcatgctggttctgcggcagatgtcgggcattctcaccacgtcattcatcatcttgattgtactcgctttctccttctggttcttgatacgcaccatcttgaaacagaagacactggaagagatgaagagcgatttcaccaacaacatcacccacgaactgaagacccccatcgccgtagcctacgccgccaacgacgctctgctcaacttcaaccaagcggaggaaaaggcccagcgcgacaaatacctgcgtatctgccaggaacagcttcagcgcctcagtggactggttgaacagatactttccatgagtatggaacgccgcaggactttccgcctgcacccggaggagtttgcaatacgtgatattctggaaacgctcatcgaacaacacaagctgaaagcggaaagctccgtccacatatcggtggacatcgaaccggaagatttgagcgtacttgccgaccgtacgcatttcagcaacatcatcagcaacctgatagacaacgccatcaaatattcgcacggagaggccgaagtggccatccattgccgcaaggtaaccgtcgaagggcagaatgaacagactgaaatctccgtcagcgaccacggtatcggtattgctcccgagaagcagaagcacatcttcgacaaattctaccgcgtacccacgggtaatctgcacgatgtgaaaggctatgggctgggattgttctatgtgaagaccatgatagagaagcatggtggcagcgtatcggtaaagagtgagttgggaaaaggaagtacctttacgataaggatataataacattatttgttagggtactttacattacttgttaaggagctttacattacttgtaacaaaagcgacaattatggaaaagataaccgtacttctggttgaggacgaacagaccctcgccatgattatcaaggacacattggaagggcagaacttcatcatccacaccgcagcagacggtgaagagggattgcgcaagttcttcgacctccgtcccgacgtgctggtggcagacgtgatgatgccccgcatggacggctttgagatggtgcgccgcatccggcagaccgacaaacagaccccggtactgttccttaccgcccgctccgccatcaacgatgtagtggaagggtttgagctgggtgccaacgactacctgaaaaagcctttcggaatgcaggaactcattatccgcataaaggccctggtaggcaaagctttctcctttacagaagaaaatcccaaggaaactaccgtttttgaaatcggtgactaccgtttcaattccgtcactcaacgacttgcttttgcaggcagcaccccgacttcacctgacgcggatacggaagtggaactctcccaccgcgagtccgaaatactgaaacgcctttgcgagaaccgcaaccaggtggtcaacacccagaacgtattgctcgacctctggggagacgacagcttcttcaactcccgcagcctgcatgtgttcatcaccaaactgcggcataaactggccggagacgagcgcatccgtatcgtcaatgtgcggggaataggatataaactaatagtaaactaaactaaaactaaactactatttatgagaaagttattattcattacttttatctgttcctcactctgcgcctatgcacagagcgagattccggaagacacaataaagaaccggcctcccgtaaagaaagagcagattcccttttctccaaaagagaacaagcgtacgggccttgatgaaagccagccccaacaaagtctgcagggcaaacagcaggaagagataaatctccatctccctccctccgactatgtggagcccctgccctggacggacatgaagaagatacactttcagaaaaacatctttgaatgggacttccagcgtttcgccgatttcctgctctcgccggaagtcgtactgacgatgtacggcagccataacacctatcctgcaatgggctccatcatgcaggctggcgcaggagttacttattacagtcccgacggacattgggaattgagcggaggggtatatgccgcccattattccatctcccaaccttcatccattacaggtgcccagtatgccaaaagggatgccccccgaggtactcaatgggacataggctacaatgcctccgtatcctaccgcatcaatccctacatgcgcctgcatgccttcggccagtattcgggctacgggagaagcaactcctttcatggatatatgaacccgatgtatccgcaaagcggttatggcatggtactggaactgaaagtgacggactggctcgacctcaacggagggatggaacgaagatacgaccccactaaaatgaaatgggtaaattcgcccatcttcgcccctaccattcgtataaagaaatagaaataatacaaagatatttccggaaatagagggaaacgagtatctttgttcagtctgcccctatgcggcagacagcaactgaaattgtgaacaaagaacaatgaaacgaatcttcttctgcatcatcattttacttgcaggcatgtcatccgtcagcgcacagagcgagatgcctgccgatacggtacgtactgcagtacgtggcaaagcgtctcccgaaggcatgtctccgtctgaaaaggaacttctgccggacgtgaagaattacgacggcttcctgctggatatggggctgatgaatctgtccgcccccactcttcccaaattcactttggagataccggatgccagcaaagactatagccgcatcttccagttgaacccgaacgtgacttattcacaaggtctttcgaacatattctcactcagcaactcccggtatttcagttcgaatcccttcggactgacgggcttctggggctctaccgacaacctgcaaatgggaagtttcactttgaagaacggcatgcgcatccatacgtacggcgaatatgacaaggacggctggaaagtgcccaacccttccgcactgccttgggaaaagaacaatttcaaaggggcgttcgagctgaaatcagccaacggagcctttggcatacgcatcgaggtacagcagggcagacacgtgccctattgatgcccatcacttaacaacagaatcaatgacaagaaagaaaatactggtgataggcgccaacggttttaccggcagacgcatcctggatgatttgtcccgcaacttgtcttaccagacaacgggctgttccctgcacgacgacatttgtccccattcgggcaactatcgctttatccgcacggatatatgcaaccgccaggcggtggaaaagcttttccaggaagtacagccggatgttgtaatcaatacctccgccctctccgtccccgattattgcgaaacgcaccatgcagaagcggatgccgtcaacattactgccgtggagcatctggcagaatgctgtgaggcgggaggcagccgttttatccatctttccaccgacttcgttttcggtggtgatacggaccgaccctatacggaggaggatattcccgctcccgttaattattacggctacaccaaactggaaggtgagaaacgtattgctgccgtttgcagggattatgccatcgtgcgcgtagtggtggtgtacggtgccgccctgcccggacagcatggcaatgtgctccaactggtggcaaacagattaaggaacaatgaggaagtgttcgtcgtatccgaccaatggcgtacgcccaccttcgtgggagacgtgtcgcaaggagtggagaagctgataagtcatccgcaaaacggtatctatcatctctgtggcagcgagtgcctgaccattgcagacatcgcttatcgggtagcggacgtattggggctgaatcgctcgctcatccgtcccgtcactacgaaggagatgaacgaaaagacaccacgtccccgtttcagcgggctgagtatagaaaaggcaagccgggaactggggtatcagccgcgcacgctggaagaaggaataaagcagatgttcggatggtaaataatgcaggtgcggatggcagcagattcgactacagcaactccggctctgccagtcctttctctttgcgatacacacgtaccatctccagaatcacatctccatatttctccacccctttttttccgaaatacggaatgcgtacaagcatggccttatccgaaggaagcagattgctgatacctagaattgccttctgctgaatgacggtgtatacgggtagccctaatgcggaagcttctgcattgcgccatgctaccaagcggttgtaaagttccggatgcagcacatccgtgggtacttcaacagccgcagcatcgcgtttccgctcacgcggacgtttctctttatcagcctgcttactgcttccctgcccttctttggcagaagcacttctccctttgcctttacccttctgcgaagccgaatcatcaatggaaagcagtgctttctgcttcaagtatcctgccatatggaaaccattctccagcacataatccagcaaatcagtcttcatgtcaaacacttcctccagctcctccatggcatcccggagcttcttcttcaactctttattatcagaagttaccgtactcgccatcaccgcatccagcggttgcaactgctcttgaaaataagtggcggcagagtgtatgcgcccctgcaaagtcgggtcggctgcatagtcctgcgcagtatcaatcaggcgggtatactggatactgaacttctgggctactttcgtcactttgtcgtgaaaacgttccatttcctccttacaggctgcgagttgcttgggaaagagcttgtacaagtgttcgtctatcagccgcacataccgccgcaaagcctgctccatgggctggaaatcgaacaagcccgacagcagttccaggaaataggtctgctgcaaggaacggaagcgtttctcgtccggctcgtttctccgtgcctccatcgtgaaggtatctactgcatggtcactgataacggcctttgcagaaagcggggcactgagcaccactccctccaatgtcttgcagcggctcagagccacataggtctgcccatgcgcaaaggaggcactggcatcaatcacggcacgttcaaacgtcagtccctggcttttgtgaatggtaatcgcccacgccagcttcagcggatattgccggaatgttccttcaatatcttctgtaatctccttggtttcctcatcaagcacgtatttggcattcgtccactcttcctcctgaagtaagaaggtagcgtcgcttcccttactgcgcacttcaattccatctgccgacacggctgtcacctctccaatcatgccattgtagtaacggtgctcaccggaggtgtcgttcttcacaaacattacctgggcaccgcgtttcagttccagtacttcatccgtgggataggaatattcgggaaactttccgtcaatcttggcacgaaaggcatacgagcgtcccggaagttgttccagctcatggtcattaatccgttgggcctgataattgtgggtcaccaggcggatgtatccttcttctttatctggtacgaaattgggaatataccggcggttcaaggcttccagcacttgcccgtcacaacggttttcgcgaatgcggttcagtagttcaagaaaagtcccatcgttctgccgatagactttctttagttctatggtgcaatattccgtctgcttcaaggcctggctggagaagaaataaggcgtgtcatagtatttgcgcagcatctgccactcatcgtctttcactacgggagacagctgctgtaagtcgccaatcatcagcagttgcacgccgccaaagggtttgttccggtcgcggaaccgcctcaagacggcatccaccgaatcgagcaagtcggcacggaccatactgatttcatcgatgaccaataaatctatgctgcgtataatgttgattttctctttcccgtaacgaaaacggtaggttgccttgccatctgcgctgaatgagctttcgggcacataaggagcaaaaggtacttggaaaaaggagtggatggtgacaccgcctgcattgatagcggcaattcccgtcggtgcaagtacaatcatccgtttcggactctccaccctcagttttcgcaggaaagttgtcttaccggtacctgccttgccggtcaaaaaaagatgagtgcctgtgttttcaatgaattgccatgcaagcgctatttcgggattattctccat

SEQ ID NO: 1091 - DNA, 70190 bp, unidentified
  source 1..70190: mol_type = unassigned DNA
agatatagatacacttgagagagcggagataatacgtgacctgcgtcttgacgtatttgacgtgctcgtcggcatcaatctgctcagggagggccttgatatcccggagattacacttgttgccatactcgatgcggataaggaaggcttccttcgctcagagacttcacttatacagacgataggacgtgccgcacgtaacagtgagggccatgttatcatgtacgctgacaagattacagactccatgcgtgtcgcaattgacgagacaaagcgtcgtagaaaggtacaggaagagtacaatgaggctcacggcatcacgccacagactatacagaaatccgtgcgtgatctcatagctatctcaaagaaggtagcggccgatgagaatgctcttgacaaagatccggagtcaatgagcaaaaaagagcttgagaagcatattgcagatatagagaaaaagatgaaaaaagcggcggcagagctcaatttcgaggcggctgctgagtacagggataagcttattatgcttaaaaacacattgagagacgtaaaataaaagcttataacatcctgaagcaatttggaggaacacaaattatggcaaaaaaagaaagaaaatacatcaaaatacgaggtgccagcgaacacaatctaaagtgcgtcagtctagacatcccgagagatgagtttgttgtttttacagggctttcaggctccggcaagtcatcactggcatttgataccatatatgctgaggggcagcgcaggtacatggagtcactttcatcgtatgcgcgtcagtttttaggacagatggaaaagccgaatgtggagtctatagagggacttccgcctgccatttccattgaccagaaatccaccaacaagaacccacgttcaactgtcggaacggtcacagagatatatgattacttcagactgctttatgccagaattggaataccacactgtccgaagtgcgggcgtgccattacaaagcagacgatagaccagatggtggatactgttatggcgctgcctgagcgcacacgtatccagcttcttgcaccggtggtcagaggccgcaagggtgagcaccagaagctgttcgagagagccaaaaagagcggatatgtgcgtgtgattgtagatggcagcatgtatgagctctccgaggatattccaatggagaaaaatataaagcacaatattgacattgttgtagaccgtctggttgtaaagccgggcatagagaagaggcttactgattcacttgaaaatgtatttgaactgacagagggcaatgcaatagttgatattgtggatggcgaacagatgactttttcccagaattttgcgtgccctgactgtggcataagcatagatgaggttgagccgagaagcttctccttcaacaatccgttcggagcatgtccgacctgctacggactcggctacaagatggagtttgacccgcagcttatggtgccggatgcatcgctttccatatctgagggtgccatacaggtgatggggtggcagtcatgtacagacccaaagagctatacctatgcgacacttcgtgcgctgcatgagggctatgggcttcctctcgacacaccgattgatgatttatctgcagatatgaaaaaactgcttttttacggtggagacggcagagtgctcaaggtcagatacaagggtcagagaggcgaaggcgtctatgaccttgtatggaacggccttgtggacaatgttgagcgccgatacaaggagaccttttctgatacggcaaaggcagagtatgagcagtttatgcgcattactccgtgtacgagctgtaaggggcagagacttaagccgtcgtcacttgccgttacggttgcggacaagaacatatatgagatgacctccatgtctgtgaaggagcttgtgaagttccttgctgatatagagcttacagagcagcaacactatataggagaccagatactaaaggaaatccgtgcgagagttggctttttgcagcaggtcggccttgattacctcacccttacccgcggcacggcaagtctttcaggcggggaagcccagcgaatcaggcttgccacgcagataggctcaggacttgtaggtgtggcatatatacttgatgagccaagtatcggactgcatcagagggataacgacaagctgcttggcgcacttatgaatcttaagaatctgggaaatacgctcatagtggtggagcatgatgaggataccatgcgcgcagcggattatatcgtggatgtagggccgggagcaggctcgcacggcggggagatagtggcagcaggctcgttaaaggacattataaagtgcaaaaaatcactcacaggagcatatttgagtggtaaaataaagataccggtgccacaggagaggcgcaagccaagcggatatatcacgataagaggagccagggagaataacctgaaaaatattgatgtgcagatacctcttggtatcatgacctgtgttacaggcgtgtcgggctcgggaaagagctcattgaccaatgagatactctacaagcatctggccaaatccttaaacagagccaggtgtatcgcaggtgaccatgacggtatagatggtcttgaacagcttgacaaggtcatagacatcgaccagtcaccgataggccgtacaccccgctctaatcctgccacatatacaggtgtgtttgacatgataagagacctgtttgcatcaacacccgatgccaaggcaaagggctataaaaagggccgtttcagtttcaatgtaaagggcggtcggtgtgaggcctgcggcggcgatggaatccttaagatagagatgcatttcctgcctgatgtatatgtgccgtgtgaggtctgtggaggcaaacgatataacagggagacactcgatgtaaagtacaagggcaagagcatatacgatgttcttgatatgacagtggaggaggcacttgagtttttcaaaaatgtgccaaagatccagaacaaaatccagtcgctctatgatgtcggactatcctacgtgaagctgggacagccgtccacagagctttcgggtggtgaggcacagcgtatcaagcttgccacagagcttagcagaaagagcaccggaaagaccatatatatacttgatgagcctactacggggctgcactttgcagatgtacacaagcttgtggagatactgcgcaggctctcggacggaggcaatactgtagttgttatcgagcacaacctcgacgtgataaagacagctgactatatcatagatatgggacctgagggcggagacggcggcggaaccgtcatagcgcagggcacacctgaggagatatgcgaggtaaaacagtcatatacaggccggtttttgaaaccatatctggaaaaagacaaggataaactttaaaattttattaaatatgacctttttcaaaaaaaaagtttgaaaaatgggatttattgtatataataagagagtgtatgtgtaaatttaaagatatggcaggaaaggggctattaaaatggtcggatcagatatcggaatcgatttaggaacagcaagtatacttgtttatataaaaggaaagggtgttgtgttaaaggagccttcagtagtagcctttgacagggacaccaacaagattaaggcaatcggagaggaagcacgcctcatgctcggaaggacaccgggtaatatcgttgcagtcagaccgctgcgtcagggtgttatctcagattatacagttacagagaagatgatcaagcacttcatccagaaggcgcttggtaagaaaagcttcagaaagccgctcgtgagcgtatgtgtgccaagtggtgttacagaggttgagaagaaggccgttgaggatgctacatttgcagcaggagccagagatgttaagattatcgaggagccaatcgcagctgcaatcggtgcaggtattgatatttcaaagccatgcggaaatatgatagtagatatcggaggcggtacatcagatatagcagttatctcactcggtggttcggtagtcagcacatctatcaagatagccggagatgattttgatgaggcaattgtcagatacatgagaaagaagcataaccttctcatcggagagagaacagctgaggatatcaaaatcaagattggtacatgctaccctctcccacagccggagacaattgaggtaagaggaagaaaccttgtaacaggacttccaaggactattacagtcagctcagaggagacagaggaagcacttcgtgaggcaactcttcagatagttgaggcagtgcactcagtgcttgaaaagactccaccggagcttgcagccgatgtcgcagacagaggaatcgtgcttacaggaggcggttcgctgctcagaggtcttgaggagcttatcgaggaaaagaccggcatcaatacaatgactgcagagcagcctatgacatgtgttgctatcggtacaggaaagtatgtagagttccttgcaggcaagagagatgaagaattctagaatatacgttttataacaggcagccgtgagggcgatgatatgtccctgcattgcaggaatgtattgtcgcttttttgttaatattgttacaaatggggatattacagtcagggggattagtgaacaaaataaaggatattgggagaggcgtaatcaatctggtatttccaccgcgctgtccggtatgtgatggtataattggtccggttgagagatatatacacagcagatgctgtgaaaagctctttccggttgagcagccgcagtgtatgcgctgcgggaagccggttttgtctgagcgaagagagtattgtgacgactgtgcacgggcactagagcatcacaggcagatgcgggaagatgacagctacaggcagggcaaggcgctttttgcatacaagggcagcataaagcagaccatgtacaggttcaagtattcaaacagacgtgagtatgcggcttattttgcacagacagcagtggaaagatattcggactggatactaagatgtgggatagatgttattattccggtgccgatgcaccgtaaaaaaatgcgccagagaggctacaatcaggcagagtgttttgcaaaggcattgtctgaaaaaacaggcataaggatggtaaaagggcttgtgcgcagagtgaaaaataccagtccactcaagacaatggggtatgttgaacgcagaaattgtctagagggggcttttcaagtggcggatagtattgtacaatatgaccaaatactaatagtagatgatatatatactacaggcagtacggcggagtcgattgggcacgagatagcaaagaaatgtcccggccgtgtatatgtgctgtgtatttgcataggacagggaagttaggagggttttatcagatgagaatatctaattgcaagggctgtggcagaatatttaatgtactgtcagatgagcagtactgcccgaactgccagaaaaaaatggatgagaaatttgatatagtaaagagatttgttgaggataatccaaatgtgccggttgagacagtggccaaggagacggatacatccatgaagcagataaataggtggatacgtgaggaaaggctttcgttttcaccggattcatcatatggtataccatgcgagaactgtggcaggatgatacgtacaggtagattttgtgatgagtgcaagactaagctcacaaacacactacgcagtgcccttgacacaccaaagagccaggataggcagctgtggcagcaggatgacaaaaaccgtatgagatatatcaagtaacaggtaagaggatgatttatgataaacgaagaaaaagtaagggaactgtttaatattgctctatgtgacagcaaaagcgatgacagccgtgtgcagaagcagtccgcaagctattacggatgggactatatatggaaagagggcttaaaaagcttctttacaggtacattcgcatttgcagggcttgttgtgatgtgggttgctgtcaatgcagcagagcttttggacagaatcaataagcttgattttaaggcaatgggtgtcacaataggcatactgtatattgcatttatggcggtttacatttttgtcacaattgtggtgtatactgcaagatataaggccggcagaagagaagtgcgcaaatacgcaaatcacctgaaggcagtgggcagaatatattcccgtgaggaaaagattaagcgttagggaggctttatgaacaagttactggaaattaaggataaggcagtcaaattttgcggtgagtatgagcactttatacttccggttgtgagatttgccgttgcatttatcgcatttataacaatagatttgaatatcggctatatggcgaaaataagctcgatgcttgtggcactgcttttagcgcttgtgtgtgcactgcttccggtgaatgcaatactctggattgcttcgattatgatacttttagatatgtatgcgctgtccatagaggtttttgctatcacatttgtactttttttagtactgtattttgtctattttcgttttgcaccgaaggatggcatgcttgtgatactcacacctatatgctttcagcttcacataccatctgttatgccggttgcagcaggtcttttaagaagagcttattcggttgttgcaataatatgtggcacactgttgtactatttccttgacggaatcagacagaatgcatcagcgcttgcagaggtggtagataaaaaggggcagagcactacaaagctcaatgtgacaatgggacagcttcttgacaacaaagagatgtttatagttatggcaatctttgttatcaccacactggtggtgtatcaggtcagacgattgaaaatcaacaattcatggactgttgctaccatagcaggaggactcgtacagttggttgcacttgttgttgcttatctggtgctcggactgccggagaagataatctggcttgtgctcagcactgtagcagctatttttgcaggtgttgtcatacagtttatatttatgaatcttgactatgcacgtacagaaaatgtacagtttgaggatgatgaatattattattacgtcaaggcagttccaaagaagatgattgccaaggaggaaaaggttgtaaagcactttggcaatacaggaagccttggaaagaagattcagagacataatcaggaaaatatcagcaaagaggctattgcaaaagatctcgaaatagacgaaaatatatttgaggatgacaaatagttacatagtataagagaaaggagggcgctatggataatgtgagtggtgtattgatacgcttcaaggatcagttccttacattcacaaatgtgccgggcatcaaaatcggtgtgatagacattatagagatacttattatttcagtgctcttctatcatatacttttgtggataaagaccacgagggcatggaatctgttcaagggccttattatcatactgttgtttgtgcttgttgcagcattgttccagatggatacaatactgtggcttgctgagaaactctttaatataggtctcgtggcacttgttgttatttttcagcctgagcttcgaaatgccttggagaatattggtggaaagacctttttgggtgatttttttaataccggcagaggcgaaattgagaaattctccgacaagacaattgatgagctggtgcgtgcatgctttgcgatgggcagagtaaagacaggagcgctaatagtcatggaggatgagataaatctgggagagtatatcagaacaggaatagatgtggatgctatacttacaagtcagctcctcatcaatatttttgagaaaaacacaccgcttcatgacggagcggttatcgtgcgtggcaaccgtgtggtgtcagctacatgttaccttccgctatcagacagcctgtcactctcgaaggatttgggaaccagacaccgtgcagcggtcggagtcagcgaggtaagtgattcgcttactatcatagtttcagaggagacaggatcagtttctacagcatacaaggggcagattgagcacgatatagatgccgatcatctacgcacacagcttaagcttctgcagaacagacatagggagccgggtaaatttgaattaattaaaaggaggtttaagaatgggaaagaagcttctaaaaaccttcacaaataatataggctttaaaatacttgcgatagcatttgcatttatactctggcttgtggtctacaatctcaatgacccggtcaagacaaagacatttaccacaacagtcaccgtcacaggccgtgattcggttgttgacaaggggctatggcctaccatcaaggattcggaaaagaccatcagcttttcggtatcaggcaagagaagctatctgaacgagcttgatgattctgatttttacgcaaatgtcgaccttgcaaatatcatagtagataaggatgatacgaataaggcaagcgtaaaggtagatattggatgcaccaagtacagacattcgattaccttcaacggtggagaccatatgctcccgctttcggttgaaaaatatatgcagaagcagtttgaggtaaaggtatcattggatggaagtctctcaggtgcgaaagcactgggaaacaagccacaggcaaatccaaaggtagtaaagatcggaggtcctgagtccattgtttcaactatagcatcggccaatgtaaatataaaggtcgatgacaataccataatatcagataatcagataactgatcgcggtgatctcactctgattgatgataatggcgatgagatagatatatcaaagcttgatgtggacagccagtatcagtctatagcagtgacagttgatgtcctaagtaccaaggaggtgcctatcaagtgtactacgacaggctcaccggcaggaggaaagagcgtgctcggagtagaactatcagaggagtctgtaatgctcaaaggtaatgcagaagcattgaacaatatcacatctatagatgtgggaccaattgatatatcgggcgcaacagacgatataagtacatctgttgacctgacaggatatctgccggatggagtttttatagtgaactcatccaaggcaaagctcagtatagatataaagattgaaacaaatgcgacttcaaccatgacgctgaacagttccaatatcacatatgacggactggaagagggatatacgcttacatttgtaacagataagagcagtgtcatagtaagcggcacccagtctgatatagatacactttcgggaactacactgaagggtaaaattgatgtgacaggccttggtacaggtacacatacagtgacggtaaagccaaatctggatgagaccaagtacacatggggcgagataaaggttcagatagttatcggaagggaaggtgacggaggcggcacaacgggaactgatggtacaggaacagcctcgggctcaacaacaggcggtacaacatcaggcgacaccggcacaggcggttcatcgtcatcgggcagcacatcgtcaggaaacaccggaaataacggctctgacagttcatcacattgatagatatataaccgaaaagaggtaataaaagtggtagcacaaaaaataataatcaagaatcctaccggattacatttacgtccggccggcaatctctgcaaagaggcaatgaaatttaaatcaaaggtaacatttatatatgacgagaaaaatgtagctaatgcaaagagtgtactttcagtgcttggagcatgcataaagtcaggcgatgagatagagcttatctgcaatggcgaggatgagagtgaggcgcttgaacatcttatacagtacatcaaggatggactcggagagtagtacacaaggaaaatggtatacatggagaaacatatatggagaagcttttaaccatagtcgttccggcttacaatgttgaaaagtatataaagaactgtcttgactcgtttatagatttgtctgtgctcagaagtctggagatactcatagtggatgatggttccacagattccacagccagcctggcacatacctacgagcagaaatatccatacagcttcaaggtgctctccaaggagaacggaggccatggatctaccatcaactatgcgataccgcgcgcaacaggaaagtatttcaaggtggtggatggtgatgactggctggacaagagccttttgccacaatttgtacagcttttgaagcacacgcactcggatgtcatatccaatgacttcaacctggtggatgataggacaaagaaggtcacaaaacgcagaaaggcagtgtccaactcttatcactacaacagggagtggggctttgcggaggccgtcatggacccgctgatcactatacattccatgaccatccgtactgatgtattgcagaagaatgatattcgtatggatgagcactgtttctacgaggaccaggagtatatactctaccctataccatactgcacaagcatcacgttttcgcccctgccgctgtatcagtacagacttggaaggagtggccagagcgtggacataaagatgatgatcaagcgtcatgaccagcaccttaaggtgcttgatgcactgtttgagtacaacaacgtgcatggcaatctgcagacctacaagaagcagtaccttgagcgcggcatagccgaggcagtcgatgatgagtaccagatatttcttgcaaagggcaatgatacaaggaacgttgagcatatgaagaagtttgacgagatgctgcgtgaggagcacccgggagtgtaccgggcgtgcagcaggaagagcgtctggatgcttagaaaaacaggttttaagatatttccgatggcagcatgggtctatagcagactgcgtggtaattaatttcatgaataggcgttaatgagtatgcaatactctttttaataatagtaatcaggacggatagaacagttaatgagtaaaatattatcaatcataataccaacatataatgcagaaaagtttctgaataaggggctgtcgtcatttctggtatgcagggatacagatgcacagacagcacagcacaactgtaaaatggcaacggagggccgctttgaggaaatagatattgacaaggctatactcgataagcttgaggtgatagtcgtaaatgacggcacacctgacaaaagtgttgaagtggcacagaaatttgtggactggtatccggatacttttgtcatagtaaataaaacaaatggtggacacggttctgcaatcaacacaggcgtggagcatgtgagaggaaagtatttaaaggtggtcgatgcagatgactgggtagatacgcttgcgctaaagcacctggttgaatatctcgagcatgtagattcggatgcggtgatacaaagcttcaggtattatgacatatcaaaggatgagtacagaccggcagatgtgagtgtgcctgattttacaggagagtacaatttaaaggatatagtaaatatgtgggatgatgtatatgatggtctatcatttcacggagtgatatataacacagggttctataaagcacttggatataagcttacagagcatgtattttacgaagaccaggagtatgcaactgttccgttttcgtatgcaaaaactgtcagatttattcaggaagagttgtatgtatacagagttggagatgtaaatcaaagtgtttcagcagcaagtcaggtgaagcgtcttccggatttggagcaggttatatttaatgtacttgaggcagagaagagctttgcaaaaatgccacagggtggaaaggaacactttatcagaaagacgtcgggcataatcacaagctattatcaaatagctttgataaaaaataccgacagacaatccggcagagcgatagtagagcagtttaacatgaagcttgctcaaaaaagtgcacttatgtatgaggcagtacagcgtaaatataaagtattttggctgtttaataagctgcatgtgagcaacagcttttacgagaatcaatttgcaaagctgcttgagtttgccaaaagggttggcagagcagacagactatacagaaaataatactgactaccattgtcaaatatggtgacagacagcgatataagtggaaattaacatatagaaacaggaattagataggatatggaaacagaaaataaaaagatactatcaataataataccgacatataatgcggcaaagtttttggataaagggttatcatcatttattattgatgataactctcttttaaatatgctggacattattgttgtgaatgacggctctaccgataatagtgtggagattgcacaaaaatatgtaaataaatatcctgacgtgtaccggatactgaataaagaaaatggtggtcatggctcggcaattaatgaaggagtaaaaataataaaaggaagctattttaaggtagtagacgctgatgactgggtaaacactgatgtgttgaaagaaactatttgttatcttaaagataatgaaaataaacatgagaatttcgcagatgcagtgctgatgagctatagatcatatgtgctgcagagagaaaatactgatgagtatccatacgacgataaatatataacaaaaaatggtggaccatataatgcaggatatgtggacgagcatctgtatgatttctggtgggggctgagtctgcatggggtgatatataatacgcagttttatagaaatacaggactgacactctctgagggggtattttacgaggatcaggagttttcaataatcccaatggcatatgcagaaagtatctatgcatatgataaggcactttatgagtatagagtcggtgacgtaaatcagagcgtttcgatagaaagctcactgaagaggcttgaccattatgagaaggttatcatgaaattgattgaggcaggccgggatgcggagcactttagtataggcggaaagcagctgtggtttgataaaacaagcaaatttatcaacgattatttgcagctttgcctgattagaaacactgataaaaaacagcttagaaaaaggatgaagctgtttgtcagtcaaatcgaaaaaaagaatacagatatgtataaatgtgtaaataagaattataaagtattttgtatgttgaataaaatgcatatgagcgataaggtttatcagaactattttatacgcctgttacatattgtgcgtcattagcaagctttttgttatcataatgatgaataatatgtttaaataatcggaaaatatgtgacaaatctcacttgaggcatatataagaaagtgataaaatatggtgctgtgagaataatataaaaattaagataaagaggacaaagaggacaaagatgaagaagaaaaatataaaactcctggtagttttggcctgtgtgcttatggcgttgggaatgtcaggctgtggaaagaaagcatataagacattccctgaaaagtacaagcttgcatcagttgatgtaggtggaatgactgctgacgaggcaaagaaagccataaagactgcagtaggcaagtataagatatcagtgaagcttgacgatgcatcatttgatatgacagcagaggatttagggcttaagtataatgacaaagcaaatcttcaggaactgataaatgcggccaataaggataaggagccggaaaagcaggtgaagctttttaaaatggataagtctgatgagctggagactgctcttgtagactcttatatcactgcaaaaacacagtcacagtctgatgcaacggcacagagtgatacggatgcagaggcaaaggatgacgaacaaaagacgactgagacagatacacagacctttgatatgaggtcaattttgccatatcgtgctacaatagcatacaatgcagaggcaggacagtttgagggtgttgatggtgtatcaggagatgcgcctgtgtatgacaatgcagctacaaatcttacaagtgctgtaaaggaactgaaggataaggtggagcttacatccacaacaggatatgttgatggagaaaaggctgcagacagcgagcaggtaaagaatgccttaaaagaagccaatgcatatcttgatgtgacggtgacatgtaatttcacaccggcaacaggtgaagctgctacagaggctgtaggaaaggatcagatagcccagtggcttatagtggacaatgacggattgtcagtttcgcttgatggcgagaatatggctacatattgtacagagctagccaaaaagcatgatgtgtcaaagaagaaaacaggacagtttaagacaacaggcggaagtataataaatgtgcctgtagcatcatcaggacagactgtagatggaaacaagctgtatgaggcgattgctgaggcaataaacaataaaaagtctgcaacagtggaagcagtttacagtgaggcaaaggaagaagaaacaggtgaatatgtcacatatggtggcaattactgtgaagtggatcttaccaaccagatggtatatgtatacaagaatggagagcttgttgtatcaagtcagtgtgttacaggatgtatttcaaaaggacacggaacacctaccggagtgtattctattttctcaagagataaggatagatacttaaggggagacggatataagtcatgggttaatttctttataccattcaatggtggaattggcttccatgatgcttcgtggagaagtactttcggtggaaatatctacctgtacagcggcagccatggctgcataaatatgccttattcagctgcaaagaagctatatgagaatgtaacattagatgaaaaagtaattgtatatggtggtgttgacaaggtgaccggcaaagcacagagtcttggcggagctgactcttataatgtgacagagggcgacggagcattcaatctcggtgtgacagcagaggataatgcaaagctcacatactcaagtgataataatggtgtagtgagagtggatgagaacggtaatgtgacgatagcaggtgtcggaactgcaacaatcactgtcaagtctgaggctactacaagctataaggccggcagcaagacaattacaatcactgtaaatgcaaagccacagccaaaccagacaccatctgtgacaataggttgcggtaataaaactgtaacagagggagatgcaccattttctctcggagcaagtgcttcaaacggagcagcgctttcttaccagtcaagtgatccttcgattgcgtcagtagatggcgccggaaatgtgaccatttacagggctggtagcgtacagattacagctatagcaggtgaaatggcaggctggaatagcgcaagcagttcaataaccgttacagtaaattcaaaaccacaaccacagccggtggcaccgactgaaccatcagaacagccacagcagaactagaacagcaacaatagaacaggaacaaataaaatatagcaaatgaaaatacaacaaagaaaagtgccggaaacggcacttttctattatattgcataattatttacaaaatatgacatattcttaatattttttttgtgacttctaaaaatagacaaaagaaatgaagtgtagtaatataacataggattaaactgaaaaataatgttacaatttgtaaagggtaggaaaatggaaaacaacgaaccaataagagatcaggaaattgaaatcgatttagtagcgctgtttcacgaattagtgaagcactggaaggcacttgtggcatcaatggtgcttcttgcagcagtatttggattatactccaagattacttttgtaccggagtatgaggcatctgcagagatgtatgtactgaccaagtcaacatctatcaccagtcttgctgatattcaggtaggctcgagtctgacaaacgactatgagtacgttatcacaggcaggacagttttatcacaggtaatcgacaatctggatatggacgagacatacgagcagcttagcaagagggtttcaatagagaatccgacagatacacgtgtgctcaagattgtagttacagacactgatttggaagcttcaaagacagtggcagatgagattgcaaaggtttcatcacagtatatcgctgacaatatggatcagtcacagccaaagattatccagacagcatatgcttcaaagacaccggtgaataataatatccttaagaatacagttataggagctgtactcggactgtttcttgctaccggcatagttgtacttggatacatgcttgacgatacaatttccaatgcagatgatatggagaccagaacaggcctcaaggtgcttgcatcacttcctgttgatgagacagagtatgatggagccaagacaaagagaagaaaaaagaagaaaactcaatcatctaaatcagacgatagcaagagtaagaagagggcagtttaatggaaacaatagttattaatcagataaaagaccagagctatacaatgaaggagtctcttcgagctcttaaaacaagcatcagtttcagtggaaagggcgtgaagtccatcctcgttaccagcagcgtgccaaatgaaggaaagacaaccgtagttatggatctggctcgttcgatggcggactctaagaagtcagtccttgtagtagataccgatatgcgtaagtcagtccttgtaggacgactcagagcgaaagtggagagcggtggaaagatatacggactctcacattatctctcaggtcaggtatctttggacaaagtagtatatgcgacaaacatcaaaggagtgtttattctctttgcaggacatgaggtaccaaatcctacagagcttcttgagacagaggagtttaaagagcttatcgagtttggagagaagaactttgactatgtgcttgtcgatactcctcctacaggagctgcgattgatgcggccgtagttggaaagaatgtagacggagcagtaatagttgctgcccagaatattacaagcagccgtgcaatcatcaatacaaagcgtacacttgaggactcaggagtcaagattcttggagctgtgctcaataagtgcaggtttgaggagtctaagtatggtcattactatggaaactattatggtaattactatggtaattactatggcagggacgatgacgaaaagtagcaggcgcagacacatatgaatgacggagaataagtgcagatgaaaaaaaagaaaaatataattattacggcagtaatgattgtacttattgctattatagcgataatacttgtaaaggttaacagcagtaatgttaagaataaagaagttaaaggcataaagccgggtacagaggcagttaagacaaaagccgatactcagactgaggatgacagcactacagacaaatcaggtattgaggagtttgcgttatttggtgttgacagccgttcagatcagcttgataaaggaacacgttccgattccattatggtagtcagggttgatcatgatgctaagaaaatccgcatggtatctattttcagagattgtatgatgaatattgatggtcatggataccagaaggtgacacatgcacatgcgtttggcggaccggagcttgcagtggatacacttaacaaaaatctggacttagacataaagaattatgttacagtcaatttcaatacagtcggtgaaattatagatgaggtaggaggcattgtacaggatattgatgcatctgaggcaaaggtgataaacggatatattgatgaggtcaataaggttcgtggaacaagctcatcccatattgattcagccggcacatatacacttgatggaactcaggcagttgcgtattccagaatacgttatacagccggaggagactataagcgtgctgaaagacagagaacagtgctgtttaaggtttttgaatcagctaagcagatgaatacagcggcaaagattaagatggtatcagacctgattggacatgtcaatactaactataatactgatgagattctttcagtatttaaaaatcttgcagactatacagtagaggattctacagcatatccacaggtgttctatggtggaaaggttgatggtgcatgggttgaggtgcctactacacttgcagacatggctacaggagtgcatcagttccttgaaggtgatacaggctatactcctagtgcaactgtaaacgaatacagcagtgcattatcaggaaaagcaagcggacctaataacgatttaacaaatacaaattttggggattaaatatgaacttcagacaaaatggagataagtacctcatcacaatagaagtaattgcactgatagttgtgctggtatttggagcagtgcattttgtgatgccggggaataatgcgaataagaaaataacagaaagccagcaggagacacagcatcctactcaggagacggatggaactcagcaggtacaagctgatggacagcaggcagcaccggcatttactccgtcagattctgtcaagacaaagctgtcttctatgacaacagaggaaaaggtagcccagctattcattacgagacctgaggagattacaggtgtatcacagttcactcaggccggtaacaagacaaaggcagctattggtacatatcctcttggtggttttgttttcagacaggagaatttctcaggtgaggctgcagttacaaagatgatgagcagtctgcagtcattttcgcaggagcgactgggcgtgaatctgtttcttgcaattgatgaagaaggtggagaaagacttcctcttgcttcagctaatggatatgaggcacagcaggcaccatcacagcttggagatgctgacgcagcgggcagcagtgcaggaaagataggctcatatatggctaccaatggccttaatatgaattttgggccgacagcggatatagcatatggtgataatgcagataacgatacatatgcatttggcagcgagtcagcgactgtaggtgactgtgttgcagcacaggtaagcagctataatggtgcaggaatcaattctgtagcaaagagctttcccggaaaaggaaaggctactacagattcagcgacaggaatgctctggatgacagataagctggaggatcttgaggcatcggattttgtgccatatcagaaggcaattgaagcaggtgttccggcagtcatgatgggaaatgtgatttgccagagtgtgacaggagaggaaaccacgccatgctctacatcagcaggtgccgtaaactatatgagaactaccatgggctttaatggccttttgattacagatgatttatcagacgcatctcttaataaggtatgtacacaggatgaggcggctgtggcagctgttaaggcaggaatgagcatgctttatgtttcaacgggctttgagagcagttataatgcagtgttgtctgcagttaacagtggcgagataccggcagaaaaattagatgatgcagttggaagaattctaacaacaaaaggaatttaatatatgcaaataaaagtaaatccgttatactatagagtatagcggatttttgttatatattttgtatatttaaaggagaattgttgatatgtcaaattgtttcaatccggcaaatattcttttgccaaacgatggtatagatatgaaaaaatggtcagttatcgcctgtgaccagttcacaagtcaggcagattattgggatacggtggaaaagtatgtggctgatgcaccgtcaacgcttaatgtggtgtttcccgaaatatatctgggaacaattgagaatcaggagaatgattgcaattcgtcaggggatagtgtcaaaaatgacaaagaaaccggtaggaaaacaaaatatgcttcaatgactgatgatgagagaatcaaatatattaataccactatggatacatatctcacagatggaaccttaaagcaagcggtggcagatggctatgtgcttgttgagcgtactacggagtcaggggtgcgtcttggaatagtaggacttattgatctggatgactatgatttcgacccgaaaaagaagactctcataagagcaacagagggaacagtaatctcacgtatacctccgagagtcaaaataagagagaatgcagctattgagctgccacatgttatgctgcttgttgatgatcctatagacaggcaaaagattgatggatgccagggtgctacacaggaagatgcagtaaatatagcagctgtaaagcatggaataatcgagcatgtttatgccatcagggatactcttcgtaagctttacgatacagagctcatgcagggaggcggacatattcgaggctatgctgtcgagggtgaggcagcaaagcaggtggcagaggcattcgcagcaaaacagaatagctgtggaggctttttgtttgcagtaggtgatggaaaccattcccttgcaacagcgaagacctgctgggaaaatatcaaaaaatccggaaaattcacagaaaagcagttgaaaactcatcctgcaaggcatgctcttgtggaaatctgtaatctgcacagtgaggcgcttgagtttaagcctattcacagactgcttacaaatgttgatgtaaaggacatgctgtcgtttttcgaagctgaaatcacaaaacaaggacttgcgagcactgagggtgatgagatagtatttgagtatgttgaatcaggcgctacctcaataaagaattccggaattaatatcacaaatagaggtgaccgcctcccggttgagatactccagggtattttagataagtatcttgagacacatggcaatgtggaaatagactatatccatggtgatgaggcacttcacggactggttaaggagactaagggatgtggaatttttcttcagtcgatagacaaaagcacattgttccctgcaataaatgcgggcggggtgctgcccagaaagacattctcaattggagaagcgaatgagaagagatattatatggagtgccataagatatctatgtagctttggtttatatacatatgttggttttattatatttataaacaattgattttatgaagtagaataatttaacaaataagcttattttactacacaaacacatttattaagtgtataatataagaaaaatttattcacaaggggacgacaatgggaaaatactttggaacagacggcttccgtggagaggctaatgtcaatttaacagcagaacacgcatatcagattggtagatttttaggctggtattatggagagcttaagaagcagaagcagctcgatgagccggcaaagatagtaataggaaaggatacaagacgttcaagctacatgtttgagtattcacttgtatcaggacttacagcatcgggagcagatgcatatctattacacgttaccacaactccatcagtggcatatgtagcaagaaccgatgattttgactgtggtatcatgatttcggcaagccataatccatactatgacaatggaatcaagcttatcaacagcaatggagagaagatggatgaggagacaattctccttgtcgaggactatatagacggcaagctacgcctgtttggtcaggagtggaaggagttgccttatgcacataaggatgcaatcggatgtacagtggattatgtggcaggccgtaaccgttacatgggatacctcatatcgcttggtgtctactcattcaagggcatgaaggtaggtcttgactgtgccaacggaagctcatggaacatggcaaagtctatttttgaggcactcggagcaaagtgctatgtcatcaataatgagccaaacggtctaaacatcaacaataatgctggctctacacatattgagggcttacagaagtacgtggtggacaatggccttgatgtaggcttcgcatacgatggagatgcagacagatgtctctgtgtagatgaactgggcaatgtaatcactggagaccatatcctctacatctatggaaagtacatgaaagagagaggaaagctcgataacaatactgttgtcacaacagttatgtcaaactttggactctataaggcccttgatgagcttggaatcggctatgcaaagactgcagtaggtgacaaatatgtatatgagtacatgcagcagaacggctgccgcatcggcggagagcagtcaggacatatcatcttctctaagtatgcatcaacaggtgatggtatccttaccagccttaagatgatggaggtcatgatggctaggaaacagaagatgagccagctctgtgaggggcttaatatctatccacaggtgcttcaaaatgtgcgcgtagctgacaaggcggaagcacttgccaatcctgaggttcaggcggctgtcgaccaggttactgcagagcttggcgatacaggacgtatacttgtgcgtgagtcgggtacagagcctgttatccgtgtcatggttgaggcagagagcgaggaaatctgtcagaaatatgtggatatggtcgttgcaaaattaaaataaaggttaatgccaaagataatacacgtaatatacaaaagctgtgtgagaatatcatgcagcttttgctgttatgagggttcataaatgagtgaattaagataaattaagtggatataatttaatctgtagagagaatagtaattaaattctgccggaggaaatagtctatgcctgaaatcttaattatttttatattatgtgccggtattattgtaattggcataatattgtgtataattattaaagtgagtcatatgtctgatgacgaacagaaaaaggacgatgaacgacagctggagttcattcgtgcctacaaggagcataaaaaaggacattgagtttaaaggattatataataagagacatacaggaaaagttcaaatatcttccgtcagcggtatatttggctttaatctgcattgcgatgtatatttttgtgtgtctgctgcgatatcttttcacaatgagagaggtatcacaggcagatgagagaagaaaaaagatagtgggcaaaatctggcatatgctgttctgcggcacctttgtggcctatatgtatacgcttataatgatagtgtattattcaagggagccgggaagcagaaccggcgtcgccgatatggtgctgtggagcaattggggcatgacacttcagatgcacgcttattttatagaaaatatagtattgtttataccatttgggcttatatttccattggtttttaaaaattggatgagatggtttacaatacctgttggtgcttttataagcgcagcaattgagtacacgcagctggttaccggcaggggatattgtcagcttgatgattttgtgacaaatacggcaggagcagcaatcggattttttatttatttgatattatatgcagggtggctggtatggaaaaaaataagataagcattgtggtaccatgctttaacgagaaagaggctctgcctcttttttataataaaataactcaggtgtttaatcagatgagtcaagagagtgaggcagcaggattgtcctatgaactgattatagtggatgacggctccatggatggtacgcttgatgttgcaaaggagcttgccgcaaatgattccggtgtgaaatacatatccttttcacgtaattttggcaaggaggcagctatgtatgcaggcctgcagcatgcggtgggtgaatatgtggcaataatggatgcagaccttcaggatcccccggaaatgcttccaaagatgtatcaggtccttacgaaagagggttatgatgcagtaggcacgaggagggtgacaaggaagggggagccaccgatcaggtctttttttgcgagaaagttttacaggctcatgagcagaatatcaaaggccaatatggttgatggtgcacgcgactataggcttatgaacaggaaatacgtggatgcactgctttcgcttaaggaatacaacaggttttcaaagggattgtttggctgggtaggctttaaggtgaagtggcttgagtttgagaatgtaaacagagtggcaggtgagacaaagtggtcattctggcagctctttttgtatagccttgacggaatagtggcattttccaacgcgccgctatacatggcttcaatagccggagtgttcagctttattgtcgcaataattgcaatgctctttatcattatcaggagacttgtattcggagatccggtagccggctgggcttcgaccgttgttatcatactttttataggtgggatacaactgcttagcataggcattttgggactttatctgtcgaagctatatctcgaggcaaaggacagaccgatatatttaataggagaatcaaatatagaaaaacatacagaaaaatattaagtctttcttaagaattcttaattcgatagcacatgacatttttttcggatgttatgtgctataatttttttcggcaacgtttattaatgcatgaaagaggactaagatgaaaaacgtactggagtggcttgaggccacagtagaaaaataccctgacaagcctgcattttcggatactgaatgcagcattacgtttgcgcaggtgtatgatatagcaagaaatacaggagcatatctgatagaacagcttggagtggacagaacccctgttgcagtatttgccggaaggaaaatggtaacaccggcatacttcctgggagtggtatatgcaggcagaccgtatgcgccgattgatgcatcgcttcctgacaagagaattgaaaaaatacttgaaaatctgtgtccaagggctattgtggctgacagggaaagccttgagcatgtggagagcatagtggatgagctggcaaaggcagaaggtttcgatagaccgcagatatttattgctgaggatatatcgcgcttcgagcaggtggcgtgcgctgatagtaattgtaaaatcagtgaatcagcaggagacgctgtgacggatagtgagaacgatacagatggtggtgttgtggcaggctgtgcaggaaaaatagatgacagctcacgggatatgctcgctgtagtccgcaggcagatgtccatgacagacccactgtatatcatctacacgtcaggctccaccggcaatccaaagggagtcatgacatcgcatctgtcacttatgacatacatcaatgcatattgtgatgtgatgcatatagaggaaagtgatgtgctaggcaatcagtcgccgcttgactatattgcggcaatcagggacatttatctgccgttaaagaccggctgcagcacagcgattattccaaaagagtactttatggagccaaatgccctgtttgattacatgaatgataagaaggtcagcagtgtcggctggagtgtttcggcatttaccatcctcacatcgcttggggcatttgaggaagtagggcttaagagtcttagaaaaatctgcttctcaggctcagtgatgccgtgcagggtactcagaaaatggcaggaaaatctgccggaagcgcattttgtgaaccaatatggaccgacagaggcaactgcttcgtgcacgtattatagtgtggatcatctggtggaagaggacgaggtgcttcctataggaaaagcctatgacaattacagggttttcctgatagatgagcatggaaatgagccggctgtcggagaacagggcgagatatgcgtatgtggaccaatcctggcgctgggctattataatgatccggagaggacagctgcggcatttacactcaatccactcaacaaggcttatcctgagcggatgtaccgcacaggggattacggaaggctcgatgaggacggcatacttcatttctgtggacgtatggaccgccagataaagcacatgggacaccgtgtggagcttgacgaggtggagcatgccgccaatgtggtcgatggagtcgcagaaagctgcgttatatataataaagcaaaagaggtgctgatacttttctacacaggtgactgtgacaggagaagccttgcgctggcactgagggacgagcttccgggctttatggtgccaaggaaaatcaagaaactgaagcagcttcctaagcttccaaacggaaaatatgatatgaaaaaactggaggaaatgtaaaatgagagacacaattttagagattttagaggaattaagaccggatgtggattttgagaaggagacaaagctgatcgatgacaaaattcttgagtcatttgatatagtttcactcgtatcggagctgactgatgagtttgacatcacaatcagaccaaaggatctggttcctgagaatttcaactcagttgatgcaatcgagaagcttgtgaaagagcttgtggaggaataaagcatatgagacagacaccgtactatgtatttgatacggacgagtttgcgaagagagcagccatgataagggctgctcttgattgtaaaggaggacgtaggataccactttgtttttcgataaaggcaaatccgtttctgcttcacaggctgccggagggattagaccatgtggaggtgtgcagcccgggagagcttgagatatgtatagcgctaggtgtgaagccggagtgcatcatctattcaggcgtgatgaaggaaaaatgcgatatagagcgagcagtttcatatggagccggtatactgacctgtgagagcataagacatgcgacactgatatcggaagtgatgcttgaatgtatgcctgaaggtgcgcatgaagccgaatttgctgaaatgaaagcacaggtcatactgcgcctgacaagtggcaaccagtttggcatgtcacttgatgatattgaatacatcatttcacatccggatgagtttaagggcatcacggtaataggcattcactactattccggcacacagaagagtcttcgcaaaataaataaggacttggaaaaaataaagtctgcactgaccggattaaaagaaaaatacggctttgagccacagcttgtagagtatggcccgggactttgtgtggagtatttcgaggatgactggcaggaaaaggaaaaacaatcacttgatgaggctgcagaggtgcttagagaatttgctgtggaatatccgcttggcattgagatgggacgtttccttgcagcctcatgcggtaaatactacacacaggtaaaggaccttaaatcgacaggcgatgccaattatgcgattctggatggaggaatccaccatctgaattactttggacagagaatggctatgcaagtgccgccgattagtatatatagagctgccggtgtggaattaacacaattgccggacatagactatacgctctgcggaagcctctgtacagtggcggatgtgctggtcagagaggtgaagcttaagaagcttgagcttggtgatgttcttgagtttgggcactgtggcgcatactcggtgacagaagcaccggcgctctttctgtcaagacagcttccggctatatatgcgtattcgaaggagtatggatatgagtgtcttagggagcatattcctgcggctgagataaatctggccggaaaaaaataatgtaaataaaaccgcccgtggcaaaattgatatgctatgggcggttttgtatgacataaacaaagcattttgtggggaacctgactattagccaagctccttatcacacatatcaagtacagaagcaatggtagtatccatatcatagtacttgtattcaccgagacgtccaccgaatataacaccggtctccttgtcggcaagctccttgtacttggcatagagctgtccgtttttctcatcgtttacagggtagtaaggctcatcgccggccttccactcagaagagtactcacggctgataatagtctttggcaggtcattgccatcctcatccttgccgaactcgaaccacttgtgctcgatgatacgtgtccatggagtctcgcggtctgtatagttgacagcggcattgccctggaagttaggaatatcgagggtctcattctcaaagcgcactgagcggtactctaaagtacctagcttaaagccaaagtatgcgtcaatcggacctgtatatacaaccttgtcagcaagagaatcaagctcagccttgtgctcaagatagtcggtatttagtctgacctcaatgccgtcgagcagattttcaaccatcttggtgtagccaccgattggaataccctgataaagagcgttgaagtaattgttgtcaaaggtaagtctaacaggaagacgctttatgatgaaagccggaagctccttacaatcacggccccactgtttctcagtgtagcccttcacgagcttctcatagatatcacggccaacgagtgagatagcctgctcctcgagatttttaggctcaccggtgatttcctttttctgctcctcaatctttgcagcagcctcctccggtgtcaccacaccccacatcttgttgaaggtgtacatattgaaaggcattgagtaaagctcacccttgtagttggctacagggctgtttgtgaagcggttgaactcagcaaactgtgtgatgtagttccagaccctcttatcattggtgtggaatatgtgggctccgtacatgtgtacgttgatgccctcctgcttttcggtgtaaacatttcctgctatgttaggacgcttgtccacaacaagcactgatttgcccttggcctttgcctcatgggcgaagatggctccgtagagaccggaacctactactatataatcgtatttcattgttttctccttgttgcatagtgatattataattataagtacattttccggaaaaacaagcagaaacaatgaaaataagtaaatattaataaatcttatgttagaaaattatgatatacttagatataggaagttcaaaagtaagaaaataagaggaaaggcaacgcaacgatgaaactacccggctactactcctcaggagaatttgcaaaaaaagcgcatattacaaaaaagaccgtcaggtactatgacgagcacaatattttaaaaccatcctacgtaaacgaaaacggagccagattctataatgatgacgactttgcgcgtctacagcagatactgttcctcaaatatctgggcttttccctagatgatatcaaggagatgacactcagaaacacggacagcaatgtcatgtctgagtcgcttcacatgcagcttggtctcgtggaggagaggatagagcagatgaagcttatgaaatcggcattgcaggaggcttcagaggtaatagacgaggggcaaagcgtggactggagtcatatgctggagctggttaatataaacgagatggagcaaaagctaaagcagcagtacagggatgcttcaaatatatcagccagaatcaatctgcacagggatttctcgatgaatccggtgagctggtttagctgggtatttgatgagtgcagcttttttgagggggaaaaggtgcttgaggtgggctgtggtgatgcctctctctggacacagaacatagacaggataccggcagatatgcagataaccctgactgatatatcgtatggcatggtaagggatgcgacgagaaatgtaggcgcagatgacaagcgcttcacatatgaggtgatggatgcccacaggctgtataagccggatgcatcgtatgactgcgtgatagcagaccatgtactgttctattgtgacaatctggatgccgtgtgcagtgaaattctaagggtgctaaagcccggtggcgtgtttgtgtgcagtacatacagctcacggcatatgaaggaaataaacgacctggtgcagcagtttgatgaccgtatagagctgtcagcggaaaggctgtatgagcaatttggtaaagaaaatggtgaggcaatacttggaaaatactttggtaaggtaagctggcatggatacgaggatgagcttgtggtagaaaaagcagagcctgtgatagagtatgtgctttcgtgccacggcaaccagaacaggtatattgtggaccgctataaggaatttgcggcatttgtaagaaagaagacagagggagggttccatatcacaaaggatgcaggtgtatttattgcacgaaaataattggtagcgtagaataaggtaatatgatattataataatgtatctaatgtttttatagtaggtggatgatggctgatatacaacaatattggaataaatttaaacaaatcgaagaagaatatattggaatagaagatggcattgataattttgaggagaatgaattaccttataatgttaatgatattcgtgtagagcaaaagatgatcacaatttttcaagtagagtattggatatcaaatggtgttttggatttgcaaccagaatatcagagaaatttggtttgggataatcaacggaaatcattgcttatagagtcgttattacttaaaatccctattccggctttttatttggatgaaaaaaaagatggaacaaagagcgtgatagatggtttgcagagactttcagctattcattcttttctaaatgatgagtttgagttaagaaaactggaatatttatcaagctgcgatgggaaaaaatttagtcagttggataataagtataaatcgtacgttttggacacgacactttctgttaatattttgggaacagtatgccctgatatggtaaaatttgatgtgtttcgcagggtgaatacaggtggacttcctcttaatccgcaggagataagaaatactttggccacatcagaagtacgtaatttgttaaagaacatgtcatcatgtgatgaatttatgaaggcaacattagggggtgtaaacgatgtgagaatgggggctcaagagttatgccttagatatatagttataaattcatattataattgggagaaacatgactttaatcagtactatggtttgacaaagtctatggataagatggtcttattattaaatacgtacaaaaaaagtgaattggaatcaatattgaatgagtttagggtaattatgttacaagcgcatatgatacttcaggggtattcattttgtaaaattggacaaaaaagaattaacacagctttatttaccagttgggctgtggtgctatataatatgaattattttaataatgagatacagatgaaagctgaaaaaatacgtaaattgtatgtagcggctattgatgaagatggcgaattgtataaggtgatcacatcatctacaggatcaaaaaaaaatataataaaagctatagaaattataagggggttatttaataaaatataatgattgatagaatagatattaagaattttaaatgtttctcagatgccaaaattgagttaaatgctattaatatatttactggagtcaatgcagctggaaaatctacggctatacaagctttattacttgcttttgcatcattaaaagaaaaagagaattctgtagatgttaataatgcgttaggaatacaaataggtaatccaagtgtattgagagcacagaatccgtcggataattgtgaaggggacttttcatttattatttataatgaaaataataaaatagattttatatatagcatagatagattgtcaccgcttagtttaccattcaatataaaaaacagtaatggccttgatagtcagattttttatttgaatgcggaaagatgtggacctagaatatcatacccagcgggtggggagagtattatagaagatggctctaatgctgcatatattgtagaaagggctgatatgcagaatgtagtcgttccagagagtgttcgtgcgattgattctatcaagttttctgatcaggttgaagcatggatggatgcagtattgggtgatgttcaggtatctctgaagacagatcttaataaggctagtacagatatattatataaaaattcgcttgtagattatgccgtttttccaacaatgacaggctttggaataagctatgtattttcagtgattgcaatgggattgtggtgttcagcaaaaaaaaatgtaatatttataattgagaatccagaggcacatttacatcctgcggctcaaagcagaataggaaagtttttacaaataatatctttatcaggggtacagattatagtggagactcatagcgaacacgttattgatggtatacgtttgcaggctgcgtatatggaacaaacagatcatgtaacagtggacttttttaatcgtagagataaagatatagatataaaaaaaatatggttggataaaaatggagaattatctgattggccaaaagatttttttgaccagaaaagtattgatttgagggaattattgaaaataaggagagggaatgcaagtaaacaatagacttcaagaagaaagctttagatatacagcagataagaaaaatatgtcgtttagagttgatgatattgagaaattaagtgatataaatacctattgtgataaaattaatgagagtataatatttaatgataacatatgggggatcgaagtggaggctgatgtagaacttgcagattgggtatattcatctattgggactggtggaactgatgatagaaggattgtagcagagattctttcaaaacagggatttgagaaaactgctggtaattctatattaatttctttgggtgagtggaaagattcagtgtcatcagttaaagagtatgttattaatagaagaaaaattttatcgaaaataaacaatcctaacgaatatttcgatttcatgaaatcatgttttatagatagttgttttgcagatgatattcttgctgaaatgaaacatattcaaaattttccggatcatgctgaagagattactaagaatttggctgttttaaatgatgaggcaattaagttatattgtagatataaaaataatttgaaaatagctattgatgaaatatctactaaattactagcgtgttccttggatccggcacacagagatagcttgtggttttcgtttacatatgaagatatacatacggatgtaagatgtgagccgcatctgaaacttataaggaatgattcagatttaagaatttatttttattggaaagatgacagaatagcaaacggaaagaaagttcttataggcagaataggtagacatccttggagtaaataattaaaggatgcaggtgtctttattgcacgaaaatgatttaaaaacaggataatataagcatatattttgtgaaaaatgctaaaaatataaaaagtacttgaaggtgcccttggggcaccttttataatgcaggtaaatgatgaatcaggtcagtggattttacagaccgaaagcatcaaatgcagcacgtagtttcagtttgaaggagaacaacatgaaaggtattatattagcgggaggttcaggcacacgtctttacccactcacaatggtaacatcaaagcagttacttccaatttatgacaagccaatgatctactatcctatgtcagtgcttatgaatgcaggcatcagagatattctgatcatttcaacaccacaggatacaccaagattcaaggagctcttaggagacggacatcagtttggtgtcaacctcacctacgaggtacagccaagccctgacggacttgcacaggcatttgttatcggtgagaaattcatcggtgatgatacagtagccatggttctcggagacaacatcttcgcaggacacggtctcaacaagagactcaaggctgcagttgaaaacgcagagagtggtaagggtgccacagtattcggatactatgtagatgaccctgagagattcggtatcgtagagttcgataaagagggaaaggctatttcaatcgaggaaaagccggagcatccaaagagcaattactgtgtcacaggtctttacttctacgacaacaatgtagtagagtacgcaaataatcttaagccatcagcaagaggagagcttgagataacagaccttaatagaatctatctcgagaaaaaggcactcaatgtagagcttttaggacagggcttcacatggcttgacacaggaacacatgagagtcttgtagatgccacaaactttgtcaagacagtcgagacacatcagcaccgcaagatagcatgtcttgaggaaatcgcttacttaaacggctggattacaaaggatgaagtattaaagacatatgagctcgtaaagaagaaccagtacggacagtacttaaaggatgtacttgatggaaaataccgcgagcagttatattaaggaggaaatcaaaatgacaattatcgtaacaggtggagcaggatttatcggaagcaacttcgtatttcatatgcttaacaaatatgcggattatcgtatcgtatgcttagactgtctcacatatgcaggaaatctctcaacacttgagcctgtaatggacaatccaaacttccgtttcgtaaaggagagcatcacagaccgtgacgccgtatacaaattatttgaggaagagcatcctgatatggttgtaaacttcgcagcagagtcacacgttgaccgttcaatcgagaacccacaggtattccttgatacaaatatcatcggaacatcagtgcttatggacgcatgccgcaagtatggtattaaaagatatcaccaggtatcaacagatgaggtatacggagatctgccacttgaccgccctgagcttttcttccatgaggatacaccaatccatacatcaagcccatattcatcatcaaaggcagcagcagacttactcgtgcttgcttaccaccgcacatatggacttcctgtaacaatcagccgttgctcaaacaactacggaccataccatttcccggagaagcttatccctcttatgatagcaaatgcacttaatgataagccactcccggtatacggaacaggcgagaacgtgcgtgactggctctatgtagaggatcactgcaaggcaatcgaccttatcatccacaacggacgtgtaggagaggtttacaacgtaggtggacacaatgagaagacaaaccttgaaatcgtaaagattatctgtaaggagctcaacaagcctgagagccttatcacattcgtaggagaccgtaagggccatgatatgcgttacgcaatcgacccaacaaagatccacaatgagctcggatggcttcctgagaccaagtttgaggacggaatcaagaagacaatcaaatggtaccttgacaatcgtgagtggtgggagacaatcatcagtggagagtaccagaactactatgagaagatgtacgcgaatagatagttattatcgtttgtctggtggttttgcgcatatatggtgatgttagtcacgataataattaagcataaaggagaccaaaaatgaaagtatttgttacaggagttgcaggtcagctcggacacgatgtaatgaacgagcttgcagcacgcggttacgaaggaatcggaacagatatagcaccacagtacagcggagcagacgatggcacagcagttacaaagatgccatatgtctcactcgacatcacagaccgtgatgcagtggaaaaaacaattacagagcttaagcctgacgtggtagtacactgtgcagcatggacagcagtagatctggccgaggatgatgataaaaaagcaaaggtgcatgcaatcaacgcagacggcactcagaatatcgctgatgcctgcaagaagatagatgccaagatggtatatatcagcacagactatgtatttgacggacagggcaccacaccatggcagcctgactgcaaggactatgcaccgctcaacgtatacggacagacaaagctcgatggagagcttgcagtggcaaatactcttgagaagtactttatcgtgcgtatagcatgggtatttggagtgaacggcaagaacttcatcaagacaatgctaaatgtcggcaagacacatgacaagctcacagtagtaagtgaccagattggtacaccgacatacacactcgacctttcaagactgctcgtagatatgatagagactgataaatacggttactatcacgctacaaacgagggcggatatatcagctggtatgatttcacaaaggaaatctttaagcaggcagtggcgcttggccatacagagtattctgaggacagactcacagtcgcacctgttacaacagcagagtatggtgtgtcaaaggcagcacgtccgtttaacagcagactggacaagagcaagctcgtggagaatggatttaagccactccctacatggcaggatgcgctgcacagatatttgcaggagattaacttttagaaaggacatagaaatcatgggacagattaaagtacagaaaaacgtaggtggaatcgaaggactttgcatcatcgagcctacagtacacggagacaaccgtggatactttatggagacatacaattcaaaggacatgcaggaggcaggcattgacagagtatttgtacaggataatcagtcttgctccacaaagggagtgctccgcggactccatttccagaaggaatatccacaggcaaagcttgtgcgtgcagtaaaaggctcagtatttgatgtggctgtagacttaagaagcgattcaaagacatatggtaagtggttcggagtagagctcacagaagagaacaagaagcagttccttatcccggagggctttgcacacggatttttagtactctcagatgtagcagagttttgttacaaggttacagatttctggcatcttggagatgagggcggtcttgcatggaatgatcctgcaatcggcatcgagtggccacagcttgtcggagagtatccgggaagcgccgacggaagcggatacacacttgaggatggcacaccaatcaatttaagtgataaggatcagaagtgggagacactggagaatacatttaagttttaattgatatgatatatcataatattatagctttcgacattaattgtcggaagctatttacgttataaaagtcttgaccttaatcactaatagttgtaaactaaacaaaaaattaattgaggaaaatatatgaagttaaagcaaagtaaagtatttaaggctggcataggatatactataggaaatgtcatggttaaaggtataaattttttggctattcctatatttagtagattgttaactacggaagagatgggggtgtatacggtttttgccgcatatgaagcagtcttgttcgtttttattggaatggctctgcatagctcaataagaagcgcaaaatatgagtttgagggtaaaattgatgattttacatcatcaattatgggaatatattggataaatttaatagttgccttgtttatttctattgtttttaataaaatattgacaaaattattggatcttgatttagttacattggttatgcttgtgatatacagttttggaattgcggtagttactttatataatgcaagaattagcttggattatgagtataaaaaatacattaaggtttctttagcaagcacaattggaaatgtaggtctttctttaatattaattaagactatttttaattcatcaagaggatttggaagggtacttggaattacaatttccactgtacttgttacagtatatattatatatgatttatataaacgtgctcgaccgacatttagaaaaaaatattggaagtttggaataaaatacagcttgcctattattccacatggaatatcacaggtgttgcttgcccaatttgacagaataatgattaataaaatgataggaaagtctgaggctggcatatatggacttgttggtaatatcaaattgattttagctattatatcagattcaatttctgaagtgtggatgacatggttttatgaaaagatgaaaaataaagaaatagaagctgtcagaagtagagcaagacaattgtgttattttttcctcattattgctattggagtaatgtcaatttcaccagaattggttcttataataggcggacaaaaatatgcagttggaaaatatgttgcaatccctatgattttagatgcttttgtattatttatatataatgtaatagttccatctgaatattttaagcaaaaaacaagttttatcatgtggggaacaatgagtgcggcggtaattaatatcattacgaattatatatttatacagaaatatggctttattgcggcggcatatactacgctgtttgcatatatttgttatatgatattacatcttgttatttcttatagattaatgagattttctattattccagttagctgtattgcattatgtttacttagtattgtgataattgcaatagtagatcttatatttattgataatatatttgtaagatatttggtatgttttgctgtggtcatgtttattggaattaaggtgctgccggagtttgttaaagagaacagaagaaaagcagagtaaaagtacaaagttcttgactatgtaatatgttggatgtaaactaaaaaggttattgtaaatatcgagaatgtagaaaggcagattttagatgaatagggaactgagtttggaagaggtgcataaagaaaccttaaatgttttaaaaaaaatagatgagatatgtgagcacaatgatattaagtattcaattatgtatggaacattaataggatatatgagacataatgggtttataccttgggatgatgatatggatgtttgcatgttaagacctgaatatgataagtttgtagcatattgtaatgaacatgaagaagaactatatccatttaagttgatgtcaaaatatacagccgatgattatccttttaatttacaaagattttgtgatactagatttaagatggttaaaacggatggactatctgatgcggggatgggattatttatagacatttatcctttagatgcattaggaaatgttaagaatggtgctaaaaaacaaatagaaaaaaagaaaacattttggatgcagtgtgttggttgtgcacagagtaagaatataatgggaacaaataagagttttgttaaacgattattaagatttccggtttacttgtattcgcatgtgaagggaactaagtattttttggataagtttgatgtgcttacaaatagctattcatatgagaatagcaaatatgtcggggatttgatatgggataactgtgttacatattatgagaaggaatggttcgaagatgttgaggacattatatttgaaggtgtaaaaaccaaaattcccgttcaggctaaaaaggtattggaagaagaatatggagactatatgactccaccacctgaagaggagagagttccatatcatgaatatataatatatagaaaataatggtgataattgatgctattgattggtaattataaaacttttattgaaaaatataataaagaagtcttctctattgtatatatttttctacttatacatttcttttggggaacaacaatgatacaaattcatttgccacgttgttatacatggatttgtttggtagtgcttctgggatatattataggtaaaatattagttgaaccaaatagaaaatatctgattattatggcaacaattgttgcaccatttattataagtgggcttttaagtggctatcatgaattaatgtatgtgggtttattgatagcagcagcaaaagatattccaattgatagaattttaaaagactacctaatggtatgtataccgtttttattaattacgatactaggaagtcaaatagggattgttgagaacctaatatatccaagtctatacaggggaaataggattgcatatggatttttatcacctacggatttttgtgctcatgttttattcattattttagtattgttttctgtgataaaaaagaagaattattggaaaatggctttaatatctgttctgattgcagcttttctttattttagatgtgatggtagaacaactgttgccagtctacttattttcttgacaggaatagctatatgctatattataaaaaaatgggttggattaaataagcgtattgaatggctacttgtagatatctgcgagagttttattgtgatagcttcgtttgtattgggatggttatatcagcttaataataaatatattattggattaaatgatgtgctgtcggatagattaaagtatattgcccagactatgtcgacatataatatcaaattatgggggcagtatattgaggaacacggaaatggtgggtctattattgctaaagataattatttttttatagacaattcatttgtaagatgcatgtatgagtatggagctattgtttttgtgctggttatagtgcttatatttatggctcaaaaaaagatgctggataatgagaaatatattatgtgtttagcattttttatcgtgactatagcgtcatttgctgaacaccatctccttgaaattgcatataatccgtttattttttctgtttttgcttgtatgagcaataatgataaagttattatggaagaaaagaggatttgttaaatatgatttcggtttgtgttgctgcttttaacggcgaaaaatacattgaggaacagattttatctgtattaagaaatcttgattctcaagatgaaataattatttcagatgatggttcttctgatagaaccagaagaattgttgatgatttggctgaaaaggatagaagaattagaattatagatggtcctcgaaaaggactgattaagaattttgaaaatgcaatagtacattcaaaaggcgatattatttttttatgcgatcaggatgatgtatggaaagataataaagttaaaacagtactagatatttttggaaatacggattgtactttggtaatgcatgatgcatgcattgttgatgctaatttgagaatttccggttgctctttttttgaatttaaaaaatgcaaaaaagggtattggagaaacttgataaaaaattcatatataggttgctgtatggcttttaaacgaagcatactggattatgcaattccttttccggataatattccaatgcatgatcagtggattggattgttgtcggaaagagttggaaaagttgagttctgtaacgaacagcttcttttatatagaagacattcaaataatgcatcagaaatgactcatttacctttgggtgagatggttaagaatagagcgattatgctgaaatgtataaataaaagaatcagggagaagaaatgatattagcaggtataacattattcaatccagacgttgcaagactagaagagaatatatcatcaatttatggacaagttgatagggtaatatgtgtggataatggttcggataatataaagagcattgaggattgtgtattaaagaactggaaaaatataacaattattaagaatggaaaaaatgaaggcattgctaaagctttgaatcagatgtttgaatttgccattgaacaacaatacgaatatgttttgactttagatcaagactcagtatgcccggataatataattgaagaatataataagtatttagatgaacataaattgggttcactatgtccacagtgtgttgatagaaatttcaaaagtgaattgaataatgaagatgttatagaggtggataagtgcataacatcagcttcattggtgccggtttcagcttggaatgatgtgggcggatttaatgaagagctttttatagactttgttgatcatgatttttgtgctaagcttaaggaacatgggtatagaatacttcagattggtagtgttaagcttagccatgaattgggaaaaggaaaaaaatatagtattttaggcgttaaatttactgcacttaatcattcagcaatgagaaaatattatatggttagaaattggatttattatatgaatgaacataaagatataataaatctaaaggcagaaaagaaatcatatagattatttttttttaaaacactaatattcgaagatgataagttgaaaaaaatgaaacaaatgctaaagggtagaagagacggcattgaattaataaggagaattcatgaaatcaagtaaaacaatcaaaatagtaatggagatgataacatatattagtttagttttgtatatgtttgatgttgtattattaggaacaggggaactgacaaagagctttggaattcaaagtagaatgatttttttcggaatatcggttttagcggcagttgtccttatattattggatttgaaaaaatatttgaataataagtatttaataagtgtacttgttttcatggttgttatatttatagctgctattagaggctttgttggaaaacaaaatacaacaatacttttgtctgacttcaaaggttttttaaattttttgatagtttttccgatgatggcagttttgtataaaaaaaatagagtgatttcatttttgaaaatgctatctctgtcacttggagttgtatctgtgttaggtattattctggcattttatctgcagatgcctttagagatgagacgtggggcatatgatttttttgatggatacaatatatgcatgattacagaattgacaggaaaggtgactcgtatttttttcaattctggaagcagacttttttttgcgggttttgctttaagcattgtattttcgttaatagaaaataaacgtaaaattatttggatatttattgcatcgttagatatttttggtgtgtttatttcatatacacgatcaggctacttggcatttgttattggaatatttgcatttgtagtattaatattattattttatagagacttttttaaaacattggctataagggcatgctttgttggtggaatagttgttgtattaattggtatggttagtgtcgctgaaaaagtaaatttggttgatgtggccataaatagatgtttatttgccggagcagaaatagaagatactaatacaaatgttgaaaaaccttctgataataaaaatgataaaaataataaaaatgataaaagtgaactaacaaacaaaaaagctgaaattcagaatttggccattagagagcaaagaaagacgttagcattagaaaatataaagaaacatccattatttggcggaggattgggagtatccaatgatataaatgatggttttattgagtatttttatttagatattttaagtaaaataggttttataggctttataatttttattattccttttttattttctgtttttgacactattattttacgtgatgtattttgcaaagaacaaagattattagctttagcagcacagttaggctgtttgtttgtttttgtgatatcatattttaatccttgcttaaactcaagtgttggattatttatgtattcattggctcttgttttatctatgccgtgggaaaataagaaaccaaagactgcttattttataagttctactaaccattataatgtgagaacaggaaagtttgttaatgattatgttaaaaaaggttatgatgtaatttatgtaacctctgattttgatcatatgaccaaaaagaggtattgtttcaatgagtataaaaatagtaagcaactgcatgtaatctcttacaaaaaaaatttatcaataagcaggatattgagtcatctgatgttcagttacaaaacgttttacatgttattggcttgtaaaccagaattggtgtatgtagaagtgccaaataattcattagtaaaaagttcggcaaaatataaaaagattaataatgctgagattattgtggacgtttttgatatgtggccggaatctatgccggttaagacaaagaatatgattgtaaactggggattcgatatttggagaaatttcagaaataagaatttaaaatttgcagatcaaatatggattgagtgtgattattatagggagttattgtcggcacaaaagattaaccttccaatggaaaccaaatatttgaaattgaaaaatgcagaaacaagtatagaaatgaaagtatcagaagaagaaattgatttatgctatttaggtagtataaataatatcattgatatatcattaattgaaaaaattgtttcagagtttgcgaaaaataaaagaacaagaatccatataattggtgatggtgaaagaaaagatgaatttcttgatattctgaaaaaaaatagtatagaaatcattgatcatggtaaagtatatgagatagataaattgcaagagatttttgatcagtgttggtttggaattaatgtcttacgagaagatttagcgattggaattacaatgaagtctatttcgtattttaggggcggtcttccgattatcaatactgttcagggtgatacaagtagatttgtagaagaatgtaacattggaataaatgttgaccgacatgatgtcaaatcttgtgttttaagaattcttaatataacaaaagatgatttggcttgtatgaagaataataccagaaacttgtttgaacaaaaatttgcagaataggataaaaaacatgaaaaaatattttaaaaaaacaatgcaatctattatttttatattgaaagtcttgttatatttatcattactgttcagttttctctttctgttttcgagaaataattttgcagttttaaatatttcaagaacaatggcaactacaatttttacgtatgtatttgttgggcttttaatgacagcgatatatggcagatatgatataggtagaagaaagagtaagccgataatttattcattggtattagcaacattatttacagattttgttgcatatatccagttaatgataatgaacacgataacaccaaatgtttctgccttcaagttttctgatataggtactttggcacttgtaattgtagtccatgtggttattattattgtttttgttcatattggtaatggcatatttttcgcaataaatgatcctgagagctgttgtgtaattactacacaggaatcagacctgtcaaagctttcttcttctgtaaaacgttacaaaaagcagtattgcattaaaagggtagtagattatagaagaaaagatctttatgatatcataaaagatatggatacagtgtttatatatgatattccttctgataagaaaccggatataattaatttctgttatgagcgaatgataaatatatatataaatcctgatgtatgcgatttggttgaaaatgtatcagaacattatttgctggatgatgtatcatttcttaatcacaatatcagcaatatgacttttgagcagagagtgataaaacgaatatttgatattatattctctttgatatttgtggtgattagttcaccaatctggattgtaagttctattgcaataaaattgggagatggcggaaccgtattttttaaacagaagcgtgcaacacaatatggaagagtgttttatgtttataaatttagaacaatgaaagaacatgttgaaaaccgatctgcaacatcggatgatgacagaataacaaaggtgggaaaggtacttagaaagacaagacttgacgaggtacctcagctgttcaatatattgaagggggatatgagctttgttggaccaagacctgagatgcttgaaaatgtgaaaagctatacaagcgaattgccagagtttaaatatagactgagagcaaaggcgggattaaccggatatgctcagattgccggaaaatataatacatcaccaaaggataagcttatacttgatatgatgtatattgaaaactatagttttagaacagatatcaaattattgttccagacggctattgtacttctcaagaaggatagtactgagggattccaaaaggtgtcagattgcttagagtgtgaaaagacaccagagaatttaattgattaagacattttataaaaatgggtaatacttgtaagaaattgttgcaagttttacccatataatattttactaaaattgaagagaaaatattttgtaatattttgtaatttttcaaagaaattacttgcaatatcataacataaatactagtattatatatataaaataaaaaaaggaggtactgtgtttatgaaaaacaaattcataatgacagcagcaattgttacagcaatgacgatggtaacaccatcacttgcaagtgcagcagagattcagcctatagcttctgagacagaggcaccttaagagacagaggcacctgcagaaacagaggcacctgcagagacagaggcaccttcagagacagaggcacctgcagaaacagaggcacctgcagaaacagaggcaccttcagagacagaggcaccttcagagacagaggcaccttcagagacagaggcacctgcagaaacagaggtacctgcagaagttgagactccaacagagagtgaaacacaggcagtagttgctacagagacagattccgatgaggagcttgcacaggctacttcagatgatggagcaacaaatgttgaaagaactggatggtatggaccagaggatggatatcctgattattgctataaatttaatgatggctcttgggcatatagtcagtttgtttctacagagactggaaaattctactttgatgctaatggctatatggtaagaggctggcagaaaattaattcttcatggtattattttgatgctaatggttatatgcagaaagattggcaggaaatcggtggcaaatggtattatttcagcccttatgatggctttatgtatcgtagcagagtaagtgagattaatggtacaatgcgtgcttttgctccttctggtcagatgattcagggctggacttgggatgtatatactgataatgatggtgatgttacaggagattggttttatgcaaacccaaatggtactgcatatgaagatggctggttggcacaagatggtggctggtattatattaacacatatagcggcaggatgtattcaaagggaatgtatactattaatgacaaacgctacagatttaaaaaagatggtaagctcatcattggatggtatcagacaggaatatatttagatgactggtactatacaaatgcagatggatcagcgtattcaggatggctgccatatggcggaagctggtattattttgatgattggggagatatgtatggcgatcaatgggtagaccataaatactatattggatgcgatggtagaatggtctcaggctggtatgattgtagtcaaaaatcagcaaattattcatcgactaattggatgtattttaatgctgatggtactaaatatgtaggttggttaccatataatggaaattggtattatattagtgataatggttatatggtagcagatactattgattattgtgtaagtcaggatgcatttagagatgaaaatggaaatactaattggacagagtataataaggctcgtaaggcttcaccacgatacgtatttgatgcaaatggtgttatggttacaggatggtatcatgacattcaaactacaggtggtcagattacatacgatgaatggtattattcagactctgatggaaagtgtcatgacggatggcttttatacaacggagcttggtattatttccgtaaaggcgaaatgctgagaaatacatatactcctgatggaaattgggtagggcttgatggtgtttgggcttaactcatagttttatatattaattgcataaaatatttttgagaggtctatgtggataacatagacctcatttaatatataatcattagaattttgtatttatttgagtgcaatactggatactggggtattatttgaatcaagatggtactctaatctcatatgtgctataatgttttaaaagtataggaaggaaataaaacagtgagaaaaaaagtaacaaataaaactaagaagattttgggagcatttgccgttgcaggtatgcttgcaatgagtgttaattctgtacaggcagcacaggaggaatatacagccggatcatcaatgggaaaggaatatgatgaactggaacaggcatattcggatgatgaggtcttagcaacagcatccaatcaggggcattgggaagtgaattatgcaggctggtggtatcagtattcagatggaacatatccacgtagttcctgggtaaatattagcaataaatggtattattttgatgaaaatggatatatggttactggatcacgcaatattaataatgcctggtattattttgatggaagtggagagatgcttacaggctggcagtattatttaggagcttggtggtaccataagccatccggggcatgggtacagtctaactatgctaatgggacattagtcggaattgatgtatcatattatcaaaaagatattgactggactactgtgaaaaatagtggtataaactatgcaatgctgagagtttcaagaagctactattctgattcatatcatcattttacagataaaagatttaatgaatacgcttcaaatgcaaataaagctggtatgcctattggtgcatatatatatagtcaagcgagaaacgttagtgatgctgtttcggatgcaagatacgttgtaagtgagttaaggggatatacaatctcatatcctgtagctattgatttggaggattcttcgcagacggatttgtctaaggcgcagcttggtgctattgcaaaagcattttgtgatgaaatcaggagatatggttacactcctatggtttattgcaatgagaactggtataagaactacatagatgtaagccagattgcaggagaggaattgtggattgcaagatataattcgcattatgatacaaatattaaaagaggtatatggcagtgtagctctacaaccagaattccgggtatatcgggaaatgtggatttggattttgcatacaagaattatgagaatccgattacaagcgtcataggatattggagcctatatggtaatgattggtattttattgatgcaaatggtcagtatgtaacaggctggcagtttataaacggaaactggtattattttgcgggaaatacagttatgacaacaggctggcaatatgtaaacggtaattggtactacatggatgcaagtggagctatgaagacaggttggcagtacataaatggtaaatggtatttcttggaaaagagtggaaccatgactatgggctggcagtatattagtggacactggtattatatggactggaccggaatgatgacaacaggttggcagtatataggtggacattggtactatatggactggaccggaataatgacaacaggttggcaatatataggcggacattggtattatatgaatgcagatggaataatggtaactggcagacattatattaataaaagatggtattattttaatgcaaatggtgtatggaattagagacgaagggagctgttatatttatgaagaaaaaaataatagttttattaacgattgcaattctgagcttatgtaataccagtgttttcgctgaagagtcaggttacatatggacacaaggtgaaagtggtttgtggtattatgtggatacagaaggtaattgtaagacaggttggcagtacataaatggatgttggtactatatggatgtcaatggtattatgacaacaggttggcagtacataaataatcactggtattatatggatgctaatggggctatgaccatgggctggcaatatataaatggctactggtattacatggatgctaatggggctatgacaacaggctggcagtacataaatggtcagtggtattatatggatgtcaatggtattatgacaacgggctggcagtatataggtggtcagtggtattatatagctccaagtggaattatggttacaggctggcagtatataggtggtcagtggtattatatagcttcaagtggagtgatgacaacgggttggcagtatataaatggcaactggtatctcatgaatggaaatggagcgatgacaacaggctggcagtatatatctaatttttggtattatatgaatggaaatggggttatgcagaccggttggcaatctattaatggcacatggtattattttaatgcgagtggagattgggttgatttttcaagcatgaattcgtatgcacagggatattcaagttcaacaaaatatttaataatggtggacagaaaagcttgtgttgtaggcatttattacggaagcagaggtaattggactcagcaatatgcatggccgtgtgcacctggaaaagcagcaactccgactgttggaggcgaatttaatgttggcggtaagggatactattttgattccggcaattcaagatgttattattatacacagtttaagggaaattatctgttccatagtgtgttgtataacaaaaatggtacacttcaggatggcagagtcggaattccactgtctcatggatgtgtaaggcttgaaatagggaacgctaaatggatatatgataacattccgagtggaacacatgtagttgtttattaaagggaacatttattaaaatttctattagacaaaataaaaatgatgaattatatttatttttataaatttgagggcataacatgcaaaccaacaccacacgagataaaacaattgatttcataaagggcatccttattttatttgtgattttaggtcacactacattgggtctgacagacatgtactcatttgatgatacaatgaatggtattgcaaatgtaatatacagctttcacatgccttgctttatcgcagtttcaggcttcttatacagtgaatatgtagggaatgcttcacaaggcatttttagccggataggtcataaagcatttaatatcctgctgccgtacgtgatgatttcagttatttactggattattaaatttgccctttcaaatttgataagggagccggttgccgttagcagcctgataagcataccgtggaagccgatagagtttttatggtatttatacgcgctatttctcatatattgtgtggcgtatatggctgattatgtgtttgcgaggcttctgccacattttaattataaaatggagcttttatttgtgctgtttttaataattgctttcacatgctatggcagctttcactatgagggctttaactacatagccggctttcagatgtacttttatctgggatgcctgattaagaagtggcttgataaactggataatagatatgctgtgctgagccttgccgttatgagtgtgcttgtagaggcgtccggcatagtattacaggatgacatgagcagcaatccccttttcagcagtctgtttgagcggtttaccgcctgtatagtgacagtatttatatttgcagtaagctattttttatcaaggtattgtgatttccctaaatggttacagactatcggccgggatagcatgccgttttatgcgatgaatgtgatatttgtaggtggaatcaggattatattgaacagggctggtataaccaatatggcgctgcagtgtatatgtggatttgcaggaagcactgctatatgctggatattgtatgagtgtatcataaagaaaatcaggcttatcgattttatattctacccatgcaaacagctttatatcagaaaatgacaaataggaatcagggtgttgttttttaatactaatccgatatactatatagtgtttactgaaaaaatatcaaaataaagcgtttcaatagaaaaggaaacaccatgaaatttattaaaattcctgcatttgcaatagtcctccttttgctcatgcaaatagtatcaaaggcatttattgccattgacagcagcgatatcgaaaatatatatggcttttactcagaaccaaagaacagtcttgatatggtcatgattggaccaagtgaggtatacacgggctatgcaccggcgttggcgtgggaggagtatggccttaagtcgtgcaatctttcaataggagctgtgccatgcaatatgtacaagtccatcgtcacggagattgtgaagagacagaagccgaagcttcttttaatcaatgcttctgcatttagttattgcaatagtaatctgactgatgaggtttatctgagaaagtggattgataatatgcctatgtcacagaacaagcttgacacggtaaagactattcccaaaaatatcaataatgatgatgaaaaggtgaaggataatatatcggataccctttattttccattggagaagtatcatggcaactggaaggcccctgaggcagtgtatacctcatttgtcactcgtgcctatatgaggctcagtggtggaggctacctgaagggcttttattcaaaaacaggcatcaccggaggccgtgacaatctggcaaatatcggacagcctactaaagaagcctatgtgctgactgatgaatgcagagcatatcttaaggagctgctttcgtactgcaataagcttggcataaagcatgtgctgttgctgcagccacctcatgagacacaggctgctgataagtcagggcttgagcagattgaaagtataacgagggagtatggatacgattttcttgatctgagtactgattatgagagcattgcagggatagatgattcacatgatttcgcagattttgagcatctgaatgcatatggagcccaaaagctttcgtcatatattggcaatctggtagtaaaccaatatgggataaagtctgatacgacaggttcagagctttcaagatgggaaaagtccgtgaagaggactaaaaaagctctgaaaatggcaagagaatatactgacagaagagaggcacaggtggttggagagtatgaggcagccaaataagtgaagctgccggggaattaagcgttgcagaatggtattatttagtggtatttgattctggctttgatgagccttgtgccttcacataccatctcgtcacgcatcagtaaaagcagcaccatatagattataaatccggtcacaatcataatcattgtgtgcatgaagctgactgacagctttgcatccatgagcagcagtacgataagcatacagactgctgatacaagatatttccacgataaagaaaatatttttggtatacttagctcatttcgtatgaagtaaagctgcacggcagttattattacctccgagatgacagatgctatggctgcaccgtatgaatagagctgaggtatgagaatcatattcatgacaaaattggctacggctccgatacatactgagcgtgtcagcagaccttcacgcttggtagttaccagatactgtataccgattacattgcttaagcctataatcggcaacagtgtagccattatcatgatgaggtatggcaccttttcatatccaggcccgaaaaaccatggcgagaaattgcgcgcgatgcctatcaggccaaagcacagggcaaaacctataaaccagacgaattgaaagctcttataaaggagggcttttacttcgtcttttttattttcactgaaggctcttcctattcttggaagcatcacagtaccgagtgaggttacgagcatgagcaccattttggatatcttgttggcctgctcatagtagccgttttctgtcatgctgccggttatgttgttgagcatggttttgtcaagcgctgtgtatatggttgtcgctatagttggtacaaatagtgtgagagtagcccttagatgagagaatggcttaagctccttaagctttggtctgtcaacatattgaggcaggtaaaaccagatggatatattggcaaaaagctctaatagacatactcctgccacatatatgagcaaatcactctctgagcgcacggcgatgaagataaaagcaatgtttatgattttaaaaatcacgtttcgaccgactattttgccaaattcctcaagtccctgaaacagccaggagatatcagaagcaactgatatcaggtacacggcttcaatcaatagcaggtgctttttgagtggtgagtgcccaaatgcaagtgtgaataccatatatgcgcaaagacacacaatcacactgatgacggatagaagctctatctcccagaaggtttttgtgcgtttcgctctgtcctcctgcaggtatgatatttccctgtttccgtagtttacagtgcccagtgcggcaaacatgataaagtatgataccagtgagtaggtatagctgtatgcacctattccgtctgccttaagcaccctcgagaggtacggcgctgtgataagcggtgtaatcagtgtgagtatctggtagctcacattatatatgtagtttagttttatactcttgtttttttgtgttttctttttcatgcagatatcatatcacatattgacttattttggctatgcagttattatataaaaatcgcaaattaacattactatcaacttacacgtataaattacgacaggggctaaagcctgtcacataggtggagaaatggataatattataatacgaaacaggaaagaggagtttaaggagcttgttttatacacgttttttggcaatatgacctttgtgatcagcataggctcatatgccatttttaatgtattctttggtatcaatgagctgattgcgaacgcactggcatgggtgtttgctgttcttttttcatatgttaccaacaagaagtgggtgtttaaggctgcaacgcccaccaagacggcatttttagtacagatgtttgcttttttcagtggcagattcatcacgcttgttattgaagagactattatctttatttttatcacgcttctggactatcctagcatgtgggtgaagctggcagcgcaggtggttgtggtggtgctcaactatgtgataagcaagctgtttgttttcaaaaatcgctaaatgtggtatatttaataaaataataagaactataatagtgtgtatatggtataataaaacgtaaatttaaacgcagtttatgagaagttgatttacatatggatatagaagctgctttttgcagtgtgggacagaaggagaaaatcctgtatgagtaatagacttgacatgaaaaaagatacaaataatcgaaaagacaaaacaaaatacgatggtccggagaagccggacgcatacatgggcaatgacaagcaatgggttttcagggcattggttcttgcttttattgatatgtgcatcattgcaatctcattctttttcgctttgatgatcaggtttgagttttcatattcacatattccgctctcatttttggagggttatctgcatattgtgccgttgtttatggtgatttcacttgtggtgttttatattttcaggctatatcacagcatatggcgctttgcgagcatcaatgagtttatgcatattataggtgcctttttagtacttgcggttgtgtgcgttatcattcatgaggtgtatgagattaagatgccgtacgccttctggattattggattgatgctcagctttgcactttgtacagcgtgccgttttgcatacagatttatcaggacaggtcagaagatgctggagcagagaggctctgcaaacggtgatgagaaggtcatgattataggagcaggaaatgcaggcaggatgcttatcagagagcttatcatgagctcacatctgcacacaaaggcctgctgtatcatagatgacaatccggcgaagcttggccgcttcatagacggtgtgcctattgtcggcaaccgaaatgacattccggagatggttgagaagtatgatatcacaaagattgtgtatgccgtaccttccacatcgggtaaggacaggaaggatatactcaatatttgtaaggacacaggctgtgatgtgtctgtggttccgggaatatatcagatggtggatggcagggtttcggtttccaatctgcgtccggtcagcattgaggatttgcttggaagagatccggttgttgtggataatgatggtattcattcatttttacagggcaaggtggtcatggttacaggtggcggtggctccataggtagtgagctttgccgtcagatagccagggaggatccgaagcttcttatcatttttgatatttatgagaataatgcatacgatatacagcaggagctgaagcgcaaatatccttatgttagggtggagacgctgattggctcggtgcgcaatactaacaggctgcattatgtattccagacatatcaccctgagattatctatcatgcggcagcacataagcatgtaccgctgatggaggagagcccgaatgaggcaataaaaaacaatgtgcttggcactttaaagctctcaaggattgcagcagagtaccatgtgaagaagttcgtgcttatctctacggataaggcggtcaatccgaccaatatcatgggtgcgtcaaagcgtctgtgtgagatggttatacagatgatgaacaggcagacggagactgattttgtcgctgtgcgttttggaaacgtgcttggcagtaatggtagtgttatcccgctgtttaagaagcagatagaggatggcggtcctgttacggtgacagacaagcgtattatcaggtattttatgacaattccggaggccgtggcgcttgtgctgcaggcagggctctatgctcacggaggcgagattttcgtgctcgacatgggcgagccggtcaagattgatgatatggcaagaaaccttatcaggctttcaggactggagccggatgtggatattcagattgtatacacaggcctgcgtccgggcgagaagctatacgaggagatgctgatgagcgaggaaggcctcaaggagactccgaacaagctgattcatgttggtgagcctattgagatggatgatgagctctttgagaagcagcttgagatgctcgagaaggcatgcacctcggaagcaaaggatatcaagcagatagtggcctctgtggtaaagacatatcatcctgacctggaggactaaaatatcttttgaagctcataatatagactgtaaaagccggatgtttggcatattttatgccggaagcgaggaacataattatggaaaagagacagatttcattttcaccacctgatataacagaggcagaggtgtcagctgttgctgatgcactgcgaagcggttggattacaacaggtccaagaaccaaggaattcgagaagaggattgctaagctatgcggcacggataaggctgtggcacttggctctgctactgcgtgtcttgagtcgatactcagattcttaggaataggtgcaggtgatgaggtcatcacaagcgcatacacatatactgcatctgcaagccctgctgtgcatgtaggggcagcgcttaagtttatagacgtagcacctgattcatttgagatggattacgatgccctggaagccgctattacagaaaagacaaaggttatcgtgccggttgatattgcaggtgtgccttgcgactatgacaggatttttgatattgtggagagaaagaaggctctttttcatccgtcaaatgatgtgcagagggcaatcggacgtgtgattgtggcggctgactcagctcatgcttttggtgcttcttacatgagagcaggtgagcggattatgtgtggcaatgtagctgattttacaagcttttcattccatgcggtcaagaatctgaccacagcagagggaggagcgctcacctggagacctatagagggctttgatgatgagtatatctacaagcagtttatgctgctttcactccacggacagacaaaggatgctttccacaagaatggtcttggcaactgggagtatgatattgtggctccttcgtataagtgcaatatgactgatatccaggctgctattggtctggtacagcttgacagatatgaggggcttctcaagaggcgccgtgatattatagagcgctatgacgaggcatttaagctgcttggtctcttgactgtgcctcattttacagacaggcatacatcgagcggacatctgtatctgcttcgcataccgggcatcggcgtggataggcgcaatgcgcttatagtgcagatggcggagcgaggtatcgccacaaatgtgcatttcaagccgcttccgatgatgacagcatataagaatatgggctttgatatagccgattttccaaacgcttatcatcagtatgagaatgagattacacttcctctcaacacaaagcttagcgatgaggatgtggagtatataattaataatttattggagattttacatgagtagatggagaacatggggagagattcctacattcatgaaaaatgattttacacttaaatattacaggcatctgagcagaaagaggacaagcatggtattcaaacgcttttttgatgtgattatgtccgctgttcttcttgtgctgctttcgcctgttatactggtccttgctgtctggataaaggtggatagcagaggacctgtttttttcagacaggagcgtatcacgcagtatggcaggaagtttcgcatatttaagttcagaaccatggtgaatgatgctgacaaaaagggttcactcgtgactgtcggtggggattcaagaatcacaagagtcggtgctgtcatcagaaagtacaggcttgatgagattccgcagcttataaatgtgctatgtggtgatatgagctttgttggcacaagacctgaggtggagaagtatgtcatggcatatacacctgcgatgatggcgacgcttctgatgcctgccggaatcaccagtgaggcaagcatcaggtacaaggatgaggacaggcttcttgagaatgcagatgatgtggattacacatatatccacaaggtgctgccgggcaagatgaggtacaatcttaagtatcttaagagattttcactgataaatgatatcagactgtgcatagagactgtgcttgcggtaatacattagtctgcttgtcggggaggatgatacttatgaataaagtcaaattttcagtcttactgtcaatttattacaaagaaaagcctgagtatttcagggagtgcatggaaagcatatattcacagactgttttaccggatgagatagtgctggtggaggatggccggctgacagatgagctttatgaggcaatcagtgattatgaatgcaggccttcggaaataaattttgttacggtaaagcttgaaaaaaacagcgggctcggtcttgcacttgctgaaggcataaagcattgctctaatgagcttgtggccagaatggatacagatgatatatgtgtgcctgaccggtttgagatacagctgaatgctttttcggaaaatccggggcttgatatcataggcggctacatcagcgagttttccgatgatatgcataatattatatcagaaaggacagtgcctctcggaaattatgtgataaagcagtatcagagaaagcgcgatgcgttcaatcacatgactgtgatgtacaaaaggtctgcggtgcttgctgcgggcaattatcaggactgtctgcttatggaggattctcttctttgggcgaatatgatcagaaatcactgtcgtatggcaaatataggtgagactcttgtgtatgccagaaccggtgatgatatgctgaagaggcgtggcggctttgattatttccttaaatacaaggcaggaagaaagcgtattttaaagacagggaccataagtgcggccgattattttgttacggttgcggcacagcttgttgtctgtatgatgccactttggatgaggagcctggtgtttaaaaaaatattaaggaactaaaacttttcaaatgcatgttaatgtggtaaaatcggtatagttaacattaataggcttattactagctgacacaggaggttaatataaatggaatttagagcggagtacgagaaatggtgtacagacccatattttgatgaggctacaaaggcagagcttaaggctatcgcaggtgatgataaggagatagaggacagattctatcgcacacttgagtttggtacagcaggtcttcgtggtgtaataggagccggcaccaacaggatgaatatatacacagtccgtcaggctacacagggactggctaattacatactttctcagggagaggacgcagtaaagagaggtgttgcaatcgcacatgactcacgtaatatgcatgatgagttcacagatgccacagcactctgtcttgcagctaacggaatcaagacatatgtattcccacagctcgcacctgttccggagctgtcatacgcagtaaggacactcggtacaatagccggtgttgttatcacagcaagccacaatcctcgtgagtacaatggatacaaggtatactgggaggatggtgcacaggttactccacctcatgatacaagcatcatggctgaggtggcaaaggttacatcatttgaccaggtaaagactatggacaaagctgctgctattgaggctggtctttacaatgtcatctctgatgaggttgaggagggatatttcggagagctccgcaagctttctatccatccggagattatcaaggccatggcaaaggacatcaagatcgtttacacaccactccacggcacaggtcttcgccctgtacagagagtacttaaggatatgggctttgagaatgtatacattgagccaagccaggcagtgcctgacggcaatttccctacatgtccttatccaaatcctgagaatcctgatgcatggaagcttgcacttgagcttgcaaaggaaaaggatgctgatatcgttttagcaactgaccctgatgccgacagactcggtgtatactgcaaggatacaaagacaggtgagtatgtgacatttacaggaaatatgtcagctatgcttatcggtgagtatattttaagccagaagagtgccaatggtactctgcctgagaatcctgcatttgttgagtcaattgtttctacagatatgggtaaggcaattgcggcagcatatggcgtaaagcatatcgaggttttaacaggtttcaagtatatcggagagcagatgctcaaatttgaaaaaaccggctgcaacaattatgtattcggtatggaggagagttacggatgtctgccgggcacatatgcaagggacaaggatgctccagcagcagtttgtatgctgtgtgaggtagctgccttctacaagtcacagggcaagactctctgggatggcatgattgacatgtatgagaagtatggctactacagagagggcatttccacaatgaccttaaagggtattgatggtgccgcacagataaatgagattatgacaaaggcacgtgctgctgagccaaagaaatttggtgattatcaggtgcttgctatccgtgattacaagaatgacacaagaaaagatatgacaacaggaaaggttgagccgacaggtcttccttcttctaatgtactttactacgaacttaacgataacgcttggtgctgtgtacgcccttctggtacagagcctaagattaaattctatttcggagttaaaggagtgtctcttgaagattcacaggctaagcttgatgctttgtcagctgaggttctcggacagtttgaataaggactatgatgaaaatatacatttgcccggattgtggctggatacggatggtttcaagaaggaaagaggttgaatgcttcaagtgtggcaggccgcagatgcgtctgacgaatctggagtttggaaagtatactaatatgtcggagaaggagcgtcaggactacgcagacgcgtggctttacattcataggaaaaaggaaaaataacatggcaaagaagagaagaagaaaaaagagaagaagtggacgtaagaagattatactttttgtatttgaaatcctgttgctgttaattgttctgttagtggtttgggcttataataagacactcggacaggttaaatatgaggatgcgctgacagctagtgaggccggaatcaatgaggatattgatgatgatgctcttgccaatatgcatggatatctcaatgtagcgttgtttggtctggataacagaagtaatggttcatacaatgaggggcattccgattgtatcatgatcgctagtctgaattatgatactaaggaggttcagcttgtttctgtctacagagatacgtatctgcctataggcaatggaaagtttgcaaaggcaaatgcagcatatgctaatggtggggcaaagagagcagtagctatgcttaattcaaatttggatttgaatattacgaagtatgtttgtgttgactggaaggctctcgtagatgctatagatgatatcggaggtcttgatcttgagattactaaggcggagatgaaggaaatcaattatctgattcctgaggttgattatactacaggatataatactccttatcttgagggggatggtatgcagcatcttgatggaactcaggctacatgctatgcacgtatcagaagcacctctggtgatgatttcttaagggcatcccgtcagagaattgtgcttcaggctatgcttgacaaggctaagcagtcagatttaggctcgctcacagagatgtgtaaggatatcatgagtcagataagtacaaactttacagctaccgagatattacagtatgcttcttatgttacaaagtttcagatgaaggagacaacaggcttcccatttgagctgactacaatgaatctttcatctactggggatacagttattccaattgatttagcacagaatgtttccaaacttcatcagtttctgtttaatgagactgattatcagccaactgagacagttcaaagtgtcagtgacaagattgctaaaaaaacaggtgttacgtcaaagacttctgcatttgatctctcacagtacaatgatactgttggttctgatggaaccgaaggggcaaagaaaaagaataaggataagcaggattcattaaagaacagtcagtcggagtctgaaaataattctggaacgaaatcatcatcagatgattcagatgagtaattacctgatggtatttatttagctgttataagcaataagttttataaaacaatatttatatgaacaatatatccggggccaatcaatagattggtcccacataatttaatatgattaataatgtaataacctataactaatgaatagttaatggaaaatcaatgattaaataacaactaaattacaagaacaagggagaatttatgaaaccggaaatcaaagaaaaaatcacggcaacaaaccagaaatacttaaagaaattcttaacagaggaagctccggctaagcttgagagccagcttgagcacatggactggtcataccttgatatgattcacaataaggagcagcagagaggtacattttcaccgcttgctgctatggagctttcagagatagaggcaaataaggacaaataccttgcaacaggttttgatgctgtcaagaatggcaaggttggtgcaattcttcttgccggtggacagggtacacgtcttggctttgacaaggctaagggcatgttcaatatcggaaagacaaaggaactctacatctttgagcagcttgtcgcaaacctcatgaaggttacaaatcagaccggtacatgggtgcctctgtatgttatgacaagcgagataaatgatagcatgacaagagagttctttgaagagcacgactattttggatacaacaaggactatgtgaagtttttcgtgcaggagatggttccggcagttgattttgatggaaatctgctcatgaaatctgaggattcacttgccatgtcaccaaacggaaacggtggatggttcaagtcactcatcaatgccggtcttgacaaggatttgaaggacaagggtgttgagtggctcaatgtatttgctgtggacaatgtgcttcagcagattgcagatcctgtatttgtaggtgctacaatcgagtccggctgtgtcagcggttctaaggtggtcagaaagtgcgatccatacgagagagtcggcgctatgtgtcttgagaatggcaagccttcgattgttgagtattacgagcttactcctgagatggcagaggcaaagaacgagaatggttcattgcagtatggctttggtgttatcttaaactatttattccgcgtggacaagctcatggctatcgcagagaagagccttccacttcatgtggtagagaagaaggtgccttacattgatgagaatggtacagagcataagcctgagactccgaatgcatacaagttcgagacactcatcctcgatatggtatacatgatggacaatagcctgccatttgaggtagacagagagaaggagtttgcacctgtaaagaatgcgacaggtacagattcggttgaaacagcgagagctcttcttgagaagaacggaattgaaatttaatatatgatttatggtaactgttcattagcagggatgtattgatattctgcaatttctatttatcgcagactcataggtgcatctgccgatgagcagttatttttataatcgcatagtggcctgcaatggggaacatagactataaatagttaactgatttatgaaaaaataaataatcccgtcacaaattaaacacagattgacagtatacttctaaatataaacgaaaggagaaattattatggataacaattatggaaatatgaatgacacaaataatacaaataatactaacagtacaaataacaatacaaacaatgtaaatttcacaatgtcgggtaatccttacaatccggatgagtcacagaaggctgcacagactaataatacatcagctgaaagctattcacagagctacaatccatattcgcaggcttctgcagcaggacagccaaatacaaaccagtcatatgcaaatcagtcatatgcaaaccagccttattctaatcagtcgtataattcaggcacaaataataatgcatatggcgacgcatcagccggttcgacagacaactcatatagccggatgaatatgaatggtcaggcataccagcagactgcaaagcctaagaaacagagagcacctagaaagcctggtgcatttggaccatttgcagcaaagacagtagcggcagctcttatcttcggactcgtcggaggcggtgttttcacaggagtaagctatattggcacgagagctatttcaaattcttctactgcaagtgcaaagcttaccactacaacatccggtgggactaagcagacatcctcagggaatgcaaaggatctgacagatgtatcatcagttgtcgatgaggtaatgcctagcatcgttgctatcacaaatacaggaacagtcacctacaacagctttttcggaaagcagtcacagcagtctcagagctgcggctcaggtatcattgtgagtgaggatgatgattatctctacattgctacaaacaaccatgttgtggcagattcagaggagctcacagtacagtttgatgatgattcagtggtaaaggcagaaatcagaggaacagatccggatgacgatctagcagttgtacgtgtaaagaaagcagaccttggaaaagatacttactcaaatatcaagattgctacaatcggagattctgaaagtgtagctgttggaagtcctgcaattgctatcggtaatgcacttggatacggacagtctgtcacaacaggtatagtaagtgcgcttaacagaactgttactacacaggattcacagacaggtgagactgttaccaacaacaagcttatccagacagatgcagcaataaaccctggaaacagtggtggagcactcttgaatgaaaatggcgaggttatcggtataaactctgtaaaatattcttcaactgaggttgagggtatcggatatgcaattcctatgtcggttgcaaagcctattattgagagtctcatccaggatggaaagtatacaaacgagaatcaggcataccttggaataaagggtggcgatgtttcatctgagatggtagcctacggcttcccacagggtgtgtatgtttcatctgtttcagctggttcaggtgccgcaaatgccggtttacaggagggagatatcatcactgctgttgacagcacaaagatttcttctatgacagagctgcagtcagcgttaaagagctacaaggccggagataaggttactcttactgttgcccgtcagagtggcagacagtacgaagagagcaaggttgaagtaaccttaagctctgcaaaggatattcagcagtaaataattcatttatatttatgagtacaaaaacgcgccagtgtggcgcgttttttgttatgaaaaatatagttaggggttgattttctaaataaaaaggtgtagtattatgagtgttcataaaaatataaggagaggcgaacgtgaacaaacaagagaaagatatactgaacacgttatatcatcaatcagttaacaatcaaagagagatatcagagttatccggtcattctctgggagttgtaaacaaatcaataaaagaattgatgaatgaaggttatataaatgaaaaatgtgctgttacacctaaggcacttaaagaattcaaagaaaaggctccgaagaatgcagtaattctggcagctggttatggaatgcgaatggtgcctataaataccgagactccaaagggactattagaggtaaatggagaagtacttatagagcggactatcagacagcttcatgaagtgggaatttatgaaatatatgtagttgtcggctttatgaaggagaggtatgagtatcttatcgatgattttggtgtagagctcgttgtcaatgaagagtatacgactaagaataatctatattcagtaaagaaggttctgaatcatttatcaaatacatatatcataccgtgtgatatatggtgcgacaagaatccgtaccatcaccatgaattatattcctggtatatggtcagtgatttgattgatgatgacagcacggtgcgtgttaacagaaaaatggagttggttaccattccgaaggctgccggcggcaatgctatgataggaattagctatctgcttgacgatgatgcacaaattgtcaaaggcagaattgaaaaattgtgtagtaattcggctaatgatggtgccttctgggagactgcactgtatgataaggacagaatgtttattaccgccagggtagtacattcgtgggatgtggttgaaattaacacatatgagcagctcagagagatggacagcgattcaaatcatctgaaaactgatgcaatacaggttatctgcgatgccttatctgtatcagcagacgatattgtagatattacggtattgaaaaagggcatgacaaaccgctcgttcctgttctcatgtaaagggaaaaaatatatcatgagaattccgggagagggaacggatcagctgataaacagacgtaatgaagcaatggtttataatactattgatggcagacatatatgtgatgatatcgcttatataaatccggataatggatataaaatcactgcgtttttagaaaatgcgagagtatgtgatccggaaaataatgatgatgtttgtaaatgcatgaagcgtctcagagaatttcatgatatgaagcttaaagtaaatcatgaatttgatatattcggtcagcttgagttttatgagagcctgtgggatggttcgccttctgcatacagacattacaggcagactaaggaaaatgtcctttcactcagaccgtatatagaagctcatgtaaatgaaaaggttcttacgcatattgatgctgttccggataatttcctttttgttaaggatgaaaatggaaatgaggacatcagacttattgactgggaatatgcaggaatgcaggatccgcacgtagatatagccatgttctgcatatattccatgtatgacagggagcatgtggataagttaattgatgcatatttcacagaagggtgttcagctgaaatccgaataaagatttattgttatattgcagtatgcggacttttatggagtaactggtgtgagtataagagaaatctgggcgttgattttggtgaatattcacttagacagtacagatatgcaaaggattattacaaagtagtacaggatgaaatgcagaaattggaggataattaagaatgcatgaagtaaaacgcgcgattattatggcagcaggactgggaaatcgtatgagaccggtaacgctgaccactccgaagccattggtaagggtgaatggaaagcgtatgatagatacggttattgcaggtttacatgataatggaataacggagatttatattgttgccggatatttaaaggaacagttttatgaattagagaatgaatatccgggagttactataattgaaaatccttattatgaaagctgtaataatatttcatcactatatgttgcaagagatcatattgaggatgcaattattcttgatggggaccagattatatataatccgaaaattctttcaaaagagttcgaacgctcaggttataacagcgtatggactgatgaagaaacagatgagtggcttcagacagtagaagatggaattgtaacatcctgcagcaggagtggcggaagtcgtggatggcagctttatagcatctccagatggacagcagcagatggccgcaaactgaaaaaacatctggaaatagaatttgaaaacaaaaaaaatactcagatatactgggatgatgttgccatgttctgttatccggatgaatatcagcttggtatatatgagatgcaaaaaggtgatattattgaaatcgacaatttgcaggagcttgctgaaatagatagcagctacaagaaatatatggaggattagtattatgaaagagaaaaaaattgattggattatcacacttgtgccattagcaataattgtagcattgtgtattttattttttgcattacctgagcagtcaaatgctatactcagtcaggtgagatttttctttggagatacgtttgggatttattatctgattataggtttaggcatatttttgatatcgatatttatagcaggctcgaagtatggagatattgttcttggagagccggatgaaaaaccaaagtactcattcttttcatggggatgtatgatgttcacatgtggtctggcagcagatattttattctactcattttctgagtggattatgtatgcaaccaatccccacattaaggagcttggaagcatacaggaatgggccggtgtatttcctttgtttcactggagctttattccatgggcgttttatcttgttttagctgttgcatttggttttatgcttcatgtaagaaaaagaaaccgtcagaaatattcggaagcatgcagacctgttcttggaaaacatacagatggttttgcaggacgtattatcgacctgttagctgtatttgcgcttttagcaggaacagcaaccacatttagtgttgcaacacctcttatggcaacaattatcggagatgtgttccatatatcgcttagcagaaccgcaatcaatatcattatccttataattacatgtatagtttatacatactcattattacatggatttaagggaatcagcattttggcaaaagtctgtatctatttcttctttggactgcttgctattgtactgctgtttggcggtgaaacaagatatattcttgagaccggattgtcatc

SEQ ID NO: 1092 - DNA, 48418 bp, unidentified
  source 1..48418: mol_type = unassigned DNA
ctgtcaaggagaaggcttccaaggctgaggctgaggacatcaagaagaagctggaagaggctggcgctaaggtcgagatcaagtaatttgatcccttctgaacgttctttcttgaattcttattcttgaaacaaaaggcactctcgctgaaaggcgagggtgcctttttggctgtgcgcccgcagcagggcaaaaagctcccggagcagtggcactgaatgccgcaccgctccgggagctttggttttgcttcgtttattcgtagtcgatgggcagggtgggcagaccgttcagatcaaggcccgccgtgtggcccgccatgtactggtagtagccctgcgccgcgatcattgcgccgttgtcgccgcagaatttcagctccggcagatagaccttggcccccagtttctgggcaccatcgttcaccagctgacgcaggcggccattggcggccacaccgcccgccagacagacctgcttggccccggtgtcggcagcagccagcagcagcttttcggccagaatgcccgcaatgcgctcctgaaagcttgccgccagatcaggcacgttgatctcctcgttcttcatctgggccttgtttacctcgttcagcacggcggttttcaggccggagaagctgacgttgtacttgccgtccacatggggtaccggcaggcggtaggccttggggtcgcctgttttggcggcatttgccacgctggggccgccgggatagggcagacccagggtgcgggcaaccttgtcaaaggcttcgccggcggcatcgtccacggtgtggcccagaatgtggtagtgggtgtagtcctgcacctccacgatatggctgtggccgccggatgccaccagacagaggaagggcggcttgagctccgggtgggtcaggtagagggccgcaatgtggccccgcaggtgatgcaccggaaccagcggcttgttggcagaataggccagccccttggcaaagttcacgcccaccagcaccgcgccaatcaggcccggcgcaaaggtgacagccaccgcgtccacatcgtccatggtcttgcctgcgtccagcagagcctttttgaccgtggcgctgatgaactcgcagtggcggcggctggcgatctcagggaccacgccgccataaagagcctgctccttgacgctggtggagatgacgttgctcaacaggcggcggccatcctccacaagggatgcggcggtctcgtcgcaggtggattcgattcctaaaacgatcatagttcagtgggcctccagccagtttttgccagtatgcacatcggtgctcaggggcaccgcgtagtgcacgcagccttccatttcctcccgcaggatctgcgcggccttttcggcctccgcctccggggcttccacgatcagttcatcgtggaccgtcaggatcaggcggctttccatcttttcgtcccgcagccgccgccagacacgcaccatggccagcttgatgacatcagcagccgtgccctgaatgggggtgttgcgggccatccgctcgccgctggcccggatgttgtggttgttgctgttcagctccggcagggcgcggcggcggccgaacagggtggaaacgtagccgcactggcgggcatccgcaatggtcttttccatataaccgtcgatattggggaaggtggccagataggtctgcaggaaggcctctgcttccttgacgctcacgccgatgtccttggaaaggctgtaagcgcccttgccgtacatgatgccaaagttgatggccttggcgctggagcgcaggcggggcgtgacatcctcaggccggatattgtagatcttggctgcggtgctgcggtggatgtcggcaccggagaggaaagcctcctgcatgtgcgcatcgccggtgacatgggccaggatgcgcagttcgatctggctgtaatcggcatccaccagcacgcagccgggctttgccacaaagtaggcgcggagcttgctgcccatctcggtgcggatggggatgttctgcaggttgggattgtcagaggagagccgcccggtgcgggcctcggtctggttgaaacgggtgtgaatgcggccgtcctcgccgatgaccttgagcagaccctccacataggtggagttcagcttctggcaggcacggtactggagaatgtcctccaccagcgggatgtcccgcagcttttccagtgtctcggcatcggtggaccagccgttcttcgtctttttgccatggggcaggcccatggtatcaaagagcagggtgcccagctgtttggggctgttggggttgaaatcggaggtgcctgcctccatctcgatgcgggtcagcacctggtccagctcctgccgcagctgcacgccgaaggcttcgatgccctcacggtctacaaggataccggtgcgggtcatatcggccaacacctgtgccagcgggaactcaatgttgttgtagagctcgtcctcgccgttttcggtgatctccgccttcattctggcgaacaggtctgccaggaaaccggcatcggggtattcctcacaggagaacgctgatcttgcatggtagctggtggcaagggtggtgagcagatagtgggaagcggaagcgtccagcaggtaggcggccagcttgccgtcccagacgatgctgctgccccagctgcctgcggccatggctctggcgtagaggggggcggaatcgaatacatccagcgtcaccttggggtcgtccagcagggagaccagttcctcctcagagaggggatacacggtggtatcctgcacggcgtaccaggcctccggctgcacgatcgcgctctttttgcccagaacagcgggacgcgcggccaccagatagtggccggagggctctgcgggcagggacgcaatggctgcgtccacctccggcagggtgtcggggtcctgttccggaacgatgccgtccagcccgaaccgggtgatgagggtctggatctccagctcctgcatcagacggacagcggcgggcttgttgccctcggtcaccttgtaggccccttccgctgtgtcgatgggagcatcggtgcggatggtgcccagcgtgtggctgaggtaggcatcctcccggcaggccagcaggttttcccgctgccggggcttgatgatcgggctgtccagatggtcgtacacgctgtccagggtgccgaagttcttgaccagggtcatggcggtcttttcaccgatgcccttcacgcccggaatgttgtcggaggtgtcgcccatcaggctcttcacttcgatgagctgccggggttcgatgccgtacttttcgtggatggcatccagatccatggtctccgttttgctgcggcccatggcgctggtggccagcagcacggtggtggtttcgctcaccagctgcaggctgtcgcggtctcccgtggccagaaagcagtcgtccctgcgggcctcgcaggcagcggccagcgtgcccagaatatcgtcggcctcccagccctttgccgatacctggcggtagcccaggtcggtgagcagttctttcaggatgggcatctgctgggccagctcgtccggcatggcgtggcgggtgcccttgtagccgtcgtacatttcgtggcggaaggtggggtgcttcagatcgaaagcaacggccacctcgtcgggctcacactcccggagcagggaattcataatattcaaaaagccgaagatggcattggtatagcggccgtccttggtggtcagcagcttgatgccgtaaaaggcacggttggcaatgctgttgccgtcaatgaccagtaaacgcatagtcagtctcctccattgcactataactcaatttatagtataacacaaaatgggggccagcgggggatttttgcagaaaaaacaaaaatgccctcccgtgttgggaaggcaggcgaaggtgttactccgagatggtgatggcactcaccgggcaggcctgtgcggcttccacggcggtggggacggtgtcgggcggcagctcgcccggcacagcgacggccaggatgcctgtcatctggaacacctcggggcagatcccggtgcactgggtgcagccgatgcagagatcggggtcaacgaatgctttcatgggaagttcctctctttctgaaatggcccgcccttcgttcaatctcagggtcggcttgtgataaagcaagtatggacggaaagaagatgaattatccctaggttttttccggcagatatgatacaatagagcacacaggatccaggaggaaaaacgatgaacattcagatctttggcaccagcaagtgctttgataccaaaaaggcccagcgctatttcaaggagcggggcatcaagttccagatgatcgacctgaaggaaaaagagatgagccggggcgagtttgagaacgtggcccgcgcgctgggcggctgggagcagctggtaaacccggcggcaaaggataagcagacgctggccctgctggatgcactggtggattggcagaaggaggacaagctgttcgagaatcagcagctcttcaaaacgcccatcgtgcgcaacggcaaaaaggccaccgtgggctaccagcccgagatctggaaaacgtgggaataaatcgcgctttcacaaaaaatccacgccccgggttttgcaccggcgggcagtttgtggtatactgaaagctggtatttccccaaaagatgacctgatttaggagacgataacgatatgaagacctatatgaccccggaagaacacgcccggctccaccgccgccgcgcccggcagacccttggcctgctgatcgccgtgctggcactggtgggcgttgtaacagtcgtgcgggccggtgtgaagggtgtggccaccctgtttgacgacacccagcagaaagcggaatatgaggaccggctggaaggtctggtcctgttcgacccgctgccctttgacggcattgagaacatcgatgacctgaccctgcgcgaagccgccgtctggggctgcgtgtacagcatccaggagacccagggaagctttgataactacaacacggaccccgacaccgaacagctgctgctgccctcggtggatgtggatgcctatctggcaaagctggtgggccccagcttcaagctgacccacaggagctttgagatggacgacatgactgtcgagttcgatgagacgacccagtgctataagatccccgtcaccggcagcgtgggcactttccgcgctaccgtcaccagactgttcaagaaggacggcctgctccacgttaccgtgggctatatccccacccagagcagtgatgacagcatcctgaacacctcgtccgacacgcccaccaagtatatggattacctgttcagccgccagagcggcagctggtacctgaccggcctgaccgacagcgagaccaagcccgaatctgccgacagtgcagcctctgccgcggagcctgccccgctggctgagagcgaggtcaacgatgccatccttgccaccgcaggcgattctgccgccgccagcgccgttgctgacgaggctgccccggtggaagaggcggcggagagtaccccggctgagagcaccccggctgagagcaccgaggcttcctctgagagcccggcggcataaagcgaaaaaactatcaaaacggactccccactgtgagtgaatctcacggcggggagtttttttcatctgttacagcttcgagagatcttccagcagggccagagcgatgggcttgacacgcagagaacaggcgttgaataattccactactcgatcgttcgcatagtccttgcgggccacttccgtgttggtcagaatcgctgcaagctcagtatccagctcggtgcagatgttagagagggtttccagggttggatagacccgcccattctcgattttggagagatataccaccgagatgccaacctgctccgccagcttttcctgtgtgatgcctttttccaaccgctgtgtttggatgcgttttccgatgagagtatagtcgatcatgtcatgggcctcctgtagatgtcttatactgacaatacaggattaaactgaaagaataataatctaatagattaacttgacttattaagacaataatactataatgaaatcagaatcctcaggatattttgtggatttttaggcactgaatgaattggggacgtaaaaaggaggagaaaaccatgagacaaaaagttacacgccgggattttatgaaaggagcggcgatcgttgcggcatctggcttgttggcaggctgcagcggtggagaggggccggcagctcccgacaattcggagcagcccggcacctcggaaaagccagcggaatcgaacagcaactcttccagctcttctgaatcggagagtacttcttccagtaagccggaggaaacgaatggaatcaaatggacatacagcaaaaactctgatggtacgattacactgaagggctatgataagaatgccgaaaaggtgcccagcggagagctgaccatcccagaaacgtatgagggatataccgtcagcaaaatcggctatatgtgcctgtcccagaacaatgatattgagagtcttgtgattccgtctgtggtgaaaacgatagaccagcaggctttctatcagtgcaagaatctgacgagcgtagttttcccggaaggcttaaaggagctgggacaaagtgcattcaatggctgtaacattgagaatctggtactgccggagagcctgaccaaagccggaaagcaggcgtttgccaacaacactgcaatggaaactgcattcatcaagggcaaaacggagtttgtgcagaatacgtttgagggctgtacaaacctgatctcggtaaaattcacaaacaccatccgtgaactgcccagctatatgttccagaattgtgaaaagcttcagactgtgcaattccccaacaacatcaaaacacttggaagctatattttccggggatgcaagctgctgtgtgatgttaccattccggacacagtaacgacaattggtggaaacgctttcgcaaactgtacatctctgcacgctatcgagattccgaaaggtgtgacggaaattgcaagcggaacgttctatggctgcgaaacgctttcggatgtgtcaataccggaaagcgtaaagacgattggttccagtgcctttacgagttgcacttcgatcacaaggataaagcttccgatgcaaatgagcaaaattgacagcggtactttcagccagtgtagttctttgcggaaaattgctctaccagaaggacttgcttctattgaaggcagtaccttctggaaatgtgtttctcttcaggaaatctatatcccggcgacggtaaagacggttggtggaagtgcattctatgcctgcaagagtctgaataaagtctatttcggtggaagcgaagatctgtggaaccaggtcgtgatcgtagatgattatgaccatggcaacaaatatctgactactgacattatgaaccgctactggaaccagactgcggcatcaataggctactgaatcgaattacaaaaatcccaccctctgttccgggcatttatgtgcccgatgaacagagggtgggatttttacgttacttcagatcaaacctgaccacgaccagacgataccacaggtagggcaccatgttccagatcatccacagctccatgagaatatagttgggcagatccttcaggcggaaggggcgcttgccgagcctcccctctttgagcagggcgaaggcttcgtgcattcccttgtcccaggcttcgccaaagccctgcttgtggaacttgtagcacttgagcagatagcccagcgccagcgggagaaagttcaggatgagcatgagcagcggctcgttcttgagggggagcaggatgctgttccggccgctctgctggctcttgaaggcgttgtacttcaccgcgccggtgctggcaccgcagatgtggtagcatctggcggtggggcagaggacgcacttgtagccagcgttgttggcacgccagctcaggtccacatcctcaaagtaggcgaagaagttctcgtcaaaggtgccgatctcctccagaatgctcttgcggtagagcgccgcgccgccgcaggccgagaagatgcgcttctgcctggtgtaacggctggcccggcggccgtcgccggtcttgcaggcaaagcccatccaggtgacgtaatcaccggcatcgtcggccagctcccgttcaaagtggcggagcatcaggctctgcacggcaaaaattttgggatcggtctcggcggtgcggatgagctcggccagccagtcgggctcggcaaaggcatcgttgttgaacatgaccacatactcgcccctggcccgggcaatgccctgattcacggcgtgggagaagccggtgttggtgccgttttcgatcagggtgaagttggggcggccgcagtagctgcgggcctgctccagactttcatcggtggaaccgttgtccacgatgatgagctcaaaatcctgctctgtctgggcatagaccgactcgatggagtccttgagccagcctttgccgttgatgttggggatgacgatggttgctttcatatatagatgctcctgaaaattcaacttcagggcagattataccataattgcgttgaaaaagaaaccggcagttgagagaaggcgtgggaagcacgatgaaaaacttttccggacttttgtagcaaatatccaactacttcactgtacgattgtgcaatctgccctttaattgtgaccaaagcgtgtaaatattgagaaaatggctgcaaaactgtttacaaaagagtaacagaatgatatactttacaccagtgaatgaaacgctcttttgtgaagaaaggatactgacgtggaaacagccaagcactttggaagcaaacttcggaaaactctcgctgccctgcttgcaacgatggccctgatggccgtgctgctccccggggcactggccgtggacctgaacgttgatgttgggttctacttcaaacagagccggggcggcacctgcaccctggcctctgccgcaatgatgcttcgccgccgggcctatctggacgggatggacagctgggtggatgtgaccgaaaacggcatcaagagcacggcctggtcgggcgggctctcccacagctttacatacaacgatatgcatgtgggttatgcgaccctgccctcgggcaaggcggccaagacgggagcgctggtctccattctggcagagcatccggagggcattgtgctgtacgaccgcaccagaccccatgccgtgctcctgacggactacaccgacggcgtgttctactgttccgatccttccaacggggttgcctccggccgtgtgccgctgtctgccgccagcatctccattggcggcgcgtcctgctactggtacatcaccgaggatggcaatgacgatggtctggagcttctggaagaggctgtgcaggcggaggaagccgccgcggaaactgagaccacggcggagacagaagccgctgctggcgaggaaagcagcagtcaggattggtggacgagcctgtttggctgaatattgatcttctgggcggctggccgttgggtcagctgtctttttttattagcatcctcaccctctcaggccgcttcgcgtccagctctcccaaagggagagctcttgacaaaaccgcaaaccttgcatttactgccaaggcctcccactttgggggaggtggcatcgcgtaagcgatgacgaagagggtgagcccgttcacctccgcagctctgtccccgggaaatagtgcgccagaatttcctccgcgctctgtccctgctcggccagcgccttggcaccccactggctcagccccacaccgtggccgtagcccttggtggtgagaagaaagctgccctcctgatactgcaccgtgaagcaggcactccgcaggcccagcgccttgcgcagggccgggccggtgacgctctgcccacagacgggcagagaggctacatagcccgaagaggtgagcgcggcctctccgaaccagctggcaggtgcagcaggatcagggagcagccccagcccggtgagagcctgctgcatctgctcggcggtgaattggacggtataaaggtagttgtccgcattgaggtcggtggagctgtccacggccacaagatagggaagggcagtgccccagacgttttcgctggcctcggtcatgccgttggagatggcaaagtagcttgtcccggcgggggcgctgccatagtagagcacatcggtcagtacactgtccaccagcgccgagaggcgggcatagttttcctcataggcggtgccccagtagctgcggaggactgcatctgttaagtatccctgccgccggacggggtccacgctcagccagccggaagccggttcggcggcatggtcgcggcagtagagggcatagctgtgggccgcgatggcctgcgccttgagcgcctcgtcgggccagctgatgggcatttccgccgccacggcaccgatcagatagtcccgccggggcaccgagaccacggccccggcgctctggtcggccagcagaaagctctcgctgtcctgatcggagggcggcacggcggcgctgtccggggcggcttccgaagttgcagcgtccggcaggggagcggaagaagccccctgtgccgggccgaacaccgccagtgtcagccggtaaccggcgatcggcaggagtgcgcccagcaccagcagcagggcgcagaggagaaagaatgtctttttcatcgtagttttccctcccggacaggcatttttctgggcccagtgtaccagtacggcggggtgaaaaagcgcacatttcatccaagacttgaatttacttcacaaaagcgctatcataagggtgtgccatcatggtggatggccggaaagtatatataagagagaaataagagaaaggggaaattcgcgcatgaactatacccatgcaggagtagcgtcgctggacccgcagaccatgcggacgctgtgtgaagagtatctggcaaacaactacatcgacccggagacgagtgagcgtctcggtgtcaagcgcggcctgcgcaacccggatggcaccggtgtgctggcaggcctgaccaatgtctgtgacgttgtgggctacaaaaaagatcaggaagggcatgtcattcccattccgggtcgtctgatctaccgcggtgtggacatcaacgagatcgtgaacgaggcttaccgcaatgaccgctttgtgtttgaagaggtcatctggctgctgctgttcggcagcttgcccacccaggagcagctggacgatttctgtgagctgctggcagagcaccgcgccctgcccgatggttttatggataccatgaatgctccttcgcccaatattatgaacaagatgcagcggtgcgtgctgggcctgtattcctacgacgagcacgccgaggatctgacgctggagaatatcctgaaccagagcatcaatctgatcgccagtatgcccaccatgatggtgaacgcttaccagatgaagcgccgctattatgacaagcagagcatgttcttccacatgcccaagcccggccagagcacggcggagcacatcctgagcacctaccgcccggaccagaagttcacccacgaggaagccaagctgctggatatgtgcctgctggtccacgcagaccacggcggcggcaactgctccacctttaccacccgtgtgctgtcctcctccggtacggacacctactcggccatctctgcggccatcggtgccctgaaaggccccaagcacggcggtgcaaacctgatggtcaaccgccagctgcaggatatcctcaagcacgtcgagaacccggacgatgacgatgaggtgcgcgagtatctgcgccgcatcctgcgcaagcaggcgggcgacggctccggcctgatctacggcatgggccatgcggtctataccatgagcgacccccgtgaggtcatcctgaaggagcgcgccaagcacctggcctacgagaagggctttgaggaagagtacaacatgctgtgcagcatcgagcggctggctcccgatatttttgccgaggagaagggcagcagcaagccggtgtgcgccaatgtggacctgttcagcggcctgatctacaacatgctgggcatctctgaggatatctacaccccgctgttcgccattgcccgtgtgccgggttggtgcgcacaccgggtggaggaagtcatttttgccaaccggatcatccggcccgcctataagtatctgggcgtgcgccagaaatataaaccgatcgaggaacgctgatgaacgctttatttgtgctgattttcacctgtggtggtgcccttgccattgggcgcgggctcgacctggccctgtggacggactggaataccggcctgtgcacggcgggctctgtctggctgcggtacggcggcctgtgggcggcgcttgtcgttggtatcatcgccgcccggaagctggcccgccagccccttgttctgcgcagtgcgtgcaggccggtgggagctacatcggtgctgggcggcgtgtgtgtcggcctggccggtgcggtgcgtctggcagtgggcatgaccggcgttggcgcgctggtgcgtgccgtgctggagctggtgtgcgctgtctggctgatccagctgggccgcagctggacgcataagggagaataccgtctgcccggccggagcatgaccccggcggtgcttggcacggcggtgttctactggggggtgctgagccgctttatggagaacagctccagctggcaccgggtggagccgactgccatggtctggcagatgctggccgcgctggtgtttctttcggcgatggtccgcgccctttggttgccggaaacgtccaacggctgccagctgtgcgaggccgggatctgcacgttcctgctctgcttctgctgggagctgccccgggtgctggtgctgctgttccacggcatcacggcggctgacctgcccgaggtgctgtttggctttggcatgtgctgcatcggtgcgctggggcttttcactgtggcacgggtggcaggaagtgacggaaggcctgcaataccccgacacgccgttggttgaattgctgaaaagattcccataaaagctgtgaaaatcgttcaaaaacaaaaaagtgtgaaattaccttgttaattttttggcgggcacttgaaggtttccgcaatttggtctataataaagctaccgtgattattatccgataaaagggtaagaacatttaggaggtactattaacatggctgttagagttgctatcaatggttttggtcgtattggccgtctggctttccgtcagatgtttgatgctgagggttacgaggtcgtcgcaatcaacgacctgaccagccccaagatgctggctcacctgctgaagtacgatactgctcagggttctttctgcggcaagatcggcgagggcaagcacactgttgaggctaccgaggactccatcattgttgacggcaaggagatcaagatctacgctgttaaggatgcaaaggatgctccttggggcgagctgaacgttgacgtcgttctggagtgcaccggcttctacaccagcaaggagaagagcatggctcacatccaggctggcgcaaagaaggtcgttatctctgctcccgcaggcaacgacctgaagaccatcgtcttctccgtcaacgagaagaccctgaccgctgaggatcaggtcatctctgctgcttcttgcaccaccaactgcctggctcccatggctgacaccctgaacaagacctaccccatcgtttccggcatcatgaccactgttcatgcttacaccggcgaccagatgatcctggatggtcctcagcgcaagggcgacctgcgccgtgctcgtgctggcgcacagaacatcgttcccaacaccaccggtgctgctaaggctatcggcctggtcatccctgagctgaacggcaagctgatcggctctgctcagcgtgtgcctgttcccaccggctctaccaccattctggttgctgtcgtcaagggcaaggatgtcaccaaggagtccatcaatgctgctatgaaggctgctacctctgagtccttcggctacaacgaggatccgatcgtttcttccgatgtcatcggcatgcgttacggctctctgttcgacgctacccagaccatggtcgctaagatcgacgacgacacctatcaggttcaggtcgtgtcctggtacgacaacgagaactcctacacctctcagatggtccgtaccattaagtacttcgctgagaactgctgatctcgtagctgcgataaaaattgaatgatttgtcgactggagtttgtcttgctcaactacgaacaagcctgatctggtacgacaaccattttagagatttttgcaccctttcttttgtggttcttccatgagagaaagggtgttttttatgtgtttgaaggatctccgcgatgaatttctgtattatgttactgttcgacaccgggatgcgctgtaatgagatgatcctgatggagccggaagacatcaaaccggactatattctggtcaagcaatgatgcaagaaattattttgtttgtcttatatatagaacatagaataggctataatgtcttatatgatagacaaaatgagcagtgggagaaactactacaaacaacgatctgctgaagaaaattgctgcaaccgtgaccgaaccgcaccaccatatcatcgtgacctacgaggaagattctgacattgaggtagacggtgttgcaatttcggtcgttcctctggttgattttttactgacaacgtgagattcctgcgaccacaaccgtatgaaccacatgattcatgaagcaaaaacccggtggtgcggatcaccagcatccggggggtagttaaaaatctggtaagggacactgacccggtagaatgagatagttgttccatctccccagaccgaattagaatctagcagcaaaaggcctctgcctttcacagaaatgtgatggacaggggccttttagcgtaaaaaaaaaaaaaaagcctgacccatacaaaagagcacaaatcaggctgacaatggatatgaaattctaaaattcacttagaaaagagagtacgcgttgcagggaaagtcgagcagatcgttcggtgagctattggttctcttgctccagttcatcgaacagcgcacaggaaaagaactgaccaagcgtgatatcaagaccatcacagagctttttaatggtggcgatggacacacgctgacgggatgggtcaagcatactatataccgtagatggtgttacaccggcacgggtcgctaactcgttggggcgtatcctacgctggtcgcagagttgttcaaagcgtttggcaacggcatcttttacagtcatgatgaagttcacctcaacatgatagtacagaagttcgtgcggttttacgtacgcagttgcgtatatcgtgaaagtattttatgttgtagagaatatgtggctgcgtaacgacaaagaatatatttaacaaaaatgtatcctccacatggaaaatggaggataccgttcctttgacatcgttgtctataatctcatcttattttatcatagttatatctgggattcaatagaaatcatcataaatgtatcacatttgaccctgaaaaaacatcgcgaaggccggattgtttttgtatcatgcctagttctgtataataattccagctgtaaacgaagattgagaaaataaggggtcagatgagggtctaaacagcaggaggaaacagcgatggcgcgacggggagaaaacattcgcaagcgtaaggacggtcggtgggaaggcaggtacatcaaggcgcgcacaccggaggggaagatccagtggggttacgtttacggaacggcctatgcggaggtcaaacgggtactaatccagagaaaagcggaggcggggttctataacctgaatcaaaccgacctgacctttgaagcactgtccgaggtatggctgtgctctctgaaaaatgctataaaagaatccacctatgcgcattattcgtacacgctgcacaaatatcttcttccggttttgagcaaggtgcccgttgcatcccttgaggaaagctttctggaacaggccatgcagcaaatcatcacgcccacagatgcggcacacaagccactgggaaactcctctgcccgggaatgcctctcgatgctgcgacgtatctgcaaatatgccgctcatttacgtttgattcgtccaatggagctggaagttgcgctgccaaaagccatcgacaaaatttctgcgcctctctccccggcggaacagcagcgacttcatcaatatgtacaggcgaaccccacgcctcgcaaaatcggcttactactggggctggaattggggcttcgaattggtgagatctgcggcctgcaatggggcgattttgacctgaaactcagcacgctgaacatcaatcggacggtctgcagaatttcctgtggaaacggtcatacaaaggtggtcatccagatgcccaaaacccgcacttctcgccgggaaattcccatcccaaagcagctatcgctgatgctgaaaaagctgcgcggaagcgccagcaatgctgcatggttcctgtccggcagcgagtccaagcccaccgaaccccgctgctatcggaaaagcatcaaagcgtatttgaagcaggcgactgtccgtcaagtgcgcccgcacgcactgcgccacacctttgcaacgacctgcctgcaggcggggtgcgatgtaaagaccctcagcgaattgttgggacacgccaacgccaacatcaccttgcagcgctatgtgcattctgacctgatccgaaagcgccgggagatgaatcggatattttcacatcaggtgtcaacgaggggcggaaaagcgttaaatctaattgaataacgccagattttactcacagtcctccattttccatgtgaaggatactcctttattgcggaaaggggtgaactaggtggcactgcgtctgttcgagcacaacgagaaagcatatcatgcggcagtccggatgatggagcagtatggcaaggccgccattgttcatcccactggcaccggaaaaagctatattgcattcaaactgatcgaggataacccggagaaggtcgtgctttggctttctcccagtgaatatatcttcaagacccagctggaaagcctgaaaaggaacgacccggactttccgctggcaaacgttcacttttatacctatgccaaactgatgtgctgcacccaggcgcaactggatgatatcgtagcgcagaaacctgcctatattatactcgatgaatttcaccgtgccggtgcggaatgctggggcgaaagcacggtggctttgttaaagttatgcccggaggcaaaactgctggggatgacggcgacaaacgtccggtatctggataataaccgtgatatggccgaagagctttttgatggccgtgttgcgagcgacatgacccttggcgaagcaatcgtcaggggtattttgcctactccgaactatgtgaccaccgtctatcagtaccagaaagacttggcacgttatcagacaagagtggataatctgcgttctgctgggattcaggacgtaaatcaaaaatatctggatgccctgcgccgcgccttggaacaagcagatggattagacaaggtttttgaacatcatatcacgaacaagtccggaaagtacatcgtgttctgcgccaacaaggagcatatggatgaaatgctctcccatgttccggagtggtttgcaaaggtgaatccagacgtggcggtgtacgaagcctattccgatgaccccggtacagacaaggcttttgccgacttcaaggccgatgaaagtgaccgcctgaagctgctgttttgcatcgacatgctcaacgagggagttcatgtagaaggcatttcaggtgtcatcctgttccggcctactatctcacctattatctacaaacagcagattggccgtgcactaactgcgggggataattccgctccacttatcctcgatgttgtcaacaacttcgaaggactatgcagcattgcgggtctgcaaggcgagatgcaggaggcagtccatcggctctatgccaacggcgagggcgataagatcgtcaccgagcggttcgaggttgttgagcaggtgcatgactgccgggtactgtttaagcagttgcaggcaagcctttcgtccagttggaaccattatttttcggaagcaagcatttactatgcggagcatggcagcctgaatattccaaagcgttataccacaccggcgggattgagccttggcgagtggctgacgacccagcgccgtgttcgtgcaggacagattccggggaacttgaccgaacagcaaatcgcacggctggacagcatcgggatggagtggggcaaccgcaacgatgccgcatgggaacgtggtctggaagaagcgagaaaatttcgggaacagtttgggaatttgcaggttccggcgaaatacaaaacgaaagatgactatcctctgggaaagtggatcaacaatgcgcggaaacgccgaaacgatggaaagctgacggaagagcgcattcgacaactggatcagatgggaatgatatggagcgtatttgatgccaaatgggaacagggatatgcacttgctatgaattatgccgccaagcacggcgacttgaatgttcctgtcaattacacgactgaagagggcgaaaagctgggtgcgtggattttgaatcagaggacggcatatgcaaaagaagtgctttcccaagaccaaatcggccgtctggaaaaaataggaatctattggggaaaccgtaatgaccgccagtggaacgaggtctatggtgccgccaagcgttattttgaggcaaatggagaccttgatgtcccggtggcctatgttacaccggagggctatgctcttggaaaatgggtgcggcggcagcagtatgcatatcgaaaaccagagaaaagcaatgcgattttgtctccacagcgcgttgcattgttggatgccatcggaatgcagtgggagaaacatgacccgtggcagcaccggtacgaactggcgcaggaatataaaaagcaatatggaaatctggagattccggcgaaatataagactgcggatggcatttggctgagccgatgggtgtacaaccagaaacagctgctgcaaagcgggtcggaaaaattaggtgaaaatcaaaaagaacaattggaaaaactgctgaccgattcagcgatagaatttggagaaaaagtgggttctgcgaaggcagaatgatatctgaacggggagaaaacaactttggataaggaaaatctgaattattttgtggagtttggagaacattatgtccacataacagaaagacaaaagcactacttagagatgcggtcagtagtagatcgggtttttgcagcggcagcactgattgtgctatcacctttgcttctggtggtgagtgttgcacagaagatcagtgctccagacgagccaatcttttttttgcagaagcgcgtgggcaaagatgcacattgctttaacattataaaatttcgaaccatgaagagcacagcaccaaaaaatgtagcaacgggtgatctggaaagccccgaaatatatatttcaaagcttggccgtattctacgtgatactagtatagatgaacttccgcagctctggaatgtggtccgaggcgaaatgagcctcattggcccccgtccgctggtgtacactgagcgtgagattcggtttcttcggcgatggtacggtgtatatcaggtgcggcctggtattaccggttgggcacaggtaaatggacgggatactgtggatatctacgataaagtctattatgaccgtgaatatgtccagaatgtcagtctgaaatttgacctgaaggtgctctggaagagcgttctagtggttctggggcggcatggcgtggttgatggaaaggttgacccgaagtttcggcaggagagcatcgtgttgttgagggaaagcaaaatggtctcgacagacgaaggatgcggtgaattagaacaagaattgcagatggtgtgagtgaattatgcgaattatattagcagcgaacgatacgacctttatctacaatctgcgtcgtgaaatattaaaaggtttgattgcagaaggacatgaggtatctgcaatgtgccaggtgctccagttcgaggacgaattagagcagttgggatgtgatgtcatcaacattgagacggcacggcaaggaaaaaatccttttaaggatgttttacttttccggaaatactatcagtcgttaaaaaaatacaagccagatgtgatgctgggaaacaatattaaaccgaacgtttacgcagggttagcctgccagatgttgaaaatcaagtacatcccaaacattaccggcctcggtactccggtggaaaatcccggacctttgcaggcactgacgacccggctttacaagatgggtgtggctggtgcaagctgcatttttttccagaacagcgaaaatcagcgcttctttgaaacacacaagatgatgccgaagcatgcgaagatccggttgctgccgggttccggcgtagatctggagagccatccggcgttcccgtatccggaaggcgagacggtgcatttccagtttacatcccgaatcttgaaggaaaagggaatcgacctgtatcttgctgcggccaaacgaatccatgcggagtaccccaacacagtgttccatatctgcggcggctgtgatgatcctgcctacgaggagatcttgaagcaggcacaggaagctggagatgtggtctatcatggccagcagaaggatatgattccattcctgaaacaggcgagctgcatcgtgcatccgtcctactatccagagggaatgagcaacgtgctcttggagggtgcggccagtgcccgacccatcattgccacagaccgtgcaggctgccgggaaacagtggaagatggagtgaccggattcctgattcccattcaggatgaggaagctctagtccatgcgctggaacggtttatgcagatgacgccagagcagcggaaagccatgggtctggccggtcgtgtaaagatggaacgggagttcgaccgaaaaatcgtggtaaaagcttacttggaagagattcaagcgttggaggggaacgatgaataaatacatcaaggcggtattttgtgttccgcttgcaggaatcaagtatgccattctgaagatggagaatgggggacgattccatgctgcctttccagcaattatgtcgccgatgactgaagtcaccgtaaatggaaaatccgaactgcgcattgcaaaaaagttgaaaatgcataatggcgcaaagatccgcgttcgcaaaggcggaaaactggaaattggcaaaaactttggaatgagcaatggctgtgttgttactgcctacgaccatattaaaatcggtgacaatgtgatgcttggtcccaatgttctgatttatgatcaagatcatgattatcaggctgagggaggcgtttcagctatgaaattcaaaactgcaccgattacgattggtaacaatgtctggataggtgccaatgccttgattctccggggaacaacgattggggataacactgtcgtcgggggaggaacagtcgtcaaaggggacttcccggcaaacagcgtgattattcaaaaacggacaacggaggttcggcagcagcataatggaatcaatcagagtattacagaatatcgcaagtcttcactttggcgggtcacaggcttttgtgatgaatatttataacaacattgaccgagaaaaggttcaatttgattttgttgttacgccagaggaaaggaaagatttatacagtcaggtggaacaaatgggaggacgaatttttgtctgcccaaagtatactgggaaaaaccattttgcatactgtaagtggtgggatgatttctttacggaacatccggaatatcatgtgattcatggacatgtgcggagtacggcatctatctatctgaaaattgcaaaaaagcatggactggtaacaattgcacacagccatagcacctcaaacggaagtggcatttctgctatcgtgaaggatatgttgcgacttccaattcgacatacagcagattatctatttgcgtgttctgacaaagcgggcagatggctgtatggagaaaaggctacaaaacagccaaattactggatgatccccaatggcgtagatttgaatcgctttgcattttgtgaggaaaagcgccagcagatgcgtcaggagcttggaattgccaaggatacttttgttctgggacacatcgggcggctcacggttcccaaaaaccatcaattcttagtggaattattcgcagagtaccacaaagagaaccccaatagcagacttcttttggtgggcgatggagagttgtttggaacagtgcagcaacaatgcacgcaactcgggatacgagatgctgtcatcatggtcggaagtaaaaccaacacagaggattattatcaggctatggatgtatttgtgtttccatccttgtgggagggacttccggtttctgtagtagaggctcaggcaaacggtcttcactgcctcctttctgatgtgataacgcacgatgttgacttgacagaccaagtgaagtatcttgcattggctaataaaaaggtatggctttgtgaggttgcgaatcttcagagaaaacatcgaattgctgccacaacagagaatatggcgaagctgcaaccgtttgatgcaacagtggttgcaaagcaacttcaaagtttttatctggaacaggatgaaagggcaagaaaatgagtcaatatatattgcgcctggacgatgcctccgattatatggatgttaaaaagtggcagcggatggaggaacttttagaccagtatggaattaagccgttggtcggagttattccggacaatctggattcatctcttaccgatacgtatgaacaagaccctgaattctgggataagactgcacgctggaaagaaaaaggctgggagctggcacttcatggttgctatcacaagtacacgaccaaggaaggtggcatcaacccggtaaaccaaagaagtgaatttgcaggtgtcccactggacaagcagaaagaaatgattcggcacggtgttgatgttttgaaaggccatgacattgagccgaaagtgttttttgctccttcacatatatttgatgaaaatacactggtggctttgaaggaagaatccgatattcgaatcatcagcgatactattgcaaatgatgtgtattttgaaaacgacttctattttattccgcaacagtctagacgcgtacgaaagctgccgtttaaggtatgcacgttttgctatcatcctaatatgatgaaagacgaagattttgaggaattagaaatattcctcaaaggaaggcattcgaattttgcgtcagtacaagatatgaagttaaaagaaaggccgatttcaaattttgtcagagttctacatacaatctattttgaaaaaaggcgataaaaacatgaaaaaaataatgttctatataaatacgatccatggcggcggcgcagagcgtgtcatggtaaacttggcaaaatatttttctgaaaatggatacgacactactttggtcacgtcttttcggcatacatgggagtatccgcttgcggcgactgtaagacgacttacgctggaagaagaggaaatcaagcaatccagaataaaaagaaattttagcagaatcaagaaattgagagatttatgcaaatctgagaagccagacatacttgtttcttttatggaagagccgaattttcgtgcaatattagcgacaagaggattgcctgtaaaaacactggtttctgttcggaatgatcctaacaaagaatatgcaggaaaactggggtgttttgtcggtaaaattttgctcccaatggcagatggctgtgtgtttcagacaagcgatgcacaacagtggtttccggagcgcttacagaaaaaatcacgaatcatctataacgccgttaaggaagagttttaccaagtggagcgcacaccagtgcgaggtgagatcgttacctgcggtcgcctgacagagcagaaaaatcacaggttgctgatagacgcatttgcagaggtgcaaaaaatccatccttatgcaacattaaaaatctatggagaaggagcacttcgagaaaagctccagaatcagatcgagtcactgaatcttaatgagaaggtttttctgatgggagccactaatgatgtggcaaaagcgctccatacggcagatctgtttgtgctttcttctgactatgagggcatgccaaatgccttgatggaggcaatggcagccggtgtgccatgtatctctacggattgcccttgtggaggaccaagagaactttttggagaggatgcttccgataaactggttccgtgcaatgattctgcgcaactggcggaagcgatttgttgtgtgttcgatggagcagagcacaacgtcgtagagaaaaaacatgcagaagccttccggccggatcgtgttaatgcaatgtgggaaaaatacataatggaaatttgtttaaaggagcgttgtagtggttgtttatgaggttgttttaggagcggtttcgttatgtgcgaatctctcctgcacgaggcagtccccgagaatgaaggactttttatattggatatgtgcaggaggaatcataatagcatctgcacttcgtagtacggatattggtgcagatacattgacatattgccaggaatatcaaaatatccgagcactttcgtttaaggaggcaatgggatttggatgggaacaaggttatgttgcagtaaattgggtgctagggcagttttttgaaagtgaccgggcattgcttgtgtttttgacgatattcattttgattccgattttcgtttggataaagaaagagtcgaactatccgttactatcacttgtgatgtttatcggaatgggaatgtggaatgcatcaatcggaatttttcgtcaatggtgtgcgatcgcaatacttaccttttcctataaatatattaaagcaagaagattcatcccatttttgatggtagtattaattgcaatgctatttcatcggacagcggcaatttttttattggcatattttgttgaaggtgttccgctgaatatgaacacaatcattgcggcggtacctgcttcggtgatggttggattgatgggagataaaatattaaattttctcaacaaatttgcacgaatttctgaggaaggaaatttcaacggaggaatttctcttttgattgtattgtggttgtgtgtagtaacaccgctgatttgttataaagggaaaattccaaaagagttgaaattttatatgaaactggtccttttttctgcatttatgcaaccggttgcttttacgttttccaactgggcacgaattgttgtctatttttcgatttcgcttctgatatgtttacccaattttgtttctaaagtgattctggaaaacaagctaaatgcaaaaatctcaattccgatggttacagcagtgtgcggactgatgtttttgtggcttggtaggctagacattggagcgtttactttcttgtaacagttgggaggattaatatgaataaatacataagagtgattaagaatttctgtgcagataaaaccattcgtttttcctacctgacaaaattgggtattttcaacggcctgtcagacgagcagtatttgaagttgaaatataaaaatgtattcggcagtgagcttgatttggaaaatccgaagacgttcaacgaaaaactccaatggctaaagctacacaaccgcaagcctgaatataccgtaatggtggacaaatataaagtacgtgagtacattgctcaaatgctaggagaagaatatttaattcctttgcttggagtgtgggatgatccggaagatattgattttaatgccctgccgaatcagtttgttctaaagtgtaatcacaactcaggtctgggaatgtgtatttgcaaggacaagagcaaactggatgtcccaaaagtaaaagatgaattaagaaagggattgcaacaaaactattacctaagcaaccgagaatggccctataaagatatccccagaaagattatcgctgaaaaatacatggaagatgccagcggtgatcttaaggattataaattctattgctttaatggtgtaatgaaattcgtaatgattaattcagaccggaacaccgataaacctacgagggcagattattttgatcgggactttaactggttggattttacatggggatacagtcatgcggaggttaagtcccagaagccggaacaatttgagaaaatggttgcaattgccgaaaagctttcaaaaggattgccgcacattcgagtggatctgtatgattgcaatggaaaaatctactttggcgaattgaccttttttgatggaagtgggtttgacaaaattgagccgctagaatgggattataaacttggtcaaatgataactttaccaacaatggagaaggaaacgctatgataaaagtagtacatttcattcacggcttgaatatgggaggtgcagagacattagtaaaaaactatgctcttctgctggacaagtcaaaatttaatgtgactgttctatgctatacacgttgtgattctccttatgaaacgattctgcagcagaacaatattcctgttgtctatctttgcgatgaaatgcctttttatggaaaaacgggcttggttgcgaaactagtaaatcgatttcaacggtattggttggttcgtcgagaattgcagcaactgaatccggatattgtccattttcatttgtcattaagcgactacgttagattttcaggactcaaaaagagtgtaaagctattttatacgcaacattttgatacgaccgactgggaagcagataacccaaaggctgtaaataatttgaggtggttgataaagcatcatggcgttcaaatgattgcattaaatggtaacatgaaaattgcgatgaacaagatgttcaaaacagatgcaactaaaattttgaataatggaattgacctatctgcatttgggcaaccgattgatcgaaatagaaaacgcatgaacttaggtgttccacaaaacgcctttgtaatcgtacacgttggacgatttgatccggtaaaaaatcacgtctttcttgttgatatttttaaagagataaaaaagaaattacccgaggcatttcttcttatggtaggaaaaggcgaaacggaacagcgggttgaggaaaaaattaagtccgaagggcttgaggattcctataaaattctccatgatcggacagatgttccagaaatactccgagcttcagatgcagcgatcttcccatccatttcggaaggtctcggcattgcagtaattgaaatgcaggcagcaggcttaccatgtgttgcatcaaaaggggtgcctcaaacggcaaaggtctcaaataaaatacgttttctgggattagatcaagggccaaaggcttgggcgaatgagttacttgtgttgacaaaggaagataaacctattcaatatgagaatctgcaagaatgggacatcaggcaaaatgtgaaagaactagagaaaatgtatgaagaggccatgagaaatgtctgatagtagaactaaaaatacaacacgaaatatcttttcaggattgatctatcgaggagtcacaattttacttccttttattaaccgaaccgtaattcttacagttctaggtgcggaatatacaggtctttccagtctctttacatcgattctgggggtgttgaatctagccgaacttgggtttaatacagctgttgtctattgtatgtataaaccaatggcggaacagaattggaatcagatttgctactatctgacgttgattcgtaaagtttataatattgttggaaccgttgtctttggcagcggtctctgcattatgccatttcttcgttatttgattagtggaaattatccacaggaaattgatctgtacgctttgtatttcttgtaccttgtaaattcaactattagttattatttatttgcatataaagaaactctccttttagcagatcagcgtagtgatattacgaacaatatccgcacggtagtagatacactccgttatctgatacaatttacatttctgctgattacaaagaatttctatagttatgtaatgattcaaattgtaggaacaattttttcgaattttctgattcagaagagtacgaaagcgcgttatcctaatattgtctgtcagaaaaatctgaagctaaaggttccagaagagatgaaaaagcagacaaaggcgttaatgattgacaggctctgcaacacctttcgtaattcatttgatagcattgtcatctcctctttttttggccttgtagaaacaactgtttatggaaactattattatatttattctgccgtatacggtgttctctcggttataggaaactcattggcaggaagtgtaggtaatagtatttcttgtgagtctgcagaaaaaaattatcatgaccttagaaaatttcaatttctattttctggcttgaacataatttgcacaacatgtatggtagcaatgtaccaaccatttatgcaaatttgggtcggaagaagactgatgctttcggatagagatatgctgttgtttagcctgtatttttatttaatcaatatgaacaatattaggaaccagtatattgatggaacaggaatgtggaacgctttaaaatggagttatattctagaggcatttggaaatttattcttgaatattatattaggaaagttatttggcgttactggcattctgtgtgcgacgatatttacaattgctatattcaattattccgttcggacacataaactattcaaaacatatttcatgggaaaagatgaaatacgttacaacttagatcaggttcaatatgcgctaattgcattgacatcatcagcaatcgtatatgtaatttgtacctgcttaccttttgacggaatcgtacagctcgtagtgtgtgggctgattgcagtggttgttgcaggtacgctgttttgggttgcgtttctgaaaacgaaacgatttacagaagcaaagcaaatgatagttcaaattatattaacaatggtgacaaaaaaataaataggagagtatgaggcaaatttatagtaaaggaatacgactggggtgggattgcttcatgcgatgaatcaaatggaattgatcgatttaagatgtcatttggtggacgatacaacgaggattataatctttatgctgcttgttctttacgtgcaaaagtatagcaaaagatgcgaaaaatgatgagtaagtgagcgaaaattagtagaattgcaatttttttgggggaacaaaaatggaacagtacaaaaacaaatattgggatgaaaatagggatgtaaaaataactgttttgaccccgacatataatcgaaaagatacgctgttaaggacaatccggtcaatcgaaaaccaggattttttagattgggagtatatcattgtaaatgatgggtcgacagataatactgatgaagtggtagaacaatttatgcagaccacaaaacatccagtgctatatattaagaaagagaatggcggagtacatacagcaagaaatttgggttataaaaatgcacatggagagcttcttataaatctagattcggatgatgaaatgcttccagatgcactgaaaataatttggagtgtatggaaaaaaattccaaaacaagaaaaaaccaaataccgtgaaattgttgctcagtctatggacgaacaaggagcgagagttggagaacccttcccgaaggatattaatagaatgccatgggataaagcacggagagcatgttataaatctggtggagaacatgttggatgctttgtaacaaatgtgatgaaggagaatttgttcccagagccagagggtgtaacatttatgacagaaaatattttgtggcgcaaattagatggaaattattgttcgtattacatcaatgacatggtacaaatctatcatcaagacggctcagatcacttgtcgtctggactttccgcagggcataaaaagacaattcaaaattgtaaaaatgcactatgggagagtacacagtttcttaatgattggaaaacttatcaggatggcggaagctatgcaaaagagttgctgagatactgtatcatgaaccatattttgcgtcaggatgcgacgcaacagaaatttcggaaaggatgtgcactaaagggagtaaaaaacaagtgtctgttttatctgatgtggtttccctcaatacctgcggcaaagctctatcaaaagaaaaaaatgaagagatgaaatttaaagatgagaaaaattttagttcgatttgatgatatctgcccaacgatggattggagtcagtggaatcgtgcgatgaaaattttgaagctgcatcacgtgaaaccgctgataggtgtaattccagactgtcaagatccagatttattaattgatccaccgcagagggatttttgggattaccttaagtcgttacaggctgatggttttgcaattgcaatgcacggatatcttcatgtatatgacacagccgtacgtggaattgtgaatgatacattccgttcggaatttgctggacatagctatgaggaacaatatgaaaaaattcgaaaaggaaaagaaatactgacttctcatggaatccaaacagatattttctttgcaccagcacattcctatgatgaaaatactttaagggcactatccgcaaatggttttaaatacgtttcagacggaaaaagtagtaagccatttgttcgcgaaggaattatatgtattccgtgtcgatcaggtgggtgccctcgaattggaaaatatggatgttatacggcggtatttcacgcgcatgaatggaaacgaccagataagaaaaattgctatgatcagctgaaaactttatgcgaagaatattctgaggaaattgtagattttgaagaatatgcaaaacaaaagactggaattccgtttgtggaatatatggatgaaaaaatgtatattttctatgaaaataagataaaggcagcattgcgcccaatggttcatgtgattaaatcaatgttaagaaatataaaagaaaaaaatcaaagactggcttgatagatgggtgtgtaagagagcttatatcactgccaatggtcaatccaagagtttaaaaggagttgtttacatgcagggtaatgttgttttcattaccggttcctccggtttcatcggttccaacttggcaaaacgtatcctgaccactgagccggataccaaggtcattggcttggacaacatgaacgattattatgatgttcgtatcaaggaagctcggcttgcagagcttcagaagttcgagaattatacctttatcaagggcaaccttgcggataaagctctcatcaacagtatttttgagcagtatcacccagacattgtggtcaatctgggcgctcaggctggtgttcgctattccatcaccaacccggatgcctacatcgagagcaacgtgattggcttctataacattctggaagcctgccgccactatcccgtgaagcatctggtgtatgcatcttccagctccgtttacggcagcaataagaaggtgccctactccaccgacgataaggtggacaacccggtatccctgtatgctgctaccaagaaatccaatgagctgatggctcatgcctacagcaagctttataacattccatccacaggcctgcgcttctttacggtgtatggtcctgctggtcgtccggacatggcatattttggatttaccaataagttggtgaacggcgaaaccattaagatcttcaactacggcaactgcaaacgtgactttacctatgtggacgatatcgtagaaggcgttgtccgtgtgatggcaaaagcgcccgtaaagaagaatggcgaagatggtctgcccattcctccctatgcggtttacaacatcggtaattccaacccggaaaatctgctggacttcgtacagattttgtccgaagaactggtacgttccggtgtgctgcctgcagattatgatttcgaggctcataaggaactggttcccatgcagcctggtgacgtgccggtgacctttgcagacaccgagccattggagcgtgactttggctttaaacctcacactccgcttcgggatggactgcggaagtttgcggagtggtacaaagaattttatatggcataaggtgatggcttatgagcataccagtgtggaggaagaaatgagagatagcaaagggcaaagaatcaactcattgcaaggtctcagagcaattctttttgttttgatatttacttttcatacaagtatgattgggaacatttcagaatcattgatatatattaatttcttcaagggggggggggggcagaagctgttgctttcttttttgtgctgtcgggatttattgaggcacttcatcagagaaatgaagtgccagacattaagaatataacgagactttgtatagcgaaagtaaaaaagttttatggacttcatgtgttttttcttcttgcagtcacgccgacagtaattgtatcagtggtaaaggctccgcttcaagcaggaggaagaatgattataaatctgcttcttctgcagagttggttcccagacgaacaaatctggctcagttataatagcgtgacatggttcatatcaacgcttgcttttttgtttctatttattattccaatgcattggattagcaatcacctcgaacagaaatggccaacaggtaggttctattgtggcttactggtgattatctggcttttagatttcatacttgcaatattgttgttaaaaaagaatgtatcaaacattaagtactatctctatgcatttccgccatcaagattgtttgactatgcatctggttttatattaggtcgattttttatatgccacaaaaatatgagattagtgaaaaaaaggcaacatttttggaaatcatctctgtaaacataattataggatatttgcttatctttccatatatttcggactatttttcacggtcgataatgtatcttcctggtgcagcattggtaatatatgtatttgcaattggaaaaggaaaaatttccggattttttagcagtccacttatggttgctgccggaaataattctttgtattacatgatgagccatcaggttgttatacgttattgctcgttgatttacaaaaatttgttaaagtttaatattcgttccagtgaattgatttgggtttttgttgcatttgtggtgacctttgcaagcaaaccaatctatgatatgctgtgcttcaaacttaggcgactacatttggattggaaatctatgaatcatcagacataagaagagagaaatagagaactacaagaatcggaaaatttagaattatgcataaataatgtataattggccgatagttatgaatgcttgcatcaggatcataaaattgagatgaactgtaagacaactaaaatggaagagatgtgataatattatgcgttgcgaagaacgattctacgaaatatatggaaaagatcccgtgggcatcagcttttgcccctatcggatttgccctattggtgcccatagtgatcacaacttaggaaagatcacaggacttgcgattgataaaggaatccatattgcatacaagcccaagatgaatggtgttattgaaatgtgcagtcttcaattcccgaaacgtgcccagtggcatatccgggagattggcgaaaaaactggtgactgggcggactacctgcgaggagcgacttgggcgttgagcaatcggtttccgttgacagtcggactcagtggcgtcattgagggctcgttgcccattggagggctttcttcctctgcggctgtgatcctgtcttttttggaggcgctatgtcaggtcaatggaatcaagctgagttcttcagcgttgatcagcattgcgttcgaggcagaaaaaaaatatgtgggtgttaatgtaggaaccctggatcagagctgcgaggttctgagtaaaaaagaccacttgctgtatctggactgcaaagataacagctatgagctgattcccacgaatcccaacatgaagccctacaagattgcggtatttttcagcggtttggagcacagtctggctggctctaaatataatatgcgggtggatgaactgcgttctggtgtatacgccttgcaggcttttgcgggtcttgactacggaaagttcaatgaagctaacgcccgggatgtttcgtatgaaatctaccagacctataaagataagctgccggtacagtgggccaaacgctgtgaacattggtataccgagttcaagcgtgtggaagccggtgcggaagcatggcggcgaggggatttggaagagtatggacgcctgtcctttgaatctggctggagcagcatccacaactgggaatccggtgcgccggagcagatcaaactctacgagattatgagggagaccgctggcatttacggtgggcgcttcagcggtgctggctttaaggggtgctgtatggcgttgatcgatcccaataaggtggatgacatccgggaagaagtggaacgaaagtatctcactgcattcccggagatgcgtggtaagtacagtttccatctgtgcgagagtgcggacggcgtagggcataagacggaggactaatatgaagtgcttgattttggccgcgggatacgcaacccgcctgtatccattgaccgaaaactttcccaaacccttgctgaaggtaggggataagaccatattggactggctggtggatgacattgacaccgctggtctggtgaatacttatgtggtcatcagcaatcacaagtatgcccatcattttgaaaactgggctgcaaccaaaaagcagaatattcaggtggtggacgatggaaccagcagcaatgagacccggcttggtgctgtgtgtgacgtgcaatttgccattgaccagttggggctggacgatgacctgctggtgattgccggcgacaatgtgctggatttctctctttccaaatttgtggcttatgcccaacagaagaaaacctcctgcataatgcgctattatgaaccagaggaaaagaagctcatgaagtgcggtgtggtggaactcgacgatcaggacaagatcctttccatggaagaaaagcctgcccagcccaagagccactggtgctgccctcccttctatgtgtacactcgggcagatgccagaaaggtcaaagatgcaattgcacagaagaagtgtggtaccgatgctccgggcagctttattgcatggctgtgcacggtagcggatgtgcatgctatggagatgccgggcaagcggtatgacattggcaatctggaaagctatcaacaggttcagcaggagtatcagggaatcaaggcataaaaggcaacacagtgagattctgtggctagaatataagttgaaattattggatttgaattgatactagagggcttcagatgattactattgatgaggcggcaaagaagtggagctgcagcaaaaatacggttttgtcttatgtttataaaagatacattactggcatgtgtgtagatggcgagacgctgctgttacccgatattgaaaagccttatattccgcgcaaacgtatcgacggcagcttgtattattacagagcactcttgcgaacaattcagagagaacggtttattgatgagcatatattaggcatatccaaagaaaagtttaatgcatgcatagaagaactcgagagtgcgggatatataaaaaaagtggagccggatgcaggcatatcgggacatattttgacggcaaagggaaacgatgaactaaacaaaaagagaaatatcaattataaaagagttgagtctccagcctcagattggtttgataaatgttcaaaattcgttcagtggatctgttgtataagataagatcgttatccctgtgaaagggaaactgagaaaatgtcggcaagcggcgtgagcgcggacgagatccttgcaaagctgaagcgacttgaaaatttctaacgcagtagttgacagaaatatctacgcggcaaacctactaaagtgtgtcaaaagcagaagtagaagatataaacaaatattaatttttgccgggtgcagttgagcacccccttcacattgcttgaattaaattatatttttattctacatactgcacctcttgcgaacataaaagacgagtgttatactgaagccatcaaaaaacattggaggtgccccctatgccccgtcccaaaggaagcaagaacaagcccaaggccgtaaaagcgaccgttgactttgccgcacagctcgctgaaaagcaggctgcaaaggaagccgctgccgctgaaatcgcatccatcactgctaatatcgatgcattgaaagctgacctgaaaaccaagaaagccgagttgaaaactatcgacaaagaaatcgccagaattgaagctaaaaaggtcaaagctgaaaccaaagcagcggaatccgcaaagaaggctgaagctgaagctgtgctgaaaaagctgctggcatctggtatgacggcagatgagattctcgaaaagctgaaataaatattttagagccgtgtggatcagtcggagcgtagagttatagctctggcagttcacgcggttttcttatataaatggtaattggtgagacttggaacgaatagaactgttccatatcgaacgaaatgactacatttcccacaccatggctcaaaatcacgtccggagaaatttcagttaatcagcaggaacatgttggcaatctagctgtcatagagcttctgaggagagtgcctgggagagctgctgccccggtggaagccctaggtttcaggcgctcgaaccgtggaatgacgtaaaaatatacgctgaaatctgaaaaatgcaggccagaagcgaaacggattgaatccttgcaaatgacgctgaaacgtgatataatcgtggtacgaacaaaccggttttggtacgacaacggtatgttctggtactgtaactgttgttacgaaactgtgaagaactacttggaaaagtgtaaaaattcagcgtagctgcgacgacacctatcaggttcaggtcgtgtcctggtacgacaacgagaactcctacacctctcagatggtccgtaccattaagtacttcgctgagaactgctgatcggagtttctcctgagctgaataaagcttgactgcgccctttctcttgtgtgatacgagagaaagggcgctttttgctgaccattttgggcgcgataaggtactttcgtaaaatggcacaacacatttgcagtgtgccgacaaaagcagcacgcattcgatctccatctattgcaacccttctcccgatatgataaaatggtaaaaataaatggagacaacgaaacagtatgattacgaaacgtgaaaaactgcagtatggatacctgtttctgattgatctgctctctttggttctcagcattgggctggcgtgggggctgaccgcaggtgttctgcacaagatgggggacttccagctggacaatctggtagaagcctgttttttattgctgctggcctatattctgactttttttacatttgatcagagcgaaaatatcgtgaaccgcactccgattcgtgaagttgaaattgcggtgcggttcaattttttgctgactctcattgatgcggcctgtctggcgctgaccaaggcttccatgctgcactcccgctattttctggtgtttgtgcccgtcatcgatgtctttgtgatgacgggcgctcatgctgtcctcaaaaagatactggtacgctcccgctataccaaggggattcagagccttgtgggagtggtgaccacgcaggagagcgcaagccctattctggaagagctgaaaaaggactggtccaagcgtgtgaccggccttgccattctggaagctgccccggagcagcttcacactgagatcgatggggtgaagatcgaggcaaacttcgataatttcatggactggctgcggcaggcagcgctggatgaagtgtatctggatgtggcgcaggagagcgaagagaacatgctgccctacctcgaggagatggagagcatgggtctgacggtccatttccgcctgccagtgctggaccggattgaaaaagcctgctgtgatgagaccagtgcggtgcgcatcagccgggagctgagccgctgtgcgggcggcaatgttgtgacgatgggcacggtggaactcaagctgcgggatcaggtgctgaaacggaccatggatatcgtaggcggcatcgtggggtgcatcatcagcattcccatcattgcgttggtggccatcccgctcaagctggaaagccccggcccgctgatcttcaagcagcgccgggtgggccggaatggacgtgtgttctacatccacaagctgcgcagcatgtatgtggacgcggaggcacgcaaaaaggagctgatggcccagaacgaaatgaacggcctgatgttcaagatggaggatgacccccggatcacccgggtgggccgctttatccggcgcaccagtatcgatgagctaccgcagttttttgacgttgtgcggggctccatgagcctggtgggtacccgcccacccacgctggatgagtaccggcagtacgagagccatcacaagcgccgcctttccatgaagccgggaattaccggcctgtggcaggtaagcggccgcagcgatattgatgattttgaagaagtggtcaagctggatgtccagtacatcgacaactggtccatctggatggatatctacctgctgttcaagacggtgggcgttgtgtttgaccggaaaggggcaaaatgaattatattctttttggtggatctggttttatcggcacccatctcattcatttgctgctgaaggagtgcgtcagacccggcgacgtgatctacgacctggatcttgttatgcccggggaagagggcgtggtgccgggcattgtggaaaagaacgatggggtgcagtatatccggctggatgtgcgcaagcccatcgattttgagttcgttccgactccggaggacgtgatctttgatctggcagcggtccaccgcacccccggccacccggaagaagcctattttgaaacaaatatccggggcgcggaaaatgtgaccgcctttgcggaaaaatacggcattcggaagatcctgttcaccagctccattgcaccctatggcgcgtctgaggaccttaagacggaggagactctgccaactcccaacacgccgtatgggatcagcaagctggtggcagaaaagatccaccagatctggcaggcccgtgatccggcccgggagttgaccatcgtgcggccaggcatcgtttatggcaaaggggagcacggcaacatgacccgcctgtacagggggcagaagaagggctactttttttatgccggccggaaggacaccatcaaggcgtgcatctatgtcaaggagctggtgcgcttcttcaagtaccggatgctggatcattccttccccggagcagagatctataactgtacctacgagccggcctataccattgaagaaatctgcgatacaatgcagaaggcgaccggcctgcaccgccatgtgccgttggtgcccgccggactgctgctgtttgcggcgggcattctgggacccatcgggggcaaaaaggtgggtatccatcccgcccgtgtccggaagctgatggtatccaccaatgtctgcggcagaaagctggccgccactgattacaagttccactatacgctggaggagagcttccgggactggttcgaggattgcgaccgcaaggagctggtatgaccatggagcagaatgcacagcccatccgtgtggcccagatgatgacagatatgaactacggcggtgtggagatggtggtgatgaactactaccgccacatggaccgttccagagttcagtttgatttttttgcgctggaaggctcgactctgccccagcgggaagagatcgaacggctgggcggccgggtgtatgtggtgccaaaatatacccacctgacgcagtatgaacgggagatcgggcggctgttccgtcagaacggataccagatcgttcactcccacatgaacaccctgagcgtgctttccctctggggggcaaagcgtgcaggggtgcccaaccggatcgcgcataaccattctacggtgggcaggggagaaggggcaaaaaatgtgatgaagtacctgctccgtccctttgccgcagtgtatcccacccggctctgtgcctgctccagaacggcaggcagctggctttatggtgaaaagcctttccgggtgttcaacaatgccattgagctcgaccgctttacttatgatgccgccaaacggaaagccgtccggcaggagcttggcctggggggtgaactggtgctgggccatgtcggacggttctgctatgccaaaaatcacgaatttctgctggatgtaatggcggaggtctgcaagcaacggccggatgccgttttactgctgatcggagaaggggaaaacgaggccgctgcccgccggaaagcggaggcgctggggctgcaaaggaatgtccgctttctgggccgacagagcgatcccgcaaagttttatcaggccatggatgcctttgttttgccctcgcggtatgaggggcttgggatcgtgctgatcgaagcacaagcggcggcattgccggtcatctgttccacagaggtgccgcaggaggctcaggtcctgcccgagatgcagtacctgagcttgcaggaaagcccggcagtctgggcggatgctgcgatccgggctgcagaaaatgcccggcggcgggatacctctgtcgagatgcgggcaggcggctttgatatcgtcaccgaggcgaagaagctggaagagttttacttcgacctgctgaaatgaggagataagatggaccctttggtaagcatcatcgttcctgtttataatgtaaagccatatctgaaccgctgtgtgaacagcttgctggggcagagctatcagaacatggagctgctgctggtggacgatggctccaccgatggcagcgagaccctctgtgatgaatatgctgcacaggatgcccgggtgcgggtgctccacaagaaaaatggtggtctgtccgatgcccgcaacgctggtgtggacgcagcaaagggggaatatctctcttttgtggatggcgatgactgggtgtcaccctattacatcgagaacctgtaccgggcactggagcaggcaggagcggatttttcagccagctgttttgaagaggtgttcgagggccagccggtgcagtccgtgcccacagagcgtctggaagcatttgagatcctgagccgggaggaatgcctgcgccgcatcctgtatcaggagggcatggaggtgaccacccccaccaagctctataagcgtgcactgtttgagggcgtgcgctacccggtgggcaagctctatgaggatatcccggtcgcctacgaggtgacaaagcgtgcccacaaggcggcacatatcgcaaaccgggattactactatttccagcggggcagcagcatccagaatatggccttcaaccccagaaagctggacagtgtgcggcactgccatgcgctgatggaaaatgtgaagcgtgatttcccccagctgagccgtgcagcagagtgccgctatctgagcaatgtctacaatatcctgttccagatccgggacaggcagcatgaaaaaatagagaaggctctctggcaggaagtgaaaaaataccgccggaatgttctgctggacccgcaggcccgcaaaaaggcccggctggcggcggcgctttcctacagcggctatgccatgacccggcgggtctatgaaaaaacgcagtggcgtggaaaaaagtaaagtggagggatccggttggaggaaagaaaaccgcttgtatcggtcattgtgccggtctataatgtttatccgtatctgcgggactgtgtgcagagcgtgcaggcgcagagttaccagaactgggagctgcttttggtagatgacggctccaccgatggcagcggggaactttgtgatgaactggctgtggaggatggccgcatccgggtgttccataagcccaatggggggcagtctgatgcccggaacgttgggttgcaacagacgcagggaaaatatttttacctgctggacagcgatgacctgatccgctccacagcgtttgaccaatttgtggagcgctgtgaggcagatggtgctgatgcagccctgaccccgctggagatgttctcgacagagcagccggagggacggacggaaaatccgcaccagatcccagagctgctgaaccgggaagagaccatgcgccggatgctgctgcatcagggcatcgggcatggagcaggcggcgttttcttccggcgggaggtttggggagatttgcagttccccattggcatcctgtacgaggactatgcggtgatgtatcgggccattgcccgctgtgcaaaagtggaagtgtttccggaaccgatgtacgattaccgcatccataccggttcgaccatgaagagcggcattgccgagaagaatctggtcattctggatgtgggcgaagacgtgacccgctttattgcggaaacggttcctgtgctgaaagcagaagcggaatacctgcagctggttacatacctgaagacactgaaaggcattctggatggcggctttggcagctatccggaggctcaggcacggatctgccgctttgtgcaggaacaccgggcgcttgcccggcggccctgggccaaaaaggcagaccagatcaaggtggaaacacttttgatcaacaagcggctgttctacgccgtttatggtctgggagaatggaaaaataaacacacagtcgaaaaataaaatggagaagttatgctgatttatctgggggcttttgcggtttctgtgggcattgccgcctatggcgagcacctgcggacgaagaaaaacaacgagaagggcttttatctctgcctggcgctggcggtgctggtgatggcggtattggcaggcttgcgggacccgtccattggcacggacagcgtggtgtatgagggatgggtggcggatgcaaagctgcaggatggtttgctggcctgcatccggcagcggcacaaaacagagccgctgtttatgacgctggtctatctggcggcccatgtttttggcgatgtccactggctctactttatggtggacctgctggcctgcggcctgtttatgatcgggctggtgcaatataaggagtatgtctccgtgccctatggctggctggcttacctctgcctgtattatggcgatacttataatgccgagcggcagtctgtggcgctgggcgtggcatttctggcgttcagctttgcgtggaagaaaaagtatcactgggctgtcctattgctggcggtctcctgcctgttccacaatgccacctttatctcgtttggtgcgctgctgatctatatcctgcttcagcatttcgacaactggtgggtcaagggtggcctggcggtattttcggtctaccttgccttcttcagcaaggctgtggtcaggctggccctgaatgtggacttcattgatcgactttacggatattattatgatgccaatgcgggcggcttcacgctgaatcccatcattgtgcgtctgcccttcctgatcctgcccattgtgctgtaccgctggtacgcaaaagaggaaggggagggccgccgccgctttacccgctcggatgccgatttctggatcgtgatgatcctgatcgagatggcaacggcccagctgcgcaacatcaatgtgccgctctaccgtatctgcctgtattttgcgttcttccgttatctcgccattggccgtgtggtcaggtgcgtggaggatgagcgtctgcgcaggctgctgaaggctgccatgtggggaatgctggtcatcatctggatctatcaggcgtatattcagggcaacaatgccatttgcccgtacacctcggagatcctccacatcagcagagaaacattcttctgagggaactgaacatggagacagagctgatcagtgtcattgttccggtctacaatgtggagcgatatctccgccgctgcgtggacagcatcctgcaccagacctatcggaatcttgaggtcctgctggtggacgatggttccaccgatgccagcggagccatctgcgacgaatatgccgcacaggaagaacgcgtaacggcagtccaccagaaaaacgggggactctctgcagcgcgcaacgcgggactcgaacgggcacagggaacgtatttctgctttgtggacagtgatgattttctggacagccggatgctggaaacgctctgccgtgacctgcaggaacaggatgcggacgtggctgtggtgggcttccggatgtttgaacgggaggaagagcttgtcccggcagagctcgccgtaccggtgcagtgtatgacaggccgggaagctatccgcagcacccttgtttcggatgagctgggggattttgcctggaacaagctctacaagcgagagctgttccgggatatccgctatccgctggggcggatgatggaagatcagggtacgacataccgcatttttcagcagtgcagcaaggtcgcataccgcccggtaccgctgtattattactatcagcgcccggacagcatccttcaccgcaggaacatgaagttctacgaggataagctggatatgggctatcagaaatatcgggccatccgggaagcatacccgggaatgacagaaaatgatgccgccatgctgagcgtggtggagcactgctatccgtatctgatgcaggacacggtgcgccgcgcaaaaatggaggcctttctgcaggagtgtgacccggcagcggcaaagctgctctgcaccagcagccagcagaagtatcagctgctcagatgcagccggaggctgtatgcaaaactgttcctgctgaagaatggcccggcggcagaataagggaggaaaatttgtgctgaacgataccgtcagtatcattgtgccgatctataacaaagaaaagtatctggaaaaatgtctggacagcatcctcggtcagacctatcgggatctggagatcattctggtggatgatggatcaacagacaactcccttgccatctgccagcgctacgcggaaaaagatccgcggatcaagatataccacaagccaaacggtggtgtttcttctgcgcgaaatctgggattggaaaaaagtacaggaaagtatatttcatttgttgatccagatgattttattcattcggaatttatagaacggctggaaatgatgttggtgcaatcggacgcggaaattgcatactgtaaaatgctggatgtttgggaaggcagtgacgtagaacatattccccaaattacagataaagtttgcatattggatgcaagacggtacgattggtttacaccagcagcgcataaggtcgcctgcggcgcagtataccgaaaaagctgtgtgaaggatattcgattttctgatgacctgtatattggagaagatactcttttcttagcagaatgcatcaaaaaagcatctaagattgttcgttcggaaagtgaattatactattactaccgcaatgatcagtcggtaacgctgtgcgattattttactggaaaattaacagaaatgatggcgtgggagcgaattgttgtattgtatgcgaatgaatcacttgtacagaagactgcaaaagcgggatattcacaggtttgtcgtgagttagtggttaaatatggaaagagtgcacgctttatggaagaaggttatccgaaagcaaaagcagggttttacagatgggcaaaggaaatgatgcaacagcaacttcaggaaaagagatatttttactggcttaaaaccatgtattcgtatttcttctgggacgcatgggtaaagaaaaaacagggtgagtgaaagtatctagttatgaagaaatcgcttacattaaatgcaataatgagtggaatcaagacgattctacaaatcatctttccactgattacattcccgtacatatctaacattctacaagtaaataatttgggcaaagtgaactttgccagctccgtctgcgggtattttctgctgtttgcaggccttggcatctcctcctatgcggtgcgtgagggttcccgctatgtgaacgaccgggaaaaactgtcggcttttgcatcggagatgttctccatcaatatgatctccacggccctgacctatgcggcattggctgtgacgatgcttttctggacaaagctccatgcctataccgacctgatgctggtgctgagtttacagatcttctttacgaccatcggcaccgaatgggtgttcacgatctttgaggagtatacctatatcacagttagaggtattatttttcaaataatatcaattctgatgatgttcgcatttgttaaaacgcaggacgattactgtatttacgcaggaattacggtgtttgccgcagcaggtgcgaatatattgaacttctttcgagctaggaaatattgcacgattcgactgacagcaaaaatagactggaaaaagcatttaaaaccaatacttctgatttttgcatcgagctttgcaattacgatttatgtaaattcagatgtgacaattctcggagttttaacttcagactatcatgtgggaatttacaccgttgcaatgaagatatatacgatggtaaaatcggttctggcatctattcttttagtatctgttccgaggttgtctcgttatgcgggaatgcaggataggctgaattttgaaaggctttttaataaagtattcggggcaatggtattaaccgttcttccggctgtagtgggattgtttgaactaagtcaagaggtcgttctttttatctcaagcgaaagctatctggaagcagctgtgccacttcgcattttgagtatagcactggtagcaagtttatttgggtggctctataatacttgtgttttggtgccatggaaaagagaaggtcaatttttggtagcaacgcttgtgagtgcaattttgaacgtggggctgaacatcctgctcatcccgcggttccgggagaatgcggcagcctttaccaccctgctggcagagctgtgctccatgatgctctgtatccgctgctccaggggtctggtcacggtctcagctgaccggcgcaccgttggctcggtgctctgcggctgtgtgggcatcgttcttgtctgtaccggggtcaaggcactggctctgcccaatctcatctgcattctggcggcagtgctgggctcagtggctgcatacgcggtcatcctgctgggcatgaaaaatccgctggtgctggaatatctggaaaaagcgaagcagaagttccggaaaacatcctgaatggacaggacccgctgtgggggcgaacactccctgcagcgggtctttttcagaagaaacggcgttttttggtgcgttccggcaaaatcaccacatttctttgcttctgcaacaaatgtttgttaataaattatccatctcccgtccttgcaatacacacgctttttgtttataatagggatgtacggggaagttcgcagtgcgcggcccccgatgaagagcaaaattcgattccgaacgaaaagaatttgagaggagtttgttaccatgggtttaggtaagaaaacgatcgacgatcagaattactgcggcaagaaggtccttgtccgctgcgatttcaatgtcccgatgaaggacggcgtgatcaccaacgagaaccgcatcaatgcggctctgcccaccatccagaagctggtca

SEQ ID NO: 1093 - DNA, 8542 bp, unidentified
  source 1..8542: mol_type = unassigned DNA
ttattttatagcgtcgagtgcgtttgagatatctgcaatcaaatccaccttgtcctcaagacctaagcttattctgataagctctgccggcactcctgcttccttaagctgctcatcattcatctgacgatgcgtgcttgttgccggatttaagcagcaggttctcgcatctgccacatgtgtctcgattgcaccaagccttaatgccttcataaatgcagacgctgcctctctgccgccctttaagccaaatgatacgactccgcagcctccgtttggaagatacttctgtgctctctcatagtatttgtttgaaggaagccctgagtagtttacataggcaacctttggatgattttccaaaaattcagccactgcctgtccattttccacatgctttggcatacgcacatgaagtgactcaaggccaagattcagcataaatgcattctgtggtgactgcatagaaccaaaatcgcgcataagctgtgctgtacatttggtgatgaacgcaccttccttgccgaatttctctgcatatgtgatgccatgatagctgtcgtcaggtgtgcacagtcccggatatttatctgcatgtgccatccagtcgaatttgccgctgtctacgattgctccaccgagtgtggctccgtgtccgtccatgtactttgtggtagagtgtgtgacaatatctgcgccccactcaattggtctgcagtttacaggtgtcgggaaggtattgtccactataagcggtactccgtgctcgtgtgccacctttgcaaaaagctctatatcaagcaccgtaagcgcaggattggcaatagtctcaccaaacataagctttgtgttcggtctgaatgctgcattcagctcctcctctgtagcatcaggagatacgaatgtagctgtaatacccatctttgccatagttaccgcgatgaggttgaaggtgcctccatagatggatgatgatgccacgatatggtctccgcactcacatatgttgaacatggcatagaaattggctgcctgtcctgatgatgtgagcatggcagcagtgccaccctccatagctgcgatttttcttgctaccgtatcacaggttggattctgcagtctgctgtagaaatagccctctgcctcaaggtcaaaaagctttcccatgtcctcgcttgtgtcatatttgaatgtagttgactgaataatcggaatctgtctcggctctccgtttccggctgcatagcctgcctgtacacactttgtacctatactgtattctttcattgtatttctcctttaatatgttaatgtttcagttggatatagtatattacatttggcgcgttttgacaaattcttcaaatcgtggaagtgtgagagtaattttaccgtactcagaggtatctataaccccctttcttttgagccggtctctatataccgagaataatcctgaattcatatccagtttttctctgatttcttttaccttttcttcaccacttactgatatttccaacaatatttttttatcaagctctgacagctccgaccagattttactgtacacatactcatcaaggcactgatcatattccggtaaaatatcttctatcgtgtgatcatccctgttttcccagtaaagatatcccaatacctggaatgcaaaaggatatccctttgtaagagctgccattttgtctgcctctctttgatccagttcaaaaatatccatatagtgtttcctgactgctgtaaagctaagtggctcaagcattatcttaggcgccctgtacaaaaatgtaagtgccttgtcgttctgcagatcatatatattttcaaacagccccgtcataagcagaaaaataggataatcctgtctcagaaatatctgaaatgaactgacaaatacttttacaaattcacagttcataacctcatcaactgaaatgagtaaccgcttattatgtttctttatattttcaagcatcaattccagcacattttctatatccgtaaccggtgctgcattttctatggaaacgcccagtccaaacgctgaaaaatccagttttgcattgacaaatattttattcatctgaggcatactgtaaatcttagctgcaaggctctgaagcatatctctcgtagggttaagctcaactgtcagccattcctcatccttctttatctctgatactatattggtcatcataaccgttttgcccgatccccttaccccggttatcataaaaagctggtttgcaggattttctgacctaaatgtctctactatctgattggtctgtgagattcttgatatatattgcagtggttttttcccgaatgataatgtaaatggattttgcattttgttttccccttatataactttatataactttttgtttcgtatataagtttatatagccttatataactttgcatttattatataactttatataacttttgtcaccataaattcttaatctttaaaagcatctttataagatattttatctaccagtgcttcataactgctgtcatcagcttgtactatctctctgacattgtgctgctctaatgctgctgttgttttttcacctattgagtatgctgtttccacgtatgcattctccggcagcatatgaaaaaatctttccacatttgatgcgcttgtaaaaacagcttcacttaccatgtttccaatgctttcaggaataccctcatatgcctgctcatttacatatgcatcaattttttctaattcacatatttctttaagccctgcctcaagatcaggtgaagcctcctttgccgagaaaatgcagactttacacattttatcagatatattatcattgcttaaatccaatgtactatttttccctaaatcaaatgtatcctcatcacttttcccataggcatactgcatacataatttcattgcatctgcaagtccttttccggtctgttctgccggaataatatctgcatttatgtggtgctttgcaagctctttttctgtagcttttcccaccactgcaaaccttgcatttgctataagcctgatgtctgcacctgccagctccagattatagaaaaatgatcttacaccgtttttgcttgtaaaaactatccagtcagccgatcttaccttattggcaaaatcaagaattattatcgggtttattatgcctgtcttaaccggtgtgacatctgctccaagctgctgtaattttgctatcaattcgtttgttttgatatacggtactgtgatttttcttccaaacagcggtcttttttcaaagaaatcaagcctgtcattcagtgaaaccacatcccccacaacgattatagccggtgatgtcagctttgcttcctcaatcttttctccgatatccgcaagcgttcctatacatttgcgctgcgcagcaagtgtgccgttcgatatcactgctgccggagtatccgatcttcgtcctgctttcataagccctgctgcaatgctttttacatgcgcaagtcccatcaaaaatacacaggtgattgtctcatctgtaaggagggaatagtctatatctgcctcctcatcctttctgctgtgcgcagtgatgacctgaaagccttttgctatgcctctgtgtgtgataggtattcctgcagccgcaagcgctgcaaccgatgaactgacacccggtaccacttctacctccacatttctatctaccaggtagagagcttcctctccgcctcttccaaatacatacggatctccgccctttaaacggactacaagctcatgatattttgatttctcgtacaaaagctcgtttatggcatcctgcttcatgacatggttgtgattttccttgcccacataaataagctcacagcctgcctttgccattgaaagaaactctggtgatgacagcctgtcatacaccagacaatccgcctgttttatatatttttctccttttaaagtgagcaggcccgtatctcccggtcctgctccaactaatactacttttcctgtgttttctctcatgattttcctaattactttccaatttataccgaatatcgtgcaccgcacgctccacaatattgtttctgtctgatgtcatatcccatacctgctctgtccttgcaagctgttttccatcctctgaaccaaacatcgcaagaagctttagcctgttatttttgttgctgtcattaccgcggtctttttctcttacaatatcacagtatgcagccacaggcagatgacagtttccaccgatttgctttaaaaattctctctcaatgcctgcgcacagatttgttttctcatctgacaaagcatcaagctttgccatcagcttagcattgtcagcacgtagctcaagcgccagtgtgccctgtgccggagccggaatcatatcatcctctgaaaagtactgtgtgatctcagaatctcttccgatacgctttattcccgccgctgcaagtacgattccatccagcctgtattcgttatacttattctgtttttcgttagctatctcattgttatttacagtattatcggcaacctcttcatatataatttcaccatcatatagcttacgaagccttgtatcgatatttccgcgtatgccaaccaccttaaggtcaggacgcagctttaaaagctgatactttctgcgcttgcttccggttcctatcacggcaccatgaggaagctcatccagtgaagcggcatttttcagcaccaaaacatctcttggatcttcacgcttccatgcctttgcaaatgtaagccctgctgccggttcatcaggcatatccttcatggaatggactgccatatgaatctttcccaataaaagctcgtcctctatctcctttacgaagataccctttgagccaatcttatcgagtgcctttttctgctctaaatcgcctgttgtctttatgataacagccttaaaatcatcatccggatatgctctttttaacttatctatcacgtaatcagtctgaacaagagcaagctttgagcctctcgttcctattaaatacctcattttactctcctacggatcatgccattttccatttatcatttataaatgaacaacaacttaaaatctgtaataccatactttaaactatatttccggaatccttccattatcaatagctgcacacaagatttctttaaatacacgctttctctcggcttccgtgtcatattgcgctattactttttcgcggatctgtcccatgtattcgttcagctcaccaagaaacggagtaagaatctcctgctctttgcctttcagatactgggtcagcacagggctgtttcctccgctcgaaaatgccgcaacaagattcttttcctttatgtatgacggaaaaataaagctgcaatcagccttctgatcgaccgcatttaccatgatgtccttagctttgcaatactctgcaatctcatgatttaaagcattgtcatcagtggcagcgataaccatttccatgccgtcacagtctttttgattaaactttctttttataatcgtaattctgtcagctgcatctgactccacctgactgccttctttgtttgctgcatctaatccgaagctgcccttatttgctctatcatcagctataagagttctcaacgcttcgcatatatcctctgccacaaccgtgaccttcgcgccaaaatccagcattacgatcaccttgcggtatgccacatttccaccgccgacgatcagacactctctttccgtcatatccacaaacatcggaaaatacgccatttttatctccctgtaataccatatccatactttatttcatacattatttcatgccttattttatactttattatactctttatgctttattttccaccttattcttcacactgtaaccgtttaatattcctgcaaaaacaggacgaagcttagcagaaaacactgctgccgatacgcataatataaagtccggtgcaaccgttatcagacagtaatctactattacgatgccccagctgacaggtgttgccgcatagaaattcttcatgcagtaaaagtatattgctccaactgtataatatgccaccagtccgaccgttgccggaagaatgagtgtaaacgcattggtctttttaagcttttctgtgatagctccgattaaaaatgcggcaagcacaaagcctaagaggaacccaaagcccggtcttaaaatgtatgtaggaccaccgcctgccgcaaatacaggcactcccaccagtccgatgcacaaatatactatcacgctaagcgatgccagctttgccccgagcagaaatcccgccatcagcacaaagaaccactgtaatgtaaaatgcatggtgtacataggaagcggaatatcaatcttgataaatgctccaactgcaataagtgccgcaaaaagtgcacatgttgtaagttccttcgtttttaatttcattttcgaacgctctttcgttttattaaatatacatgctataataacatctttctctaaaaaagaaaagccatcttcgatgaagctgacttttctttgcagctttcgctgcgactcaaaacattaacatatgatttagaagtaatattcatcagaatatattcgtaaatcctctttcgcgacctgtccaccctcgatatgaaacgagttgattacaggattttctgccataagcgacattatcatgtagctcgcacttggatcgtatgcaagctttatatcctcatccgatggccttgaagggctagacgggtgtgaatgccagttgccaagcggcttaaggccgtttgctctcatgtcctttatggctgccagctgctcctttggatccattgtgaaatggtcctcggcatggtctgtattcgtcaggtaatatacctttgtgatgagacgaccgttttcgtcctcactgcctgctatcagaccgcacgcctcctccggcagatgctctttagcatattttgctatttcatccagaaacggatatttcattcttatgatactcatatcgttcctttccttactgtctttttattcctgtgtacgaggtgcatcaaatcggcccgctgtctcctcgcagacctcctgctcgtagtcgattggctcgagaatggtcggatggtcgccacagactgcacagttgtgtgtatcctttggaagcttaatcttgtggaactccatggtgagtgcatcatatgtaagcagatatcctgtaagcagctctccaacaccgattaaatacttgatagcctccatagcctgaagcgaaccgattactccgcccatagctccgataacgcctgcctgcttacatgtaggcactgcatcctttggtggcggattcttgaatacacatctgtaacaaggtccctctcccggcacatatgtcatgagctgacccttgaaacggatgattcctgcatgtgaaaacggctttttctcaagcacacatgcatcgttgattaagaactttgccgggaaattgtcagttccatcgatgatgaaatcataatccctgataagctctctgatgtttgacgcatctacaaacatacggtatgtattgacctgaacatccgggttcatggcgttcattgtctcttttgctgactttaccttggcttttcccacatcggctgttccgtggataatctgtctctgcaggttggataaatctacctcatccgcatccacaataccgattgtgccaactcccgctgctgcaagatacatggctgccggagctccgagtccgccggcaccgataataagcaccttgccctttaataatttcttctgacctttaacgcccacctcattaaggataatgtggcgtgaatagcgttcaatctgctcatcagtcattgccattagcatccacctcccatgaagtaaaggaactctacattgtcgccatccttaagcactgtctttggcttatcctctgtggcaacaaattcctcatttattgaaactgttacatactcaggcatatctacattctcaagctcgataagctccggtaatgtaagtccatccttatattctttcttctctcctgctactgtgatagtcattttatttcctcctgtgtcacagattgtggtatctgtatgtgttattatcctgtatcagactgctttatataataatctaaaaactataataatgcttcaacccacgctttcaaatcggcaggcttttgtgcgccgacctttctgtctaagacctctgcgtcttttacgaaaagcagtgtcggattcgcagtcacctcatactcatcagcgagctctccgtcaaagtttgtgttgaccttgtatacgtgaagcttatcctcataatcatcctcgatatctccgagaaccggtgccagcttcttgcaggccacacatgaatccgagtaaaaatcaacaattaccggaagcttgctttttaatactttttcatcgaaatcagcctttgaaattcttgctgccat

SEQ ID NO: 1094 - DNA, 27721 bp, unidentified
  source 1..27721: mol_type = unassigned DNA
attgaacggagtgcatcgctctgtttgggtgcggcactctggatgcttgaccgtgcatgggaaagtgagaccattctggaagtgtcggatcttctcccagagagttacagcggcgttgattgcgtagacgtctatgacacaagattccaccactccgtatttaagaagatgctgctggttatccagacccggtacggaaaggacaagagcaaatatgtggtgccggagagcatttttgataagcgagatccagaggacgcctttcataaaataatggcattgcttccgccggaacgcatagaattggctgtcgagaaccttaaacaaaaattctgggaatgggctgatttatattttgacgtcctgtcaccgatggtcaaggaactgaatcggttggacgaggcgatggatcggctagaagatcagatgcgcgagtatcttgaccgaaagccgaaaaagccggatttcgccgcactgaaagaccttacgctgatggatgatagaccactgattggccggttgtcggaggaagagcagatgatccggcagatggagggacttgaagaaaaacataagaaggctgaacatcgaatctacaacctccattttgtgagtctttcggcgggagttcatgggaaaaagcagatcgcagaatgtgtgggagataattttgcagaagcattttgcaatttccacattgatgatccctatgagatatgctttgcgattctctacctcttagatcaggatgacgactatgcgtgggtgtattcgtttatgactgccgttgtctgccgtgcagcggctatgcttccgtgggggctggaactttacagcgaaatggatgatggcatctggtttcaagacaatgaatggatagagccaaagcccttcgacccggaatggtatgaaacaaagtatgcgggagaattgtatgaagatgatgatgacccgcatgacgtcagccttgcgcagcttgtttaccagtataccggggcagttttgccgcgtgatatgaatcggtttgatggattgaaaaaagaacttcgtgcaaaaggattaaaaccgtctcaggtcagtaccctttgcgctatgatgaatgtcattggtgaagtttccagacagagatttgatttcagcaaatacgccgatcaggatgattgggacgattgggatgcagaggaagaggcagttacagaagatttagcgtcagaaaatgaaaagctgaaagctgaacttgctaagctgcgcaagcaggccaaggaagcaaattataatctgagcagagaaaaccgtgaactgaaagatcagctggaaaaaatggaagccggggcgggagaactgcggcaggaactcgcagatctccgggaagtcgtgttcaatcagcagaatggggcggaagaagaaaaagcagaggaaagcaagatctcgttcccgtaccacacatcccggcggttagtggcttttggcggtcatgattcttggctgcgtgaaattaagttcaagttaccggatgtacgatttatgagtgatgatatttccagcccggaaatcatcaagagagcagatgtagtctggattcagaccaactgtatcgggcataaatcttacaacatcattatcgaccttgcccgaaagtacagccgcaaggtgcggtattttgcctatgccagtgcaacgaaatgcgcggaacaggtcgttgaggaagaagaaaacacagataaatgaaaatagagtgtgccgagcaggcggttgcaacgagaaacaatgaaaagtattttgtgaaggtgatggatgttaaatgggagaaaaagtatataagccaatcatgaatactggtgaccatcttgtccagtccaaggataatccggatcgtgtgagaggtcttacacgagatatgaacaaccagaatccgggtattccggagtgggaggaacttgaccttgaagatttagtccctagccaacaggagccagaaccatatgagccccagcctgtccaattaacgccggaggaagagaagctggcgaaaatggccggcgaagcgttaggcgcagcaatctgtagaggaacggaaattcttattaaagacgtgatttccccatggtggaaaaatgtagcgtggccttggataaaggacaagggtgaaatactggttgccgttcttaacaatgaaaaaacaaaagcagagcaaatcaaaatgcctgaaccgaaagagacaaggccaacggtaccggatgttgaaattcaaacgctggagaatgcgtttgagcagatttatattgatatggataaagaagaagccagaaagcacgtccttcagcttgtatatcacatccttggaatggccaatgaaatccgtatcttgagcaatgctcgaatcagtaaggaatgtaaatcggaacaggaatgcattgaagcgcagcaagccgcagaaaaggtgctatcagagaaaacatcggcgatgctgaaccagcttctctcgaataagaccttgcatttggatttggacacatcgagggaactgttcgatttgactggtggtggggtgtatctgaacggagaatatgtgccggttcttgagtgcaaaattgaagaagcagtaaagaatacatccgtcaaaaattgcgctcagaacttaaagtgacccgacttcctaccttgttatgatatgctagtgcaacgaaatgcacagaacaggtcgttgcggaagaagaaaacacagataaatgaacaaagaagccaaccggcgtagatttacgcaggctggctcctttgttatagcgaaccaccgaggaacattccagttgtgagagaattgtcctcggcggcttttttagtttatgtagcagcggtcctgttttacaagccaatcttcacatagccgctgggcttcgtcttttgtgcagcaggtgcagttgaaaagcctgccacggaaagagcagtatgtgtagtgtaccttcgggattccattggcgtctcgaaaatcaacgcagcgttcctcaccgggcagcagatagatcgtatccacgttcagcagctcctatcttttatctttggtcatgtgcaaacgacacaacgcttgctattgtaccatgtgctgtctcaaaagaccattgcctttttgaccaaagatacgcacaaaaattttctgtctcaaaagcacttggatagcgttgaataaacaccatctgattgtgtataacaaaaaatgcgacaggtatgctattggtgtgcaataaacacaaacagaatgtgaggtcgctatgaatacacttttggggcaacgaatacgagagcagcgcaaagaaaaaggctggacaattgaacagtttgccgaacgaatcgatttgtcggcaaattatgttggagacttggagcgcggagttaaaatacctaaactggaaacatttatccgaatcgttgaggtgttagacgtatccgcagatgtgcttattcgggattctgttccgtccgcatcccatgtggttgatgacgaactgaacagaaagttgagtcagctcacaccggggcagaagaaagctgccattgacatcctgaacgcatacaccgacaatattccctatatcacaaaataatttctgtgccatcggagcaccagcaaacacgctggtgctctttctttttgccctcaaatagtttataatcaacaccataagcgtttatataacaccatgtgtgtttatttgaggtgaacgacatgacaattctacccaatatcgaagaagcaacggaagatgcccggaatggaaagctgagtccgtattggcagaataatctaaaacgcgaatgcctgcacaagaagttatcggatgaagaacagcaggcgcttttggaactgaatcgcattttgtccgagactccgcaatggagcagcgaagaagaactgtgtatcgaaatggagaacatcggtggcagggttcgcttctgtcacttttgggatgagcactactccatggtgcagttgacggaagaccgcaacggaaaatactccgcagcctacgttctggacacagaaaccaccccggatgtgcgtaaggcggcagcattacaggcacagaaagaacttgcggactgtatgcaggtgtggggcgtttcgcttctggatgcgcctgttcctgaacagatgaagtacgattctcttgcagaagctgcttctcacctcatgcaagtgctcaacgacccggagcgcatcaccgggtaaaaagcgtcccatcgggatgcgcagcctgcattgtgaaaatgcagatcaaaggggattggggcattccccaacaagcgttttgcaacgcaaaaatggtctttgtatatacgaagacactgcttgccgcgtagaaattcccgtaaacttctgcgtcagaaattttcagatcacttcagctttgcgaggatatcgtctgcgctcacgccgcttgccagcaactttttcagcacgtcctctgcttcagctttctttgcggattccgcagctttggtttcagctttgacctttttagcttcgattctggcgatttccttgtcgatagatttcagctcagttttcttggttttcaggtcaactttcagcgcatcgatattcgcagtgatggatgcgatttcggcggcagcggcttcctttgcagactgcttttcagcgatctgcgcagcaaagtcaacggttgcttttacagtcttgggcttgttcttgcttcctttgggacggggcataggggacacctccaatgttttttaatggcttcagtataacactcgttttttatgttcgcaagaggtgcagtttgtagaataaaaatatatctatgagtgaaacaataaatcaattttggaatatgcaccggcgcgggtcgccaattcgttgggacgtattccccgctgggcgcagagctgttcaaagcgtttggcaatggcatcttttacaggcatgataaagtgcacctcaatatgatggtacagaagttcgtgcagtattgtgtatgcaaaagtacctcgtggtgcagagaatatatttaataaaaaagtatcctccatagtgaaaatggaggatacctatctttcgacatcattgtttgattctccctattattttatcatggttatatctgggaatcaatagaaatccgtacaaatgtattccatatggccttagaaaaaacctcgcagaagctgaaagtttgttgcacattgcccatttttgcatgaaaaatccagctagaaccgagggtagacagaataagtggtcaaatgggtgtccaagccgcaggaggaaacaaaaatggcacgacggggagaaaacattcacaaacgcaaggatggtcggtgggaaggccggtacatcaaggcgcgcacgccggaggggaagatccagtggggctacgtctacggcacagcctatgcagaggtcaaacgggtactgatccagaaaaaagcagaggcgggcttctacaacctgaaaagaaccgacctgacctttgaagcactgactgaagtatggctgcactcccagcggaatgccgtaaaagaatccacctatgcgcattattcgtacacactgcacaagtatcttcttccggttttgagcaaagtgcccgttgcatcccttgacgagagctttctggaacaggccatgcagcagatcatcgcgcccacagatgccgcacacaagccgctggggaactcctctgcccgtgaatgcctctcgatgctgcgccgcatctgcaaatatgccgcacatttgcgtctgatccgtccgatggaactggaagtagcgctaccaaaagctaacgacaaaatttctgcgcctctctccccggcggaacagcggcggctttatcaatatgtgcaggagaatccaacagcacgcaagattgggctattattggggcttgaattaggtctgcgtattggcgagatttgcggcctgcaatggggcgattttgacttgaaactcggaacgctgaaaatcaatcggacggtctgtcgaatttcctgtggaaacggtcatacaaaggtagtcatccaaacgccgaaaacccgtacctcccgccgggaaattccaatcccaaaacaactgcttattatgctgaaaaagctgcgcggatgtgtcagcaatgctgcatggtttctgtccggcaacgagtccaagcccaccgagccccgctgctaccggaaaagcatcaaggcatatctgaagcaggcagctgtccggcaagtacgtccgcacgcgctgcgccatacctttgcgacgacctgtttgcaggcggggtgcgatgtgaaaacgctcagcgaattgttaggccacgctaacgccaacatcaccttgcagcgttatgtgcactctgacctgactcgaaagcgccgggagatgaaccggatattctcccatcaggtgtctataaggggcaggaaagcactaaatcaaatgtaataacgttgaatttcgcccatagcctttcattttcactgtgaaggatacccctttattgcggaaaggggtgaacaaggtggcattgcgtctgtttgagcacaacgagaaagcatatcatgcggcagtccggatgatggagcagtatggcaaggctgccattgtccatcccaccggcaccggaaagagctacattgcgttcaagctgatcgaagacaacccggagaaggtcgtaatctggctttcccctagtgaatatattttcaagacccagttggagagcctgaaaaggaacaacccggattttccgttggcaaacgttcatttttatacctacgccaaactgatgtgctgcacgcaggcacagctggacgaaatagcagcgcagaagcctgcctatattatactcgatgaattccaccgtgccggtgcagaatgctggggcgaaagcacggtggctttgttaaagttatgcccggatgcaaagcttctggggctgacggcaacaaacgtccggtatctggataataaccgtgacatggccgaagagctctttgatgggcatacggcgagcgacatgacccttggcgaagcagtcgtcaggggcattttgcctgccccgaaatatgtaactacggtctaccagtaccagaaagcccttgcaaagtatcagactcgggtggacaacctgcgggcaccgggcattcaggatgccaaccaaaaatatctggatgcgctgcgccgggcattggagcaggcggatggtctggatagggtctttgcccatcatatcacaaataaatcgggaaagtacatcgtgttctgcgccaacaaggagcacatggacgagatggtatcccatgtgccggagtggttcgccggggtcaacccggatgtggcagtgtatgaagcctactccgatgatcccaacaccgacaaggcgtttgcgaatttcaagacggatacgaccaaccggctgaagctgctgttctgcatcgacatgctcaacgagggtgtccatgtggagaggatttccggcgtgatcctgttccgtccaacgatttcgcctattatttacaagcagcagatcgggcgtgccctgaccgccggagataccgcagccccgctgattctggatgtggtcaacaactttgagggcttgaccagcatttccggtctgcaaagtgagatgcaggaggctgttcaccggctctatgccaacggcgagggtgataagatcgttaccgagcgattcgaggtcatcgagcaggtgcatgactgccgggtgctgttcgagcagctgcaggcgagcctttcttccggctgggagcactatttctctgaggcgagcatctactatgcggagcacggcaacctgaacgtcccgaaactgtataccacgcccggcggtctgagcctcggtgtgtggctggtcacccagcgccgggtgcgcgagggacagattcaaggcaatctgaccgagcagcagatcgcgcggctggacagcatcggcatggtctggggcaaccggaaggaaattgcgtggcagcacggatttgaggtcgcaaagaaataccacgacacctacggaaacctgatggtgcccggaaagtatgtggacccggacggctatcccttaggacagtggatcatcaagacccggcagcaaaagctgaacggccgactgaaggaagaacgcatcgcacagctcgatgagatcggcatggtgtggaatattttcgatgccaagtgggaaaaggcttatgcgctggctgcggcttactatgaggaaaacggcaacctgaatatctcacgttcctatgtgacagcggctggcgaacgactgggacaatgggtcgaaagccagcaatgggcgtacccgaaaggaaaactgacggaggaacaggtcgagcggctcagccggatcgggatgtactggggcaaccgcaatgaccgcaagtggaacgaggggtatcaggaagcaaagcgctattttgatgcccacggcgacctgaacgtcccggcagaatatgtgtcaccgggcggttacaacctcggaaattgggtcaagcggcagcggtatactcgccagaatcctgaaaaaagctgcgctgtcctgacagaggaacggattgcaaagctggatgaaatcgggatgcggtgggggaaaagcaactcgaaatctcaaaaatcatgtctcaaattaaaagaaaaggtagaacctgcaaaagcaggatgatagtgtgaggaaaatatggaagaattgaattaccacgttgattttggaccgttctatgtccatttaactcagaagcagaaacgataccttgcggtaaggtctgtgattgaccgtgttttggcagcgctggcgctggttttactttcccctttgtttttgatggtgagcattgcccaaaaaatcagtgcaccggacgaaccgattttctttcagcaaaagcgagtaggtaaaggtgcgcattgctttaatatcatcaagttccgaacgatgaagagctccgcgcctaaaaatgtggcaacgggagatttggaaaatccgcagatgtacatttccaaagtgggtcgttttttacgagacaccagcattgatgagctgccgcagttggcaaacgtggttcgtggcgaaatgagcctgattggtccacgtccgctggtgtataccgaacgtgagattcgctttctgcgtcgctggtacggggtgtatcaggtaacaccgggcattactggttgggcacaaatcaacggtcgggacacggtggatgtatacgataaggtttactacgaccgcgagtatgtccagcatgttagcttgaaatttgacctgaaagtcatttggaaaagtattcaggtcgtgttggggcgcaagggcgttgtggatggaaaaattgacccagagttccggcgagagagtattgttttattaagagaaagtaaaatcgtagagagaaacgagaatccctgtggagtgagcgtagaataatgtaaatccgactacgaaagtgtgatgaagtatgaatttgcggcaattcattaaaggacattggtcggcacttattggcggttgcttggttttattgttagaggtcatacaggaaacgggctatgttatgaacaacgacgaaaaacatttcgaacacaatgatgcagactgctttaatgttcgcgttccgctacccggcgctcccggacgcattttccatgtgggtctggttctgaatcaggtggaggaatgggcaaaacagcatccgcaggagaaagtgatcgtctgtattcttgaatgtagaattgggcctttgctgattccgcacgccaaaaagttgcacaaactgggcgcaaaggtctactgcaacccagatgggttggagtggaagcgcagtaagtggagcgctccggccaaagcttttctgcggtattgcgaaaagtgtctggtcgagaacagcgatttggcaatctgcgattctgtcaacatcgagaaatacatcaaagatacttatggcagtcgggtgaaggatatgaaagtaacgtacagatggtgtaaagatgcaaaattatagtgttttgatgtcggtttattttaaggaggcgccggagtatttgaagcaggcgattgagagcattcaagcacagacattccagacgaatgactttgtgctggtgtgcgatggtccgctgaatgatgggttagatgccattattgctaaaaagcagcaggagatgggtgaaacattaaatgttgttcggcttgcgaaaaacggcggacttggcaatgcgctgaatgagggaatcaagcattgcaagaatgagctggttgcccggatggacagcgatgacatcagtgcagcagaccgttgtgagaaacaggtcaaactattcaagaaaaatccagaactagatataacaagcggggcacttttggaatttgtaaccagtccagaccaaataacaggtggacgtacaattccgtgtagcaacgatgaaattatacgttactctcggaagagatgtccattcaatcatccctgtgtgatgttcaaaaaaagcgcagttgaattcgcaggaggttatcaggaaaaataccacctgtttgaagattactatttatggattcggatgctgcaaaacgcttgtaaggcgcaaaatcttcctgatgtgctgctttatatgcgaacgccgaccgatatgtatctccgccgtggtggaactgcatatgcaaaagtgatgcttcgtttccattggtgggtatataaaagcgggtgggcgagtttggcggatttttgtacgggagcagtaccgcatgcactggtgtgcgtgatgccaaataagctgcgcaaaataatttaccaagtgattcattaaaaagtgtttttggggaaagatgagcagatgctgaaagtcgtatttgtaacgaattacattgtaagaaatggcccgggaaatgtgattttaaatctcataagcaatcttgatgatgctcggtatgagatatcgctaatcactttatttgaaggcaacgatacatatgtggtgaaaaatctacgcaacaaaggtgtgcgtgtatatgagtgtgtaacactgaatcgaacaatgtgtattctgagtagggctgctgaatttgaggaaatcgtacaaagagaaaattttgatgttatacacagccatggatttattggagatatactatcttctcggctgaatctgccagtaaagcgaattacaacaatccacaacaatatgtatgaagactaccttgatacttatgggtacgccaaaagccgtatcttcattgcgctgcacatgacagcattaaaaaggttggacgagtgcgtatgctgctcaaagtccgtttatgatgtgatgaaacgtcatctgccgaacgtatcatttattcgcaacggtatcgagccggtgcaggctcattccgttataactagagctgaagttgatgttccggaggatgcacgggtatttctctatgcaggtgtgttgaattccagaaagaacatcgtatggttgatcgagaattttgtgcaatgtcacgaaaatgatgagtacatgcttgtccttggcagcggtgaaaaagaagcagagtgcaaagcaaaagcggatgatcatatacggatgctgggatttcaggcagacccgattgcttacatgaacatcagtgatgtatatgtgtcggcgtccaaatccgaaggcttttccatttccgtgctggaagcgttgtcttgtggcctggggctgttgctgtcggatattccctcgcaccgtgaagttgtggagatgggacaagatgtttacctgggagaggttttctcgctggataatttcaagttcaagctggatgcgctgaggaaaaaaaagatagataaagtagaaatcagcgcatttcaggagaaggaactgtcggccaaagagatgacaaagcaatacgggaatttctatattagttaaaaaattgcagcggaggtaatgctgaggatggcagtatattggtcagcatgtttagcatcggttttgtttacatggtttgctatacatgttaagcatgagaaggagggaatacggtactggttattagtgacctttgtagcggcattgcctctgatttatatttctgcgattcgatataatgtcggagcggattatgcggcatactataagtattataatcggattgtacagggtggagaccgagaacgatttgagattttatattatttattaaataaaggaatagcgttgttacatatgtctgcaccatggatgtttgctgcgtgtgccatgctttttctaatgccattatataagatgattctatcggattcgccgtatccatattttagcatatttcttttaattgctacgggatactatttcttttttttgaatggtacaaggcaaatgattggcgcagcaattttcatgctggcgataccatatatcgaaaagaaaaatattcttccatttatagtgttaaccctgttgtcaacgggatttcatacgatgagtattgcttttatagcaacgtatgctttttctatatggaggattgataatagatttcttttgattgttacgggcggattgattctgctgtcaaatgtggtagcaggattattcaataacataataggggggttagactactattccctttatctagcgtcatcctatgcacaaaaaggtcaaggcctaatttctcttatcatgtctggatcaattgttgcatttgcaactgtgttttatcaaaaaaacaatacaaaatatcaagtatattacaatatgcaggtgatagcattttgggtgactattatgactggaaaggttgtgcttatagaacgttttcgaatgtcatttggtttatcttcagtcatttttattccaatgatactcaacggaataaaaaatagaaaaaccagacgtatttgtggtggagcaataggcattctctattttttttacgttacatatacaattggtgtactgaatggaaatagcgtactcccctatcagacaattttttctgttatctaatgaaggaaacgcctatgagaaatgaattgacagtagtgatcccggtttataatgttgaaaagtacctgagtaaatgtatcgagtcgatactaaatcaaacgttgccagtggatgaaatcattctggtggatgatggatccaaagatagaagcggcgaaatcgccgacgaatatgctgcaaagtataataacattaaggtgattcatcaagaaaatggtggtttgtccgcagcgaggaacaccggtattgatgcagcgacgaaagaatacattgcttttgttgattccgatgattatatagattccattatgtacgaaaggctgatgagccaactgcaacaagatggcgcagatatttccattggcggtgtgtggtacgagcaggaaaacggagctaagtattccccgtatgcgtcggacatcactaaaatctggaataaaacggaaagcctgattgaactgaacagttatcagtatttcaatatgagcttttgcgatgcaatcttcaaacgtagtctgtttgaaacagaagcctatggagaaggaaaactgagattcccagttggaaagctgtgtgaagatttctatttgatgcatcgaatcgtggccagagccgagtgcgtaacctatacttctacgccattctaccattatgtgcaacgtggaaatagcatttcaagaaatgcaaaagtcaatctggcgccgatggatgcttcgttggcacagcttgagttctataaaaagtggttcccggatttggattacatcgctgagacagcggccttttttgcgcacgccagtatttatacgacctattgcagaaacggtcagaaatgcccgaaggatttgttaaaaaaaataaatccgatttgcagggaatatcttggaagtgtgctgaaaaacagctatattccaaaggtaaaaaaggcacaggcactcatgttctgctatgcaaagccggcatataaaacaattgttagcaggagggaacacagatgaatatcggcaatttcttacatacaattagaagagtatggagcaaaagatcaccagaaagctggctggactatctgcgtgctgagggtaccacccaaggaagtattggctgagttcttttggatttttgaggaacgggtaaacttagaaaacgatgcattcattgggaagatgaaatgtgttaataattatgaagcatctttggagacatttctaaacagtaaaccattgtttcatggctatgactctttcacagagtatgctttgaaaaacggaggatgagtttaatagaaattcttgtgaaggaaggttaatcctatgaaagcaagtgtgattacattacatacagttgataattacggctccgtaatgcagacatatgcaacgcagcaaattctaaaaaagtgcggatacgatgtggaatttgtggattactggagaaaagataaccttccagtgaatcgagcagaaaaaatgttggaaagtagcactctgcaaaaattgaagccgctgtggggcataaatggcttcactcgcaaggcaatgatagcgattttgaagatgatacttgaaaaccggaaatcacctatgtggagatttttggaagaaaaagttcaactaacagaggtcagatactgctcctatgaagaactggaagcaaaccctcctgtggctgatgtttatatcaccggcagtgatcaggtttggaacagcatttggaatcaaggcattgaccgttcatactttttggattttgctccggctggaaaaccacgcattgcgttctcggccagtattgggcgtgaacagcttgatgcagaagaaacacctgagacaaagcgtctgctggaaaaatacagtgcaatttccgtccgtgagcagtctgcagtagtacttcttgcttccatggacataaaatcaactcttgttcttgacccgaccttgatgctggaagcaaatgaatggagaaaacttgcttcaaaacctaaaattaaaaagcaatatcttttgatttatcagctgaatcccaatcctcagatggatcaatatgcggaacaacttgcgcaaaaaaaggaatgggatgttatccgcattggctttggacgctcggatcgccgaaaaggtggaatgtgtgttatgctgccgtctgtagaggagtttttgggtctgttttgcggcgcggcgtgtgtattaacggattccttccatgcaacagcattttctttgaacttgggaaaagatttcatcagcgttcttcctggaagatttggtacacggatagagagcattctgaaattgacgggaacggaaaatcgacttctcacacggtatgatgattttgaagtcgtagataaggttattgataagaaaagggttaaagaaatgctggaaaagaaaagaacagaagatattcaatggttgatgcaagcgttgaatgtttgaggaggaaatagggatggcatggtttttgttaggcgggcacttttccaatggaggtcctgataatgttaatcaggcattgattacaagtgcggatagaaaaattttatatatcaagagtaacaacaagcctgttcgcgttttggaaacgttttggaaaatactgatcagtgaaggagttgtcgtttctggcgtatgtgctaagcggtactatgactttatgaaagtatttcataagaagtttgtgtatttaatgcacgggtgcatggatttcgagaacgaaatcaatagattacacctcacatcggatttcattgaaaatgaaagaaacctgctgagagatgcgaaatgtattgtatgtgtttccgaaggatactctgagtgggtaaaaagtcgctacccggagtacgcaggaaaaatcacatttgttaataatggcgtcaaacttgaacagcgagagaaaaaggaaaaagaacctttctctgttgcagtgggtggaggaaatcgctgcataaagaataacaatgctgtaagtatggcagtgaaaaaaatgaattctgagggaattccttgcaaactgtatatttttggtcgaaaatatccgggtaatgaggaaatcgaggaaacggactatatccagtattgtggtcacatggacaagactccatattatgaacgacttgatcatatcagttgctttgtaatgaactcagaggtggagtcctttggacttgttgcggcggatgccttaaattgtaattgttcgctcttgatgtctcaaaatgtcggagcaaggagcattatgaaaacagaggattgcgatatcattcaacggccgcatgatgtagatgaaatcgtagaaaagctcaagtatatttttgaacaccccaacagcaatagattatatgagagcattgatatgcaagcttgttcggaaagaagttcgtttcagagactagatgcgattgttgagggagcaatcaagtgagaaaagtatttgcaaagtatagaaatcttccagaagcagttaaggcttcattatggtttacaatatgcagcattctgcaaaaaggaatatcatttataactgttccgattttcacaagaatgctctcaacagaagaatacggtattatttcactatttggcgcatggcaaagcatcctgactatttttgcaacgttgaatctgtcaaaccagatatttaacaacggcatggtcaaatatgaaaaagatcaagatgggtataccaccgcaatgcttggactgtctaattttgctacagttctggtgtttgtgctttatcttgtcttccatacagctctggataaaatatttgaattgccgatgagcgcaataattatgatgttcatcggttttttcttctcagccgcaacaagtctttggacagttcatcagcggtacaagtttaaatataaactattgtgtcttgtcacgctgattatttcacttggatctgcattgctaggggtactgtttgtccggttggagagtgttggacttgcgagaatatggggagataccattacaattacaacagtaggactcctaatttatgttttaattgttaagaaaaaccataagttattcaatctgacctattggaaatatgcgttaaaattggatctgccgctaatccctcattatctgtctatgacagtactgggaagttccgatcgaatcatgatcaatagtttgtgcggaaaatcctacacggcattatacagtgtgccatacaacgcatccatgattatgcagattgtaacatcaagcataaactcctcctttattccttggacttatcaaaaatgcaaagaaagagagtataaaaaactgaacgagtttagctcgattttgctgatattagtcatggtcatcaccttgatcccttcattgtttgcgccagagctggtatggctgctcggctcaaacaaatatagcgattccatgtgggtagtgccgccggtatcatgcagcgtgttctttatgtttttatactcactgttttccaatgttgaattgtattacgagaaaagtaaaaacatcatgattgcttctaccggagctgctattgggaatattatacttaactacatctttatcagcctgttcggatatattgcagctgcatataccacgcttgtgtgctatattttcttgtctgttttacattatgtttttatgatgaagatttgcagagaacagcaaatcacagagcctatatacaatgtgaaacttattttggctttatccatttttcttattatatactccgttggtgtgacaattttgtttgacaagccggtatggattcgatatgggttgatcattgtcatcttactggtactctttttgaaaagaaagctattgttagaaaaattggcaataatgaaaaataaacgttaaagtgaattgacaggaaaaggagaagataggataatgttggcaagcaagcaagcaagcaagcaagcaagcaagcaagcaagcaagcaagcaagcaactattggcttgcagattatactaaattggttttagcaatcattgtagttgcaattcattccggacttaaaatgagcatacagaacgaacaggtgaagctggttgtggagtatgctgagtcattggcagttccgctgtttttttgtataacgggatatcttttagaagaaaggctgagccataatcgtgatgcagaacgtaaaataatagttgccagcttgatgaagtatgtgcggatttatgtggtagtgtctattatatatattcctctcacggtttatggaacattcaaggagctccgagaaagcagtaatttatatgtagcagtttacaatctgattaagaactatttttttgtcggagaacaattctattcatggcaattatggtacttgttggccactatatttggaatggcagtattgttgttagtgccccataaacactggcatgaattattgctttatagttgtgccttctttgcactggcatatgtcatcaactgctttcaggggactagaataatcaaacttactatagtgaatggcagattatttactggaccaagctatattttgctgggaatgcttgtgaagcgagagcataagcccttgtcacgaagtggtggaataatagccccaatattggcatgtttttgctccgttcttttgaagataccttattcgaccaccaacattgtggcatttttatctgtgccatggattttaggtattgtcatgaagtattccaagaactgctatcaagtagggttttcaaaggaatgtcgtgaaatcagttcaattatctatttttcacatatgtactttttctttgtgtggatgtacctgcttcccatcagagaaaaagggggtgaatgcttcatctttgtgtccggaacgagttttttgttttctgtggtattctctctgatgaaaaagaaaatatgttgtaaaacgaattgaggaggaaatgcaatgcgtgaggatttggtgtccataatcgtaccggtgtataatgttgagaaattcgttgaaaaatgcgtaaagtctctgatgaatcaaacacacaagaatattgaaattattcttgtagatgatggctcaccggatcatagccctgaaattattgatcgaattgcagcagaagatcagagagtacacgtcatccatcaacaaaatagaggggtttcggctgctaggaatgcaggattacaatgcgcatcaggcgagtatgtcatgtttgtagatggtgacgactgggtcgattcggactatgtatcctactttttgatgcttgtaagtgagaatggctccttaattggaatgaataaaaacaactattctacggggaaaatcaaaacaaatgaagagagatacgttgtaaaagctgaaacggcgattgaatggatatattcgaatgagatattcgtagcagtatggaacaagatttacagtcgaaggcttttggtcgacaacaatattagctttgatccaaccatttggtatggtgagggtatgctgttcaatattcagtgtctgcagtatgttgatacggtagcaattggagagaaatcggtttatcatcaaacatttaatccggatagtgcaatgcgaaagtttaacctaaagagtaatttgtgcggtatcaagtcacttgatgttcaaaaatccatttggaagaaagttactcccgccatagagaaggcatgggaatatcatagatattgttttaaccgaagcatttccagtggattgctcgaatcggaaatggtatcagaataccctgacgtgtataaagagtgcatacgcaatatacgaaaaggcattatgatgccgctgacaagagaaaaaacactaaaagcaaaggttgggtggcttatatactttgtgagtccctctctgatggcaaaacgctctatatcgttgcgtaagaaattattaagaaaaacgggggggtataacctaacaagctctaaaatcctcgtacccatgtacacaccaaacacagtacattttgtgggggtgtgcgcatgaatactgtttgcgatgtcaacatgtgtgcaggttgtatggcgtgcgtggatatttgcccgcgcaaggctatttctgtggtggacgatattgaatacatgaatgcagtgattgatgatactttgtgtattaactgcaatatgtgtcacaaggtttgccaaaagaatcatccagcagatttacgaaagccgcaaaaatggcttcagggctggggagaagagaatgtgagagcagccagttcctcgggcggtttcgggcaggaaatcatgcggtcaatgcttcgtaacggtggagttgttgcagcctgcaaactgagtggtagagagtttaaattcgaattatttgaggatgaaaagcgaatcccggaattcattggatctaagtatgtcaagagcaatccaatagggatttatcaagcagtcaaggataaactaaaatccggaaagaaggttctgtttatcgggttaccttgtcaggtttcttctatgagaaattatgtgagagacgacaggaatttatacacggtggatcttatctgtcatggatcaccgtctgtaaaaatcttgcagcaggcgatggaagaatatgggcataatctgactgaagttagggcgatttatttccgtagcgcagataaatttgctatagagacacagcctattcgtattgtttctaagggagttcaagaccgttatacaatggcttttctaaacggactttgttacacagaaaactgctattcatgccgttatgctcagactgaacgtgccggtgatattacaataggtgactcatggggaactgagttgagtggtgagctatctaagggagtatctcttgcactctgtcaaacggaaaaaggacaagaactgctcgatatgatggattttaatttctatgatgtgaatattgaaaatgcgattcaatgcaatcatcaattaagacacccttcggattgtcccaaaaaccgaaaaaaattctttgatgacttgcgcaaaggaaaaagttttaaacaggctgtatttagtgcataccctaaaacctgtatcaagcagagcgtaaaagaacttttgattaagatgaaattgtattcggggggggcaatgagtaaccctgtatatacaattagcattgtaccgtatagtaacaacataagcgaaaaaatttgaggaaaaaactataatgggaaaatactttggaaccgatggcttccgtggcgaagccggaatcactctgaccgcagaccatgcctacaaggttggccgcttccttggctggtactacaacgcactgcgcgagcgtaacggtaacaacgagcctgcacgcattgtaatcggcaaagatactcgccgcagctcttatatgtttgagtacagtctggttgctggcctgactgcatccggcgcagatgcctatctgctgcacgtcactaccactccttctgttgcctacatcgcccgggtggatgactttgattgcggcatcatgatctcagccagccacaacccctattacgataacggcatcaagctgatcgactgctatggcgagaagatgcccgaggagattttactgttggtggaggactacatcgacggcaagctccatgtgttcgacaaggactggccgaagctgccctttgcccatcgggaacacatcggctgcactgtggactatgtttctggccgcaaccgctacatgggctacctgatcagcctcggtatctactctttcaagggtgtgaaggttggtctggactgcgccaacggtagttcttggaacatcgctaagtctgtgttcgatgcgctgggtgctgacacctacgtcatcaatgcacagcccaacggtacgaatatcaataacaatgctggatctactcacattgagggcttgcagaagttcgtggtagagaagggtctggatgttggttttgcctatgacggcgatgctgatcgttgcctgtgtgtggatgaaaagggtaatgtgatcactggcgaccatatcctgtacatctacggctgctacatgaaggagcgcggcaagctgctgaccaatacagtcgttaccacggtcatgtccaactttggtctgtacaaagcattcgatgaacagggtattggctatgccaagactgctgtgggcgacaagtatgtttacgagtacatggcaaaaaacggttgccgtatcggtggggagcaaagtggacatatcatcttctccaagtacgccagcaccggtgacggcatcctgaccagcctgaagatgatggaagttatgctggccaagaagatgcccatgagcaagctggctgagccgctgaagatatatccgcaggttctggagaacatccgtgtgactgataaaaaggctgcacagaacgacccggcagtgcaggaggcagtcaaagctgtggcagaagcactgggcgataccggccgcattctggtgcgtgagtccggcactgagcctgtcgttcgcgtgatggtagaagcccctgatcatgatacctgccagaagtatgtgtctcaggtcgtggaggtcatcaagaacaagggctacgctgtctgaacgtaacttgataaagtgtacggactgatgtatatttcacctgtgcccttgaaaactagtttttaaagggttatatttgaaccgtgggaaattttctcacggctttgccgctcgaactttgcgcacctctacgtggtgggcggcaggcaacacagcatggatgctgtggctaagatgcatgactatgggatgaaattatggcaagaatctatccacatgttgttgagacaaagtccaagaattgtattaggagcagaattgatagctttggagaaaaaggggactatctttaccgagaactaacggaacgtgattatggtattgatggaatcgtcgaatgctttgaaaatggtgttccgacgggtaaaattgcctttgtacaaataaaaggaacaagcaagacaattattccacaaaagaataaaccggtagtttcctgtgtggggatatctaaatcgaatcttcaatatgcaaagcaaaatcgaatacctgttattctactgtatgtttcattacaagatccatgcccgatatattatgcggatttgagaaaggttgcgcaacgtgtccgcattaaagaagatgcagaaacagtaactattcatattccagaggataattgcaccacaaatgatatctctggtattatagatatgatttatgcatattacttgtgaaagaggtgggtcacatatttattagtaaaatcaaaattcagaatatcaaagggaaagcgacttgggaaaatacgtttgatggactgtgttcaaataaagttaatctgtttgtggccccaaatggatttggaaaatccactcttacagccgctttcacagctgcatctcacggccgtatgcggctggataatgatgactactataatcaagatgcttgtaatattccaaagttagaaattacctaccgtgatgataatggcacaatcaatcgagtcgaatcggataatcagcatggagatgtatctagaactttctacatacatgttattaatagccctgtatatgcaaaggcaacaggacgtaatatgggaggatatgctactcagtcagcaaagttgtttatacgagatatcgaagtgtgtgaaaaagtggagcacatagtaattccatatagattttctgatatgcgaaatgaatttggaagacatactcctaatatatcgggctttttaacgtcagaaagtggtcttcgttttattcttgagcatagaaatgccctccataaatgcgccacacaaatacgcattcagtccatattggtagatactaattctgaaaatgctggagaaaaaagggcgaatttctgcggccatgctgctgcagaggaaattctttgtgcgctgtcagatgaatttggcttatctgaaattgatcaagtgcgatacctgatacaacttgtgaaatgtgagaaaagcggtgacattgaaaaagcgcaaagtgcgttaaagtggatagtttatcaaaggacaaaaagattgttggatgaacgactgacaaaattcaatacgactggcttgccgctcagatcagctgttcgtaataataaattggtcgtttctttcggcagagcagggcgaatgtccaatggcgaacgagatgttttatactttgtagctaatttgatagctttttctatctctgtaaaaaataagccttgtatattgattgttgatgaagtctttgattatttggatggaacgaatcttctggctgtccaatattatttaagtcagtttttgaaccgtatcaaatcagatggcaatatagtatttccgattctaatgacgcatcttgacccggcggttttctctagttatcattttaaggggatggcggttcattacttaacgaacacgagtgatatcaatctaaatgataaatttgttaaactactgcagttaagaagtacattaaaacagtccggaaatccgcttggtggggagttggagaaatatcttctgcatttctatcctgtgaattggacgattccgccagatatactatcacagcttccgaatggtttttggacggacagtcagtcttttgtgcgttctttgtattcggaaatttccgataagtatttgggcaatcaagattataatgtgcttgctgttatcttaggactcagaattaaaatcgaagaaaaaacagttgctttgattccggaagatataagatgtgagtattataacaaacatggatcaaaagagaaactggcattcgctgacttacattcaaatcaaattccggaaattttttatcttttacagccactatataatgaggcacttcatttaagaaatggacaaaacactaacagagagaataagaatcgaatagagagcgcatatctcaaactgtcttcaaatatcataaaagaaatggttggaacggtgttccaataatattgtgtgtgcggaaagtggctcaagtatatattggcattcacaaatatgcacaacttttttgaaaaccatcggagatatcatcctatgaccagaatcaaagtcggcaagaaccgtgttaccgcatctaccgatttcgatgctcagattgcaaaattgtagaaggacaaggcgatgcgtgaagaagacttttccgagactgtcgcctatattgaagaattgaagaacgacatcaagtctcttcgtgaaagtctaaagccgcagaaggcggagatcaagcagaccgaaaaagaaatcgcaaagctggaggctaagaaggttgccgaagttgctaagaaggtcgagaccgaagctgtgctgaagaagctgcttgcatccggcatgacggcagatgatgtcctcaaaaaactgaaataaaggaatacgccgtgtggactgaactccagaagttcacacggcatattcttgagcatgatatatagtttgtgacgaatttaaaagagaggtgaaaataattgggtaacacacgcaagcccggcggtgggcggaagccaacaaagccagagtatagtgcatccaagaacctagcacagcagatggaagcggctgctgatctttatgcggacaaaatgagcctgcaatccatcgcagatgcactgtccctcaaccccatcaaggtgagaaagctgcttatcacagccgggatctacgagtcggatacggcaaagctcgtccaacgaacctttaatgccttcagagaaacacaaagctattctgcttctgtcacctccacaatgtctgccttacggctgtcccgtccctctgtgacctcttatctgccgtatgagaaaggcgtgtacttcccggaggaagctgaggcggcgaatatcagtgccggggcagagcggcagcgtcactaccgagctgtggttgtgctgaagaaggacccttgcgaagaaaacctctggaagtgcgtagtggcttttcggggatataagttcaagactctgtccggcttgccctttacttacaagctgaagaagggcagggaagatgaattcaccaaggagttgtggatcgaccgcagagaggacagcaagagccttgcttggagttctgtgatgctagcgtatcacaatatcggtaaaatcggagaggtagtggacagacccaaggcgctgggagatatcaggggcgtgtcgtatatctatgggatgttctaccgctttggtctgatcgatgtgccggacaaggttaaggagaaaatgggggtgaaggaacactaacggttgtgacttgcgttgtggtgcgtggtttaagcaaaatcgacaggacttcgaaaatattttcgtaaatttgtagttgacaactaaaaccaatcgcagtataatcaagtcgtaaacaccaatttggtgtaaaaaatccaaattaaaccaccgtaaaaacaacctaaaaaaggagaaggaggtccctcgatgcgtgatgacaacaagcttcaccgtgaaaagagatacgttgaagtggacgttcgctttacacctgatggcaagatccgccctcttgccatcaactacgacaaaagccatatctatggaatcgaccgtgttttggctgtcaggcgtggcacatcgcgccttggcgggaaggggcagtgcttcacctgcatgatctgcgggcagaagcggaatctctggcttgaacagggcaagtggttcgtggaagcctactgctccgtgccggaaagccgtgtttcgtaatggcaaggtacttatcccgcgcagatctttcgcgcatagcgggtaagtatatcgaccagtactatacccgcttcgggatcagcaaagatgccccggaacccattgaccctgaacggcttgcaagcgctgttcttgggctgaatgtgaaaatgctaccgctatgtagcgatggcagcgtcctcggactgaccgtttttcaaagatgcggttttaccgtaactttaggggatggtacaaagcttgtagagatattcatgccgaaggacgttgtgatcgattctgcccttgcggcagacagctgcaccggatgccggaatttcacgatagcgcatgaggcggcacaccatattctggctgacctgtttccgaacgactatggaaaagcagtcaagtgccgtgggcacattgcctatcgggaacgaaacggacaaccctcatgggaggaatggcaggcaaatacccttgcggcagagctgctgatgccaacatttctggtcaacgccgaaatagaacgagcagcgctgcgcctgccgaatggaatcctatacaaatccgaatctgacccgaactatgaaaaaattctggagatggctgcgcggatgggagtatcgtggtctgctatcaggatcagactacagcagatgcaggttataaaaggcaaacccatccactgccatccattggacatcatccgatttggagaataaacatgattcagtcaaataatcgttcttttaaaaataaaccgttgagcaatatacagcaggcacaattcagcatcggctggaggttttgccccgtttgcggacacaagctctaccaaaaagatgagagctgttcaggcactatccgcataaagtgcctcaagtgcggcaacgtagcaacggttgatttagcctatcgcaggcgttgattgctttataggcaaaacacaattttaaaaatcgggtgcattgcaccctgaatatggactgttcgtcaccgagcaacgggc

SEQ ID NO: 1095 - DNA, 9795 bp, unidentified
  source 1..9795: mol_type = unassigned DNA
tcacagcaccgccacggcaaggaaccgcacaacgagcgcggcaagccatgccacaacgcactggttcacgaccataacggtggcccagcggccgcccatctcccgcttgaccgatgccacagcggcgatgcagggggtgtagagcaggcagaacaccagcaggggagccgctgccgccgggctgagcgccgcgcccagtgcggcagaggagccatacaggatggtaagggtagagacaacgctctcctttgccataaagccggtgatcagcgccgtggacacccgccagtcgccaaagcccagcggtgcgaacaacggagcgatgccgctggcgatccaggccaggatgctctcctgcgggtctgcggtcaggctgagctggaagtcaaagttctgcaggaaccagatgatgatggttgccaggaagatgaccgtaaaggcacgctcgaggaaatcccgggccttttcccagagcagctgggccacatttttcaggccgggcaggcggtagttgggcagctccataacaaagggcacggcctcgcccttgaacagcgttcccttgagcagaaaagccataccaatgcccacaaggatgcccaggaaatacaggcccaccatgaccagtgcggcgtactccgggaagaaggtcaccgcaaacaggctgtagatcgggagcttggccgagcagctcataaagggcgtgagcaggatggtcattttccggtcccgctccgagggcagcgtgcggcttgccatcacgccggggaccgtgcagccaaagccgatgagcatgggcacgatgctgcggcccgaaagtccgatgcgccgcagcagcttgtccatcacaaaggccacgcgggccatatagccggtatcctccagcagggaaaggaagaagaacagggtcacgatgatgggcaggaaactcagcacactgcccacaccggtaaagatgccgtcgatcaccagcgaatgcactgcatcgttgacgttccacgccgtcagggcattgtccacaaggatcgtcagattctcaatgcccagttccagcaggctttgcagccccgcgccgatcacgccgaaggtcagataaaacaccagcgccataatgcctacgaacgccggaatcgccgtgtactttccggtgaggaagcggtcgatccttgcgctgcgcagctgctccttgctctggtggggctttaccacggtctgattcaccagctggtggataaagtggaaccgcatgtctgcaatggcggcggcgcggtccaggccgcgctcctgctccatctgcaggatgatatgctcgatcatctctttttcgttctgatccagcttcagggcctcctcaatgcgggggtcgccctccaccagctttgtggcggcaaagcgcaccgggatccccgccgcccgggcgtggtcctcgatgaggtggatgatgccgtggatgcagcggtgaaccgcaccgccgtggtcatcctcgccgcagaagtccatccggcccggacgttcctgatactttgccacatggatggcgtgatccaccagctcatccacgccctcgttcttggcggcggaaatggggaccaccgggatgcccagcatcgcttccatctcgttgatgttgatggtgccgccgttgccgcgcacctcatccatcatattcagtgccagcaccatgggggtgtccagctccatcagctgcatcgttaagtacaggttgcgctcgatgttggtggcatccacgatattgatgatgcccgtgggcttttcgccgatgatgaactgccgggtcacgatctcctcgctggaatagggcgacatggagtagatgccgggcaggtcggtgacttcggtatcggggtgttcccggatggcaccgctcttgcggtccaccgtcacgcccggaaagttgcccacatgctggttggagccggtgagctggttgaacagggtcgttttgccgcagttctgatttccggccagcgcaaatgtcagcaccgttccatccggcagcgggtgttcgccctttttggtgtggtagcggccgccctctcccaggcccggatgctccaccatccggccggccttccgtgccggggctgctgcgggtgcttccgccggggtgatctcgatccgtgccgcatcgtccagccgcagggtcagctcatagccgtggatctgcagctccatggggtcccccatgggcgcaaatttcaccagcgtgaccttctcgccggggatcagccccatatccagaaaatgctggcggagttctcccgttccgcccactgtatcgatcacggcactttcgccgatcttcagttcctttaatgtcatggcagatgcctttccttcgacaaaatgttagtgtatatgaacagtcttaatatatgctaactcaaaagcattgtcaaggcgggaagcggcaaaaattctcgcctgtccccgctgttttttgtagaaatctttctcctgttccggcaggtttccgggcaaaagaaaacgcacccctgaattttcacgttcaaaggtgcgttttgagaacagttctgtttacttcacggtgtggtagccatcggggttgttcttctgccagttccagctgtcagcacacatctcctcgatgccgtactcagccacccagcccagctcgttcttggccttggtggggtcggcgtagcactcggcgatatcgccggggcggcggggatcaatgacgtaggggatctccttgccgcaggccttggagaaggcgtggatgacatccagcacgctgtaacccttgccggtgcccagattgcagatgaagaggccgcagccggtctccagcttgcggatggcgcacacatggccccgggccaaatccacaacgtggatgtagtcacgcacaccggtgccgtccggggtggggtagtcgttgccaaagacgtgcaccttttccagcttgcccacagccaccttggcgatgtagggcatcaggttgttggggatgccgttggggtcctcgccgatcaggccggacttgtgggcaccgatggggttgaagtaacggagcagggccacgttcagggtggggtcagccttgcagacatcggtcaggatgcgctcggtaaaggccttggtggtgccgtaggggttggtggtggcacccacggggaagtcctcggtgatgggcacgctggcggggtcgccgtagacagtggcggaagagctgaacacgaagttgcggcagttgtggcggcgcatcacgtccagaatgaccagcgtgcagttgaggttgttatagtagtactcgatgggcttggaaacgctctcgcccacagccttataggcggcaaactggatgacggcatcgatatcggggcactcggtgaagatcttctccacgtcctcgtgctttgtcatatcagcctgatagaaccggaagtccttgccggtgatctgcttgacccgatccagcaccacaggggaagcgttgtaatagttatctgccaccacgatgtcaaagccagcgttcagcagttcgatacaggtgtggctgccgatataaccggcaccgccggaaaccaaaattgccataaaagtacctctcttctcgtcaccaaaattgcttgcgcggggcaggcccgccttctgccacaaggatacaacgttttggccgcagaatcaagtaacgggaattttataaggatggatttttgtttccatttatttttccgcgcattgatttacaagcattttttgttttttgcacatggagtgatggaacgctttgtgcaaatcagagaaaaagccctctcaggcaaagccgtcaggctttgaatgagagggctgcattttacagtttcccgcactgtttgccggtgaagaaccgcagggtggtgttggcgcggaacactttcccggcccgcagggcggtggaggggaactccgggtgggaggggctgcaggggaagtgctgggtctccagcgcaaagccgccgtatttctgcatcggcacgccgcccttgccgggggcagggcagtcctgcaggaaattgccggtgtagagctgcacgccgggctgggtggtatagaccttcatgctgatgccggtcttatcgctggaagcccaggcgcacaggctctggctggccccgcggcccctgtcgatgacaaagcagtggtcatagccgccgcccaccatggtggtctgggaaaagccggtgtcaatgtcccggccaatgggcttgcccgcccggaaatccatcggcgtgcctgccacgggcaggatattgccggtggggcaggtctcgttgttgccctccagatagcgggacgcatagatgcgcagcttctggcccagcacatcgccgccgccatccagattgaagtaggtgtggttggtcaggttgatgatggtgtcggcatcagaggagacacggtagtccatccgcagggcgttgtcctcagtgaggatataccgcaccgagatcttcagatttcccgggaaaccatcctctccatcggggctttcggcctccagaagcagggtatcgccaaaggtctttacctcatacagcttgcgcgggaaggtgccgtgcaggtggtttttgccgttgttggcttccagctgataggtcttgccgcccacgttgaacacggcgttctcgatgcggttggcgtaccggcccacgaacgcgccgcagcaggtactgccggacgattcaaagtccttgacgtaatcggcgtaggtgtcgtggcccagcaccacatccaccggcccgctcttggtgggcacccagatattcttgatgatacagccgtagttcagcacactgaccgccagcccgccggggttcgagatgatgtattcattgatcttttcgccgtttggggtcatgccaaagggcttggagagaaactgtgccatagggcttgcctccttttgtattttttggggacagcacactctctgttttatcctttattgttttgattatatcacagttttccccttctgtgttggcattttttaagggaatctatccaatatttcgagagattttttgtaaattctgccccataggcagaaaaaagccccggagggccaggggtaggcgctccggggcttgtatgtcagattagatattactgctggagatcaactgtaacctcataggtcattgcaattgcagcgtaagtctttccatttacagtcttagctgcaacaccaattttcgtaattttgatagacatgccatttgcgcttgccattttgtccagcaaatcgtgcatagtatccgcaccctgattcagacttccaatgttatccgcagtaatttccattacttcataggtgccattattctgcattttgccatccttcatcagaggcaatgccatcgtcatagaacccttaccagtcgaatacacatcttcctggaactttttggagtcctcatcggagtaggatttcttaaaatcaaaagtgcccttctcggtgtcgatcagatcgatcttgctctcagcgagtttcttcagatctgcatcatttacctgaataccagtagatgcctttacagaagcaaaagttgcatcttcagccttctgtgcgaaagaaggtgcgctgtcatcgccgcaagcggtgagcagtgccagagccataacgccgaccagcagaagggcggccattttcttgagcattttcatttgtagaacctccaatgtaaaatgatattttaccacacagaaagcatacccctacaccttctgcattgtgaactcattctacatctccccccttcccctgtcaatattttttattgaattccccaatttttggagactgtgccaaagctgcggcgatttttttagcagattgacaaaaagcacccctcacatggctgtgaagggtgctttggggaagttttcttactccggctgagcgctgttctgggcgatatactcggcggcatcatcggggatgtcgtcaaggttctcatcgccgatatccacgttcagcggcggcttcttgaagaggatgtcatacatcaggggcacaacgtacagggtcatcagggtggcgtaagtcaggccgaagatgatgacgatggccatgccgctcatcagctggctggccatatcgccgctgaacaccagctggagcatggccagaacggtggtcagggtggtcatcaggatggggcgcattcgtgttttgccggtggcgatcagggccgcgcggcgctccatgccgccgatgcgcagctggttggcgtaatccacgaacacgataccgttgttgacgaccgtgcccatcaggacgatgaagcccatcatggagatcatggtcaactgctggccggtgagcagcaggcccagcaggccgccggtaaaggccagcggaatggtgaacagaacgatgaagggggagagcaggctctggaactgggccaccataacaaggtagacgaagggcagcgccaggaacatccactggcccatctgatccaccaccatgccgttgatctcagagccgccgcccatatagaagctgcagccctcgggcatctcatcggatgcggcaaactcgttcagcttcttttccagcgcgcgggtctcggtggtggtattggtgccctccactgcgtccgccgtcacactgatatagcgggtctggttcttgctggtgatggagtccggggtggagccggtgacccaggtggccatatcgcccagcgtgcaggtgccggtctcggtggtgccgtcggcggccatgacggaggtcgtaaaggtcatatccatcatgttttccttggtcatggggtccagattgttgctgatctggacgttcatggtggagccatcgatggcaacgggggtctgggccgtggtggtggtggtcagcttggcggcgatctgctggtagacctgcgccacggtcaggccgtaggagcggaccttatcccggtcgatctgcaggttgatggtggcatcgccgctgcccagaccgttggtggcattggtgaagccgtccatctcgttgaccatatccaccaccttctcggagagggcggtcatggtgtcgatgtcgttgccggagatctggacggtcaggcccatatccagctggctggtcagctcctgcattccgctgatctcaacggtggcagtgcagttctccacgccgttcacagcttcctccagcgcctcgcgggcctgttcgatctgccgggaggagaggctctcgtccagcatcacgttgatctggtaggtgccgtagctgttggcggcgttcagcaggtcggtgatggtctggggcaggcccagctggccgacatccattccggccacgcggctgtcggtggtaacgcccacctcttccacgttgtccacagccagcagggcatcaatgacattctcagccacggcataggattcttccttggtcatatccttctcggtggagagggtgacgatggcctcgttgctggtgatggtgggcagcatctcaacgcccatggacatcacgcgccagccgcagaacaccagcagcaccactgccgcgcccagcggtgcccagcggtgctggaagcaccattccaggctcttgacgtacttttcctgcaccttgtcgaaccacttgagctctttgggcttggagtttttcagcagggtagaggaggccgccggggcaaccgtcagggccacgatgagggaagcagccaggcagtagccgatgcacatggacatgggctgcagcaggctcttgatgacaccggaagtgaagatgacgggcaggaacacgcagacagaggtgagggtggaagccatgatggccatgcccacctgcttggtgccctggaccgccgcgcgggctgcgggcacgccgcggctgcgcagacggtagatgttctcgatgacgacgatggagttatccaccagcataccaatgccgagggacaggcccgccagcgtcataatgttcatatccagaccggtgaagtacatgagcaccacggcaaacagcaccgacagcgggatactgatgccgaccaccagcgtgggcttgatatccttgaggaagatggccagcacgatgatggcaagggccgcgccgatgagcatactgctcaggatgctgctgacgataatgctgatgtagttgccctggttggacagcacgaccacatgcaggccatcgtatttctgttccagctccttgaaggcggccttgcagttgccggaaacttcaccggcgctggaagaattgctcttgaagattttcagcaccacggagcgctcgccgttcaggcgggtaaagctgtcctccgcgttgtcaatgatctgcacatcggccacgtcagacaggcggacatcgccaaagccgtccacatggagcagcagggcaccggagatatcctcgatgctgtcgtactcctcgccgaccttcagcagccaggacttgttgctggaatccttgacataaccggcgggcatggagaagttctgggcatagatcagctgtgccagtgtgttgatatccagcatcttggccacgtcggagttctccatggccttctgcttggcatcctcatactgctgcttggcatctgccagctgctgctcgtaattgttcagcatctcacgggcctcggtgaacttgatataggcctgcagctgctgctgggaataggtgcccacgatctgggtaaactggtccatcaggccgggcacgtcgtccatggccttgatggtgctctccagcgtgttataaatgttgctcaggctctgctgcacctgcagatcatcgaccagctccccggccgttgtgccggcggtgtcgccctgcgcgttcaggcgctgctgcagatcctgcaaagcggtggtcagcttatcggtgatatcgcgcagctccgccacgatctcgatcagagaatcgatatcctgcattccggtctcgttgaacttgtccacgacccgctgcaggccgtcccgcacatcgatcagggcctgctggatctcaggctcgttgaccacggcaatgagctggttgacgctctccagaagggcctgtgcctgcttcttgaccagcatgaaggattcctgcagctcaccggagtactggctgttgatggtatcgctgaccagcttgtcgtaattggccagctgggtctcgtactcctttctgcctgcctcgatctgggcctcggcagcgtccagctgggcctttgcatcggccagctgcacgtcaatgacctccagcagcttttcgttgatggcatcgatcttttcctgatcgagctgcacctgcaccatccgggtaaccagaccattggcggaaatattggaaacgccgccctgacgctcgatataggggaccatggtgtcgttgacgaaatcggccagctcataggaatcgctgccctcgcggctgacggccacggtcataaaggcgttcatgttcagggtatattcaatgatggagggggtcatgcaggtgcttggcaggctggaggtggtctgatccaccttgttggacaccttgaccacggcactgttcatgtccgtatcatcctcaaactccatcagcagcagactgtagttttctgccgaggtggcggtgacgtttttcacgcccgagatggtgcccagcgcactctccatcacgtcggagacctcgttctccacacgctccgggctggcaccgggatagaccgtgaccaccatcaggtacggtgtgttcacgtttggcagcaggttggtctgcatattctgcacggacacaaggcccagcataatgaccat

SEQ ID NO: 1096 - DNA, 11753 bp, unidentified
  source 1..11753: mol_type = unassigned DNA
gatgcgctccacccggtcgtagcgggtcagctcccgcaccacgccgccgtcgcccgcgccgatgacaaggatatcctttgcctcccggtgcacggccatgggcacgtggacgatcatctcgtcgtagatgaactcgtcccgctcggtcagcatcacattgccgtccagtgtgagcacccggccaaactcgggcgtttcaaaaatatcaatgcgctgataatcgctctgcttggagtagagctgcttgttcacccggatgctgtgcttcacatcgggggtgtgaaattccgaaaaccaaaactccatctgttttccctccttatgccagaacgttcaggtgcaaaatatcagggtcctcagggccggtcatgctgcagcccttggccttggcgtactcgatatagttcagaatctccttggtgatgcgctcgccgggggccagaatggggatgcccggcgggtagcacatgacgaactcgctgcagaccatgccctcggtctcccgcaggggcaggctctttttgggggcatagaaggcctcctgcgggctggcggccaccacggggtcgatgtattcctggctcagcaggccggtgccgtcggtgtggtagcggcgcttgatctcggccagagcgctgaccagccgctcgatctcctgggggcggtcgccgatggagaggtaggccaggatgttgccgatatcgccgaactcgatctggatgtcgtactcgtcccgcaggatgtcgtagacctcgatgccggcaaggccgatgtccagcgtgtggacgctgagcttggtggtgtcaaagtcaaagacggagttgccgttgcacagctccttgccaaaggcgtagtagccgcccacggcgttgatctcctcccgggcatactcggccatgtcggccacttggtggaatacctgccgcccgcgctgcgcaaggttgcggcgggagatatccagactggacatgagcaggtagctgccggaggtggtctgggtcaggttgatgatctgccgcacatagccctgatgcacattgggcccgatgagcagcaggctgctctgggtcaggctgccgccgctcttgtgcatggagaccgaggccatatcggcccccgcagccatggcggaaacgggcaggccgttgccaaagtagaagtgggtgccgtgggcctcgtcggccaggcagagcattccggcctcgtgggccatcttcacgatggcgcgcaggtcggaacagatgccgtagtaggtggggttgttcaccagaacggccacggcgttggggtgctccttgatggccttggccacctgctcccgcttcatgcccagcgagatgcccagccgcttgtccacctcgggatttacatagaccgggaccgcgccgcagagcaccagcgcgttcagcacactgcggtgcacgttgcggggcaggatgatctcatcgccccgcttgcaggccgtcagcaccatgctctgcacagagctggtggtgccgcccaccattaaaaaggcatgggctgcgccaaaggcatcggcggccagctcctcggcctcccggatgaccgataccgggtggcagagattatccagcggcttcatgctgttcacgtccacacccacgcactgctggcccagaaaggccgtcagttccgggttgccgcggccccgcttgtggccgggtacatcaaaaggtaccacacgcatctgccggaactgctccagcgcctcataaatgggcgcgcggcgctgatccagccggaaccgtgtacggttctcactcatctcttctcctccgtccctggttccggcgcagcaaaaaagcgcaggcccaccacactggtgcagacctgcgcttgaagaagcgttctgaacatgcagacaaagcccccggtgacactggggaaaacctccgcatggttcaaaaagacgggatgacgagagtctatatagcaattacacttttactactcttattgaccgtttcacaagtctgcgcacgctctgcgcaatttcatggctgtaaaggaaccaacttataaaatttgagctttcaactcaatcaataatggcagcttgcgccgccggtcggcagtggacccggctgtccgtatggccttagccccgatgggcggtcccaggtaatttgctttgaaaagactctgacacgctttgtctctcaaaatcgatgatatcttatcatgctatgagggtggtgtcaatactttttgggaaaataaagcggaaaatgggcaagcggttcgcattatgacaaggacactgtaaagacatggtaaaagtgtggcaaaacactttgcacagacacggcaaaacgcttttgcttgacaaatgaaagaaattctactatactgattcttaccggtgcgccatcgccaagcggtaaggcaggggactttgactcccccatcgtaggttcgactcctgctggcgcaactgaaagagaacccgcagggggcctgggcgacaggttccgtgcgggttttatttttttgtgaaaagagggtgtttgtgtgaacgaagagaattctctgctgaccggggcagtgcggcccgcgctgctgcggtacgcgctgcccattatcctgagcatggtggcaacacagttttacgccgtggccgataccatgatcatcggcctgcggctggatgccgatgcgctggcggcagtgtccaacgcttccacagtgctgatgatctttctgttcatctccggcggcatggagctgggcggcggcctgctggtggcggcgggcaagcccactgccataaagcatgagatgaccgagctgctgtacaacctgctgttcgtggatgaggtcatcgccctgttgaccacgacagtgggctttgtgaccctgccggccctgctgcggctgatcaacacgcctgcggagatcctggataccgctgtgctctacgggcgcatctatctgctggggctgccatttttgatgccctacgatctgagcaaagagtgtgtcatgggctgcggcgattccaaaacgccgctcaaggtcattgtggcgaccagcgtgatgaacattgtgctggaccttgttctggtggggcccttcggggtggccggtgcggcggctgccacagcggcggcgcaggtggcgggcgcggtctacatggtggcgtttctgcgccgcacccagatggacgcggccttctcgccccggatgctcaaggcgcgctatgccagggatatcttccggctgtcggcccccaacagtgtccagcaggccagcggcaccatcatcaccacggtcaaacaggggctgctgggcggcctgggtgtggaagccattgcaggcttctcctgcgcaggcaagctgtccagtctgctgatgatgccggtgttcggctttgtgcagtccacagtgttctttattgcgcaaaacacagccgcccttcagccgggccgtgtgaaagagggcctgcgggaagggcggcggatcttgttggtgtattcgcttggggtggtggcggtctgcatcggtctgcgggggccgctgctccggctctttaccaccgacccagcagcagccagctatggatgcaccatgctggcctttgaatcggtgacctgtctgtttgtggcacagaagcatctgttcgaggcccgtctgcgcggtgcccagaagatggggctgtatctggcctccaacctggggcagattgccctgaacctgctggcctgtgtgatccttgtaccccgcattggttttgcaggcttctggatgtccagctggatcagcgcgcccatcggaatgctgttggcagcggcgctggcgaacctctcaggtgcttcgcaccagctcccctaatagggggggcttgcctctcctattaggagaggtggcatcccgccgggatgacggagaggttcagccgatcacctcatactgaaaatactcgcacttgaccttgctgcccacctcgatctcgggcggcagcagggccagcgcaacgggattcagctcgtcgctttcaatgtcggtgcggcgcaggttgacataatcgccgtcaaagctgacgacctcgtaataccaggggcccataggataccttctttcagttgagcttttctttgagctgtcgcttcttggagtggcggcttttttaatgcttccgtcttttcttttcgtcccaggcaaagtgcccggcgtagagcaggaacacgggcagggcggcaagggtgacagtccggctcaggcggatgccgtccggctgatagacaaagtcgatggtgaccgttccggcggggcagaggacggccatcaggccctcgtccacccgcaggatctcggtctcctgcccgtccacataggccgtgaagccgtcatcgtagggcacggagaagaacatcagattggccctgtccagcgtggcctcggcgtggaagcctgcgctggtcatctcaaaggcggtgcaggcagaggcccggcggtcggcgcaatcctgggtgtagcgggtgtaggtcagatcgttgagctctgccgtgggcaggggcgtgaggtactgcccgtaggccaccgcatcctcctcagtgagcaccagtgcccgcatgagcaggttggagcgggtgggggtcacggtgtcctcgtactgggtctcggtgaggtagtaatcgtaggtgaagcccatgggaacgtagttctggttctcgtagagaacatagccgtccagggtatcgtaatacgcccagccctcatcggcctcagcgtggaactgcttctgatgcgcaagtgtggtcagcaggtatctgacgctgagcaggccgcgcagggcgtagttggagagctcgggctgactgcgcacatcccgcttgacccccagtgccgggtagaagctgaggatgctgggagcggcggtgctgccgaaatactgcaggcagctcttgtccagccacaggcccagattgtcgtgggtcttgtaggtgtcaatgcgccagtcgccctcgggcagatcctccttcagggccagcgcgttgatgtactgctccacaaggtcactgtcggtgttccactggccgaacttgccaatgccgatgtggacgatgccgaacaggcagctgaacgccagcacaccggccagcaggcggcgggcaaagaccctgcgctgctgccagcgcctgcagatgcaatggtagacggccagcccgcccagaccaaaggcaagcacggcgcagtactggcccggattctgcagcacgcccaggctccactccttggtggtggcatcctgcacgggcaccagtgcaaaggccagcgtggcgatcatcacaaaggcaatgctccgggcagggcgggcgaggtcgaggctggggtcctcccacgcgctcaccgtcatggccgcaaggatgagcaccggcatatagaaccaccgggcatagtagctggaattgagggcatagaacgcgctgttcaggatgggcaccagcgcaaataccatgcagacggcaatgatccgctttttgctgtcgccctgccgggcacgccagtaggccaccacaccggccagactgcacaggggcagataggctgtcatgctggtccatttgatgatgccctcagaccagatggaggtcatatagggggaatccgggggcagcacccagctcagcagaatggccagatactgctggggcttggaataggtcagaaagccccagccggaggaaagatcgatggtgcgcgggttctgcagtacgctgaggacagtgggccagagcaccacaaagcccagtgccacgcccagcaggctctcaaaggccagctgaccgaagaggcggggcgtgagccgaaactccccggcggagagcttgcagacgaagtagatgacaaggaagagcacctgccccacaaagaaaaagtagttgttgagcaggttcaccgccacccagaaggcgaaccatccgtggcggcgctcgtagatggtctcatccagtgcccagagcatccaggggaagagggccagcacatcaatgaagtggttgaagaagatgttgtacagcccccagcccgaaaaggcgtagagggccgcacccagcaccgcaaagttcgggtctttgacgtagcggcgcaggtacagatacgcgccgccgcccgccaccgcgaacttgagtaccagcagcggcaccatgaggtaggggagccagttctgcgggaagagcagggaaaaccagaagaagggggagccgtacaggtagaacgaataggcgttcatggttccgctgcccaggtcagttgcccaggaaaaggtattcttcacgcctccgtatccggcggggtagcctgcccccttgagaaagccgttcatgtagcggtaaaagctgatctgctggctgttgaaatcgcctgcatagtggaaaaagccgccgtccagcagatagaacggcaggaagatgagggcggctgtcagggcgcagagccccacggtgagccagaacttgtcctgcttctgtcccagcatccggggcgaagaatgaaatgcagtcatgcgtcagtcctcttttcagtatcggaaatttcccgcttacgggaacggcacctcgcgggtgtcatcggggtcctgcgcggccctgcgctgctgctcgaacaccgcgtcgatgagggtgtcgaggtcagaaaggcggctcagctcacagcagtagcgccgcaggctggcggcccccttcaggcccttcatgtagtgcatggtctgggcccgggcctgaggcatggcaacgaactcgcccttctgctccaccatctcctccacctgccggcgcagggcgttcatccgggcctgcaggttcggctccttgggggcgggcaggccctccagcgcggcgttcacccgctcaaagagccaggggtcgcccagggcggcccgggcgatcatcacgccgtcgcagccggtttcctccaccatccgcacagcatcctcggcggtgcggatatcgccattgcccagcacgggaacgtggacagcatccttcaccgccgcaatgatggacgggtcgatgcccggggtgtacatctgctcccgggtgcgggcgtggacggcgatgagcaccgcgcccgcctgctcacaggctttggcgcattccacggccgtgacgtgctccgcgtcccagcccttgcgcatcttcacggtgacagggcgggaggtgtttttgaccacttcctccacaatacggccgcagcggtcgggatcaagcatcagcttgctgcccgccccgcccgaaacgatcttgggggccgggcagcccatgttgatgtccagaaaatcgaacgcgtactgttccacggcggcagcggcctgccccatgatctcgggcacttcgccaaagatctgcacgccgtagggggcaccgttgggttcggccttgagcaggctgacggttttgtggtcgccgtataccagtgcccggctggacaccatctcactgacggtaaaaccggctccgtgctgggccatcagccgccgggccggggcatcggtaaagcccgccatggggccgaacactgcccggtggggcagggagatctccctgatcttcaaaggggtgttgaaaggttccatgatactccttagcgctatctgatttagttgataacatgataaaatttggattataagtataccatatttccggcggcagaacaagaagcggaacatctttcttgtcagcgcgggatttttccggtatactggggacaaaaggaggagcggctggaacacggcagccagctgcacaaaagagatggaatacagaacatggaaaaagcagaacggcgcaggggagagcatccgcacctccctgctgggctatggctgtatgcggtttcccaccacaccggagggagccattgacgagccccgggccgaagcgctgctgaatgccgcgcgggatgcgggcgtgaactattttgacaccgcttacccctaccacggcggccagagcgagccctttgtgggcagggtcattgcaaagtggccccgggagagcttttatctggccaccaagatgccgctgtggcagtgcgggagcctggaggaggcccagcatatctttgaagagcagctccggcggctgggcgtggagtacatcgacttctacctgctgcactccctgcacgccgcccggtacgaccgggccaaggaaatgggcatcgtggactggctgtgggagcagaaaaagctgggccgcatccgcagcttcggcttctcctgccacgacaacgcggcgggccttgagcacatcctgcgggatcagccctgggatttctgccagctgcagtataactatctggacaccgatgaccgtgccgaggagatctcgggtgaccgcggctatcagttgaccgaggagctgaacatccccctcatcattatggagcccatcaagggcggcacactggccaacctgcccccggaggccgaagcgcccctcaaggccctgcggcccgtggcctcggatgcctcctgggccctgcgctgggtgggcagccaccggaacgtccatgtcatcctctcgggcatgagcgccgaggatcagctcacggataacctggccacctttgcccgctttgagccgctgaccgctgcagagaccgccgcggtggagcagaccgccgccttcctgcacagccgcatcaagatcggctgcaccggctgccggtactgtatgccctgccccatgggggtggacatcccggacaacttcagcatctggaacaagctggggatgttcggccagcccgaggccatcaagcaccagtgggaagctcacttccccgatgccgaaaaggccagccactgcgtccgctgcggcaagtgcgaggcggcttgcccccagcatctgcccatccgcaatgcgctggcccagctgcagcaggagctggatcggctgtaatctgcatcagaaaagccaccggcaaaaaccggtggctcttttctcttattcgctccactccatcccgatcttatccagcattgcgcggcgctcaggggtgagcttggggtcgtgggtggtatcccactcccgcatccggcggagccagtcgcccaggcagaagccggtttcgtcggatttgtagttggcggcggcgtggaggttgccgtgtgccttgtagtaggcctttgcctgctgataggcggttccccacttggcatcccgggcatcccacaccatgccgatgctgttcagctttttgatgtgggcggacgtgacctgataggaatccgggcggttcttgcgggctgcacgcaggttggagatccacacgcccagccggacaccatcgctgtccacatagctggcggggaccagcaggtgcttgtatttgcgggcgtagcgggcggcactgcggaagttccgctcccagttggcctcgcgcacggtgccgtggtcagcggcgggatcactggggcggcgctcgcccttgaacagggtgcgcagcagcttgcggcgctcactgctcagggcgctgctgccggagttcagggcctgccgctggcggctgacccagctgcccagccaaacaccgtcggcggtcttgtagacagaggggatctccagatcgccgtgctctgtcttgtaggccagagccagatcatagcgctcctgccaggggtcgtacttttcccacaccatgcccagctcgtccagcagggccttgcgctcaggggtgacccgggcgctggagcggtccgggttcaggtaggcatagcgctggcgcgccacccacttgcccagcagtactccgtccggcgtgacatactccgaggggacgttcaggttgccgtgctcatggtagtaggcggcggcaacatcgtacaggaacatccacttgcggtcgttgcggttggtccagtccatgcccagagcgtccagccgctccacctgctcctgtggcagctcgcctgccttgtgagcggcgcgctgggcccccagccagacccccagaccgaagccggagggcgtttcgtacttgatgggcacttccagatcaccgtgctccagataatactgggtggcggcggcatagttctgctcccacaggtcgttggaggtgctccacaccatgccgatggcttccagccgctcgatgcggttctgggtcaggttgccgcccagatagcgctggcggttgtagacgatccattcgcccagtgcaaaatcatttttatcgcggtagcgcaccggcaccagcaggtcaccgtgctcggtgcggtatttctgtgcggaggcaaagcctttttcccaggcggtctccagccggtggttccagcggatgcccagtttttccagcttggcggcctgctcaactgtcaggcggcccgggcgctgcccggcctgtacctgccgctggagctcgagccacttgcccacgggcacgccgctgtggatggtatagctccggggcagctccagggtgccctctttggcggcggcatcggcggcagcctgacacagcacctcccagcgggcctccatctcccggcgcagcttgccgtacaggcggtaggtctgctgcatggggcgctcctgccggaagcccggcgttttgctgccggctctggtcatggcctcggtgcagtcacgctgcagggtgcggccattgcccagcccctcaaactgcgccacaaggtcgaacaccggcacgctgcggctgcctgcagccaccagcgcgcggcagagcatctgcttgaaggtggacatcaggctggattggcgcaccagaatgaccccggccagcccctccagcggctgctggactcccggcgcgttgacgcagagcagggccttggggccgggggctgtatcggagagaaaggtctccacggcagcagaatccgcaaagcaggcgtgatctgcagcgtaaaaacggacggcagggtccacagtgcgcagcagctgttccagctccgcgcccagcttttcctgataggcggcggattcaaacaggaccagataatggccgctggtatcgctgagcaggcggggcagcagaacggtcaggttctccacctgacgcagagaccagctcagctcttcatattgaacgcgcagggaggtgtcgcccttgggcatacacaggtttttgatccgggcgcgcagggtggccagctcctcctcctgaggccagagcagggctgcataagctgagggcaccggcatggtcccggcggccatggcctcggccacagtcatgtgggagacgatgcagtcggcaaacagctcctgcgcggcggcgcagacgggggcaccgttgggcacacccagccccagcacctttgcctgggggcacatccgcagcagcttctgtaccgactgcgcccagcacacggcgctcaactcatggtagcagtccagcacgacgcagccgggtttctgctcccccagccgcacccactgctccggggtggcggcggccagcttttcgcaatcacagaagcggacattgccgggcagggtgccgccgttgtagcgtgtcagctctgcctgccgcagggccagacgctgtgcaccggccaccagccagaaaaaggtggtctgggggtgagcctccaccaccttccaggcaatacagcttttgccggtgccggtggggtggaacacagcggcccggttcagggtctccagagactgtacagctttctgaaaagcggcttcgttgacgggattcagggtcatcgacatggtgatagtgtcctctccgagttgcatgtttgacat

SEQ ID NO: 1097 - DNA, 16778 bp, unidentified
  source 1..16778: mol_type = unassigned DNA
atgcaatataaaagttataaaggagatagtggcatgagagaagaattattagcgatcatagagaagaacagcaggatcgatctgaaggaactggctgtgatcctgggagtggaagagatcgatgtggtaaatgaactggcagcactggaagcagaagggatcatctgcggttatcataccctgatcaactgggagaagacagacattgaaaaagtaagtgctctgatcgaggtacgtgtaactccccagagaggccagggctttgacagtattgcagagcgtatctacaaatatcctgaagtgcgcagtgtgtatctgatgtccggagcgtatgatctgatggtcattctggagggtaagaccctgcgggaggtatctaattttgtatctgacaagctgtccacactggattctgtgctgagtacagcaacgcattttatcctgaagaaatacaaggatcacggaaccgcatttgctacgaaaaaagaagatgaaagagagatgatcactccatgagaaatccattagcagataaagtagtggatatcaaaccatcgggtatccgcaaattttttgacattgtaagcgagatgcaggatgccatctctttgggtgtgggagaaccggattttgatactccctggcacattcgggacgagggtatctattccctggaaaagggaagaaccttttatacctccaatgccggtctgaaggatctgcgtcaggagatctgcaacacaatccggagaaaacagggcgtaacctatgactggcagcatgaagtgctggtgacagtcggtggctctgaggcaatcgatatcgggctgcgtgccatgtgcaatccgggagatgaagtcctgatcccccagcccagctacgtatcctatgaaccctgtgcgatcttggcaggagcgactccggtgatcattgacctgaaggcagagaatgaattccgcctgacagcagaggagctggaggcagccattacggacaagacgaaggtactgatccttccgtttcccaacaatcctacgggagccattatggaaaagtctgatctcgaggctattgcaaagatcattgagaagcatgacatttttgtcatgtccgacgagatctattcagagcttacctataaagagaagcatgtttccatcatcagtcttcccggcatgaaggagagaaccgtttatatcaacggcttctccaaggcatatgccatgactggatggagattgggatactgctgcggacctgcagccattattcagcagatgacgaagatccatcagtttgccatcatgtgtgctcccaccaccagccagtatgcggcagtggaagctttgaaaaacggagatcccgacatcgaggagatgcgtacagcctataatcagagaagacgctttttgatgaatgcgttccgtgagatggggctggagtgctttgaaccttacggtgcattctatgtattcccctgcatcaaggaattcggcatgaccagtgaagagttcgccaccagattcctggaggaggaaaaagtagctgccgtgcccggaaccgcatttggtgacagtggcgaggggtatcttagaatctcctatgcgtactccctggaaaagctgaagaccgccatcggaagactgggacattttgtagagaaattaagagcagaacaaaataataaataaagcatttttcagtaactattcggaaccacaggctgtaagtggcgctgaatagttactatgctgtagaggataaattatgcatattatattacatcagccggagatcccggcaaacaccggaaatattggaagaacctgtgtggctaccggtaccagcctgcatctgatcgagccgttaggctttcggttaaatgaaaaagagatcaagagagccggtatggactactggcagcatctggatgtcaccagatatatgaattttcaggagttccgggaaatgcatcccggagcgaagatctggatggcaaccacgaaagcacaccagacctacaccgatgtgaagttcgggccggatgactacatcatgttcggcaaggaaagtgccggaatccccgaagagatcctcgtagagcatgaagagacctgcatccgcattcccatgctccccgagatccgttccctgaacctgtccaactccgtagccattgtgctctacgaggcactgcgacagcagggattcgagagcatgcagagggatggggaacttcatagattacattggaaagagaaagaacaataggcctctttacaaaacgtccatggaaaggtaatatacttttataatgcgatttataaaagataatgaatgaggatgaatacatggacaaaaggaattctacaagaggcaggatcatcaactatatgttgaaccatccaatcacctccaaggcagaactttcaaaggaactgaatatcagtatgcctacggttctgacgaatgtgaatgaactgatttcccagaagctgttgacagaactgggggagtatgagtccaccggtggcaggaaggcgaagagcatcggtatcaacaagtcctatcgcagagcaatgggggtagtcatcagtgccaatcatctggaaatggtactgatcaatctgggttccgagattgaaaaaagcgtccgggtgcgtctgaagttctccacggatttttcctactgtatgcaggtgaaaaaggagataacgaaattcctgaagggaagctgtgcggaagaggaactgctgggggtcggcattgcgattcccggtatcattgatcagcagaaccggattgtattgaaatcgcatgctttgcagatagagaactacagtctgcgttttctggagcaggcactggaactgccggtatattttgagaatgacgccaatgcggcaatgttggcggaaaatccccagaaatatcaggatgccatctatctgtccctgaatcatacgctgggcggagccttttgcatcaacgggcagctgttccggggaaagaatcagaaggccggagagttcggacatatgatcctcattccgggaggacgtaaatgctattgtggaaaagtcggctgtacggatgcctactgtgcggaaagtgtgctgacagacgacaacaggatctcactggaaacctttatgacacaggtgaagaacaaagatgcggcagcaggcgtcaaatgggagaactatcttgaccaccttgccatcctgatctccaatcttcggatggcatatgatatggatatcatcctgggaggagatgtcggcggtgtcctcgcagagtatatgattccactcggagagaaagtcatgggatataatggatttgaccatgatgtctcctatctgaaaaactgtgcctatgaaaaggaagcatccgcagtaggcgcagcaagacacttttttgcagatatatgccattgatggaatactcaagtaatcaaataaaaccaggaaaacctgattcgtaatgctataccggcagatgcggatcagtttttttttaataaaattttatgacaggtagttgacaaatcttccctttgggatgataatacaaatactttaataaagtattttataaaagcgaatacaaaacaataagagagcaaaaacttataacaaaaaggagaggattattatgttacaggaagtaatgacaaaacccggcgagatcatattcagagagattcccgttccggagatcacagaggatcaggtgctggtgaaaatcatgcgtatcggcatctgcggttcggatattcacgtatatcatggcaagcatccctttacaaaataccccgtaacacagggacatgaggtatccggtgagatcgtgaagattggagacaaggtaacacagttccatgtgggacagaagatcactattgaacctcaggtatattgcggacactgctatccctgccgtcacggcaaatacaacctttgtgaagaactgaaggttatgggcttccagaccacaggtaccgcttcagaatattttgcggtagatgcatccaaggtgaccccaatccccgaggaaatgtcttatgaggaaggagccatgatcgagccgttggcagttgcggttcatggggtaaaacagatgggtgatgtgaccggtatgaacatcgtagttatcggtgcaggccccatcggtaatctcgttgcacagactgctaaaggaatgggagcagccaaagttatgatcacggatgtcagcgatctgcgtctggaaaaggcaaaagagtgcagcatcgacgtgtgtgtaaatacaaagaataaggatttcggagaagccatggtagaagctttcggcccggataaagcagatgtgatttacgactgcgcaggaaataatatcaccatgggacaggcgatcaaatacgcgagaaaaggaagcgtgatcgtactggtagctgtattcgctggcatggcggagatcgatctggcggtagccaacgatcatgaactggatatcaagagtaccatgatgtaccgtcatgacgattatgtggatgcgatccgtctcgtcaatgagaagaaggtacacttacagcccctgatttccaaagtattcccgttccgggattacctgaaagcttatcagtatattgatgataaccgcgagactaccatgaaagtcattattaatgtacaggaataagagggagacactatggacaacaaatacggagttacgggaattgcacatatcggaattccaaccaatgatatggaaaaaaccatagaattttacaggaatctgggatttcaggtattgctggagacttataacgaaaaggcctgtgaaaaagtagcttttctgcagcttcaaaattactgtattgaaaccttcgaaaaccatcaggcagtaatggcagacggcgcatatcagcatgtggcgctggatgttgcggatattaatgcggcctatgacaggatctgcgcggagggtcacaagattatcaccaatggtatagaagcattgcctttttgggaaaacggtgtgaaatttttcatgatcaaggggcccaatgaggaaaagatcgaattttgccagaaactttaaatacaggaagcaggtggattcagaatgaaaaaagagatagcgatcgcagcgttaggagaactcttgattgattttacagaagcaggtatcagtaaaaacggcaggaaactgttcgaacagaatcccggcggagcaccggcgaatctgttgacggtggcaagccatatgggataccggaccgctttcatcggaaagataggaaccgatatgcatggagcgtttctgaaaaagacgctgcagcaggaggggattgctaccggagccgtggtggaggatgagcattattttaccacactggccttcgtggaaattgatgaaaagggagaaagaaacttctcttttgcgagaaagccgggagctgatactcagctacagacggaggaactggatgtgaagctgctctctgactgtcggatttttcattttggatccctgtctctgacgcaggaaccgtcaaggggtacaacgctggaggctatccggatcgcaaaggacgcaggagcgctgatctcctatgatcccaattaccgggcatctctctggcccgatgaggagaccgccgtggcacagatgaaatcagtgattccgctggcggatgtaatgaaagtatccgatgaggagagtctgttactcaccggagctgctgactatgaggaagcggctgatcaactgctttctaatggtctgaaactggtggcaattaccttgggaagcaagggggcgctggtagcaacatcgacctacagagagatcgtgaaggcctttcctgtaaatgccgtggataccacaggtgccggggattccttctggggcggatttttaagctgttatctctcttatgacaaaaaaatggaagaccttggggtggaagaactcagaagatgcgccctgaccgggaatgcgacagcaggactgtgtgtacagaagcggggcggaattccttccatccccaccagaaaagaaatcgaagaatttatacgggagaggacggacagatgaaaatagttgccgtagtatttgacatggatggagtcttatttgataccgagcggatcggtgtgcagagctggacagaggcagcagagcctaccggtttgcaaaatgcttacgagattgcgagaatgtgcattggaagaaccattccgggaaccaaagaagtcttcatggcagaagcagaaaagcagggaatagtgttggatttcgagaaactgcatgccgactgcagcagacggatcttcgaaaaggaggagagggacgggctgccggagaagccgggggtacatgaaatcctcgaatatcttcatgagaaaaagattcctgttgcattggcatcttccagcaaaaaagcgacggtgctcagtcatctggagaagtccgggatcaccggctattttcagaagatcgttaccggagatatggtcacgcatggtaagccatcaccggatatctatctgaaagcctgtgaagaactgggtgcagcaccggaggaagtgatagctatagaggactcctttaacggaatccgatcggcttccgcggcaggattacatccgatcatggtaccggatcagctgcagcctaccgaggagatcctgttgctggcagaggcaaagtgtgacagtttattggatgtaaaacagttattggaagataaatacttgaaataaagaggagtgtagcagagggaaaacagaagatacataagggagctataatatatgaaattagcaacatcaacgaatatcatggatgcggactgcgacagaccgtaccggatccccgtcgatgtatctgccagagcatgtgcccgcgcgggctatcaatatgttgatgcctgcctgtgcagctattgcagagagggacaacccctgcggggagaatactgggaaaagtggatcgaagaaaccgtagcgctgaaagaagaactgaacatacagttcccgcaggcgcacgcgtactggacgatcggggaaggctttctcccggacagaacccgcagtgacggcgaactgggggaagaacttatgcggcgcagtgttcttgcagcggaagcactgggcgtgaaatggatggtcgtacatccctattccatgagccgtcacggcggatacgactatcgcggatcctataaatataatgtcgaatactggaaacgctggggagaattctacgcagagcacaatgtcggaatggcgatcgagaatatgaatcgaccgacccattacggcagctgcgcagaggaactgttagaattgatcgatgctgtgggcaatcctatggtgcagatctgcattgacacaggacatgccaatatggtgggactggatgtgccggcaatgatccgacaggtgggttttcatctgaaggcgacacatatcaatgacaatcatggtacgacagacgaacattttgcgccctataatggtacgattccctggaaagagaccgtacaggcattacgtgatattcattatcaggagtgttttgcattcgagatccaccatctgaccagtatgtatccaaaggaggtgcagtctgcactggtagatttttcctatgtactgggaacatatctgttgggggaacaacaggaataacacgtcgcaaaaatccgtgaaaagcagacaaacgaccggcacagcccatgtatgtgaatcgtggtagtgctggttttctgtacaaaaatataggaggaggcaagtaatgctgaatacttttacggaatattttgccggatttacgacaggagccattgcactgcggctgctattcgcggcagtgctgggctgtatcatcggactggaacgggcaacaaagcatcatcctgccggaatgcggacttttgcgctggtctgtctcggggcggcggcctctgccatcgtaaatatttatctggggacggctttcggaacagggcggacagacttaagccgtattccggcaggcgtagtcagcggaatcggttttctcggagtggggacgatcatcatcaccggaaagaatcaggtccgtggccttacaacggcagccggattgtggacgacagcgacactgggaattatgctgggctcgggaatgctgcagatcagtctgatcctgttcgtgctcattttcagtaccatgtttggaattgcgaggatcagtcgcgtgcaggaaaaatataaccgctatatcggactgtatatggaaattgacaagacaatgacccgcggtgtctatgattatatcaacgactgtgggtacgaattgtcttctatcgagaaaaagagagataagaccctgaaaggttccgatattgtgctgatcctgatgatggatctgaaaaaacgtagaaatcatgcggagatcctgtcggaagtgagccagcttgagggagtgcattatctggaggaagtatgactgaaatcataagattagcagattttacataaaatttacaatatgtacgtacataaaataaacagcatgggaaaaatgaactaaatatcaaataaaaataatgttatgttactcataataacaaatatgttttaaaaaatacaaaatatgtattgacataataaccaagtaggaatattatatagccataatgttactacataaaagggtgggtgaaatgtcagagaaaaagaaagtaaaaaatgctgaatatgatgtcgtagttatcggtggcggaatgtccgggatctgcgcagcactggcagccgcaagacacggggccagaacagcattggtgcatgaccgacatgttctgggaggcaatgcttccagcgagatccggatgcacatctgcggagcttctgagaatctcgcgaagccggatcttgaggagagcggaatcctgcatgagattatgctggacaacaagagcagaaatgattattataatttttcgatttgggatatggtccttttttcaacagtgaaaagacagaagaatcttacggtgtacttaagtacggcaatggaaagctgtgagatgggagaaggatccacgatccgcagcattgatgcctaccagctgactacggagacgcactggaagatatccggtaaagtcttcatcgattgcaccggcaatgcaacccttggatattatgcagaggcggaattccggacaggcagtgaaggcagggatgaattcggggaaccggatgctcctggacagccgaacaaggaacggatgggcaacaccttattattcaaagcggtggacagaggacatccggtggcattcaaaaagccggattttgccagaacctttacggaagaagaactgaaataccgaacccactccgcagtacatggagcacagatcaagggagaggtggacaaggcatatgtaagaatgacatccttcagtacttcttcggtagactacggatactggtggatcgaacttccgggtgagacagatgacatcattgacgagtatgagcagatccgggatgaactggtatcctgcatttacggaatatgggatcatttgaaaaacggtggcgaccatggcgcagaaaattacgatctggaatgggtcggaatgctgccgggttccagagaaggcagacgtctgataggggattatatcctgaatgaaaacgatatcctcagcaacagacagtttgaggatgccgtggcctacggaggctggccgatggatatccacacggcgaaggggctttacgattttgatgagcttccctccagagtgatcagcttcgacggtgcatatacgataccttatcgctcctattattcaaaaaatatttcgaacctgatgatggccggacgagatatcagtgccagcaagatggcaatgggatccacgagagtcatgggaacctgcgcagtcggcgggcaggcagtcggaacggcggcagcactctgtatcaaatatgactgtgatcccagaggggcgcaggaacatatgagggaattacagcagatgctgttgaaggatgacgcttatattcccggcatctggaacgaggatccgaaggatctggcgagaagagctaaagtcacagcaacctctgcacgggaaggctgtcccccggaaaatgtaatcaacggcatttccagagatgaggatggacaccggaacctgtggatctccggcaagggtagaaccgaaggagagatgcttacattgcatctggccgacagacagccggtatcggaagtgcatctgactttcgattccaatttccattatccgatcaagatcacgctgtcccgcaagaggcaggcacagcagaggatcggggtaccgccggaactgatcagagactataccgtaactctctggcagggagataaaaaggcagcgaagcagacggttacagagaacgttcaacggaaaaatatagtaacttttcctacaacagaatgtgacagggtcacggtaatggttcataagacgaacggcagtaatgaggcacatatttacgaaataagggtgtattcctgagatgtctttggatgaggggacgatcaggttgaccatagacaacaatacaaaggaggattacgatttatgaagaagaaaattgcattagtactgactatggcaatgttgggatcctgtctggcaggatgcggtcagaatgcagcagacgacagtgcatctgcagaacagaaagaaagcacagcggttgcacagtccacggaagcggcgcaaggtacagaagcaggggagaaggaatggttcggtaccgatgacggcaagaccgttacgattcgtctgtggggcggcgtacagccggaatatggatacgatgaagtgtgcgcaaactttaatgagcagtacaaagacaagggcgtacaggtagaatatgtacgttatgtcaacgacagttcaggtaatttacagctggagacttatctgatgggcggcggagatgtagatctgttcttcggatacggcggacgttccaagctggacaagcgtgtcgagtccaacctgttgttagatatgtccggtatgctgaaagattacggatttgatctggagacagaactgggtgaatccaatatgctggattacaaatatgatgatggatctgtttacggtttcccgacaaaatacgagaatgcaagatggctgatgatcaatgaggatatgttcaaggaagccggtattgatatcccttatgatggttggacctattccgaattcttaagtgcagtggagaagctgacccacggcgaaggtcaggataaggtatacggattgtgctggagccgtaagcagaactccagatatgtgcagctgatgctgaactccgtactgggttcctaccaatcctacaagaatgatgaaggtacggaagtgaacttcgataacaaggtatatcacgacggttttgagatggtaatgaagactctggacaatggctgggcaatccccattgaagatgagtactccgaggacctgagtgttgccaacaccttcctggagggcaaatgtgccattacactgggcatccccatgatgcgtctgtgtatggatcaggaaaattatcctcacgatttcgttactgcactggtacccgcacccgttcccgatgacgagcagtataataccgagttctacagaacccatgcaggtaccccaggtgccggcgacctgatgtgtattgcggccaacaccaagtatccggaagcctgcttcgagttcgctatgtggtaccttaagggtggtatggctcctttggttaagggaggaagagttcctctgtggaatggtatcgataaagaagctgttcttgatgtactgaaggcaaatgcagaaggctccattgatctggaatccatgaataactatctgtctgtggacagaacgcagggtgttaagacggtacagggtgttgcatctaccgaagtaagtgccgtatggaacgaagaatttgacgcaatgtgctatggcagacagtctgtagatcagacgatcgacaatatggtcaagagaagcaatgaactgatcaagacggaactcgaaagcaagaaataagtaacataacttacaacaaatcagcggaaaggggcggaagcgtttcaggtgatccgcccctgatctgaaacagataaacgagggaaaatgaatggaaaccaagaaaaagaaaagcaaaggggaaagacaaaaaatactgcatcagaatctggttgcatattcctttctggcgccgagcctgatcggtgtaatatgttttagcctgatcccgctggtgatctccctgtacgtaagtctgacggactggaatttcacacagggaatcggaaactggaatttcgtagggctcacaaatttcaagaatctgtggacagatgagtggtttaccgcttctctgaaaaatactctgctcttcaccattgtcaccgttccaatcggattgttccttgcaatcgtgattgcggtactgatcgacgagttctgccataaaaaggttgcaggtgtagtacgagtggcaatgtatatgccgcatatctgtaacatcgtggcaatctccgtagtgtggatggcactgtattccaaatacggcccgttcacccagctgatgaaagcgctgggctggcaggatcctcccagattccttgcaagttacgaatgggcactgccttcgatcatgctcgtagtcatctgggcaagtctcggataccgcgtcttcatgtacagtgcggccatcacaggactgccgagagatttgtacgaagcagcagaaatcgatggagcgaatccggttcagaagtttttcaagatcaccgtgcctttactgaaaccgactacatttttcctgacgatcacgggtatcatctccagctttaaagtattcggatataccaatgtcatgacaaagggtggccccggaagctctacctataccctggtttattatatatacacctcggcattccagtactacaagatgggttacagttccgccattgcagtgatcctgtttatcatgttgctgatcgtaaccattattcagtggatacataacaataaagaagagaaaggctagggattaagatgaagaatgtatctgtttccaaaaaagtgaccagactgctggttacgataatcatcgtggcagtcactctggttatggtaatcccatttgtctggatgctttccgcttcctttaagacagaagcggatgttatgaagatccccattgaatggataccgaaatatttctatattgataactacaaaaaggttttaagtatcggaaccacaagctctaccaattatcatttcccgctggcgtatttcaactctatcaaggtcgcagttatcagtacagtggtggcaattacctctgcgactctggcaggctatgcctttgccaagttgaagttcaaaggttccaatgtactgtttatcatctatctggcacagatgatggtaccctcccagctgacattgatccccagattcgtgatcttttcccagctgggctggatgaacacccacatgtctctgatcgttccgaagatcattgcagtatcctctacatttatgctgcgacagtccttcctcggaacaccggatgaactgcgtgaggcagcacgaatcgatggtgcgggagagtaccgtgcatttgcacaggttatgctgccactggtcaagccggccatagcagccaccgcaaccgtacagttcctggatgcatggaacagctatctggatccgctggtattcatctccaactggaaaaaatggacgattcctctggcgttgaaccagttcgtaggttccgaggtaacacagtacaatctgaccatggcagcgtgctgtctggctgtagtaccggtatttattgtattcctctgcggacagagatttttcctgaaaggattatctgtaggtgccgtcaaaggttgatcaaccaaacaagaaatgtatgcaggcaggaggggagagttctcatctcctgcctgttttgcaatcggagcagcgaagctcggaagaggagagtattatgtcagtacataaggaagaacgacattatgaagtagtggtagtcggcggaggaatggcgggcgtttgtgccgctatcgcatctgcgagaaaaggtgtcagaacggcgattgtgcagaaccgttccatgtttggcggaaatgccagctcggaaatccgtatgcacattgtcggggccaatgcccacggatccaagaagaatctgggggaaaccggcattttactggaaatcttactggaaaataagcggcggaatccctatgcgtcctttcctgtattcgattccgtgatctgggaaaaagtgcattttcaggagaatcttgatgcttatctgaataccgatatggacgatgtcattatggacggcaaaaaagtagcggccattgtcggccatcagaacaccacagagacagaatttacaatctatggtgatatcttcgtggatgccacgggacatggcacgctggcgaccatgggaggcgctgccggaaggatgggcagcgaaggacgcgatgaattccatgagccggatgcgccgacggaaccgaatcaggatacgatgggcaatacattgatgttctctgccgtagacagaggagagccggtgaagtttatccgtcctgactgggcatatcagtattccgaggaagatctgaaatacagagagcatggcaacagtatcggctcccatatggagggtggacagctgaccaagttcgaggagggcagcggaaggctgccgcatttctccaacgtggattccggttattggtggatcgaactgggtggccagtatgacgatattatccgggatggtgaagttattcgcgacgaactgttgaaatgtgtctacggagtctgggatcatctgaagaatgtaggggatcacggtgtggaaaatctggacctcgattgggtcggcattgttccgggctatcgggagagcaggcgtattgagggagattatctgctgaatgagaatgacgtgctggagaaccgtattttcccggatgcggtagcttacggcggatggcagatggacgagcatgtacggggcggtatccgggatcttgacaagattccttcccggatcctgaatttcaacggatgttataccattccctggagatgttattatgcgaaggatctggagaatgtcatgctggcgggaagagatatcagtacttccaagatggcatacggttccacaagagttatgggaacctgttccgttggaggacaggcggtaggtacggcggcagccatggcggtaaaatacagatgtactcccagagagattggagagcatatcatggagttacagcaacaacttctgcgggatgactgctatattccgggctttcgtaatgaagacccgctggactatgcgcggtcggcaaaggtatccgcatctgcctgtacaggaaaaaatgtgccggaaaatgtattgaacggtgtggcaagaccggtgcaggaggagagtaactgttgggaagcacccatcggagaggaaggagccagtatctctcttgatttcggtaaaaaactggtcttacagcaggtgcagctgacctttgatacgaaccttacgagggagattatgccatccatgacgcgaaatgtcagaaatcgtcaggtaaaggggctgccggaggaactggtctgtgattacgatatccgcttttacagagaggggaaagaggtcatctgtaaggaaatccgcggaaattaccagagactgaaccggattgttgtagataacgtcatttgtgaccgactgacggtcacagtgtataaggcatatggtatcgatcgggcacgtatttttgaaatacgtacttattagagacatatttacaataaattggtacatattatacgctcaattattgacattgatttctggaattcgatatactgtaagtaatgggaactattggaaacagcggacactggcactatataaaatgttgatagggagagacgggacatggcagcacgatactcggaaatcgaagaatatattatggataagattcatacgggagaatggccggtaggctatatgatccccaaggaagtggaactctgtgaacagttcggagtcagtcgttctaccgtgcgtacagccatgttgcgattggtacaggagggacatctcaagcgtgtgaaacgcaagggaacgttcgtgacgggcccccgtgttctggaggacactacggtatttattgagagtttctttaatgaaatgttccgcagagggatagaggtagagacggaagtgctggagttccgctacatggaggcgacggaggatctgatggagaagttcggcgacaactgccagaaagtaatcaaactgagccgtctcagatatgcaaaggattccttcgataaaggccctattgtattaacgacatcctatctgccagaaggagattcgttcctgtttgattatgattttaccaaggcatccctgacaacggccctgaaagagcatcagaagaatcgttacagtatggaaaaggaaatgactgcgctggtattgggcggacgagaaagccatctgatggggatgaaggaaggatctctggcaatgttgatcacttctattacgaagaatgataaaggacaggtgattgatgtaacagagagtatctaccccttagagcggaataagtttgtatggaaactgaagctgtag

SEQ ID NO: 1098 - DNA, 24376 bp, unidentified
  source 1..24376: mol_type = unassigned DNA
atctttataaagatcaggaagctaaatttgattatgtggctgatgtatttgatactctgattatacgggatatcagaaaaaaatacaaaatacggaatgtgcagcttatggatagaattgtggactttttaatggataatatttcaaatttgtcatctgcccgtagtattacaaatacattaggaagtatgcatgaaaaaattcatcatacgactgtaggctcttatatgcagtatttgtgcaacgcattcgcattttataaagtaagaaggtatgacattaaaggaaaaaaatatttgtcgagcaatgataaatactatctgagtgaccatacttttcgttatgcaaaacttggaacaaaaaacatggattatggtcgaatacttgaaaatattgtggcaattgagctacttcgtaggggatatgaggtttacgttggaatattgtataaaaaggaaatagattttgttgcaattaaacgtagcgaaaaaatttatattcaggtatctgataacataagtgatgataagacttttgaaagagaggtatcaccactgctgcagattaaagatgcataccctaagtatgttattgccagaacgagacatgatgcgtatcaatatgagggaatcaagatagtcgatattgcggattggttattggataaatgaactattagccaaaaatgagaaaagattgattttggctaataaaaacaccagtgatttaaaaatgtaaatacgaggagggcttgcataattcctcctgttttccacatactacccatacagcacaaaaatggaaagtatgtaggaaacaggaggaatttttaatgaaagcaacaggaattgtacgtagaatagatgatttggggagagttgtagtgccaaaggaaatccgcaggacactgcgaatccgggaaggtgacccactggaaatttttacagaccgggaaggtgaaatcattcttaagaaatattctcccattggagaactgagccagtttgccggacagtatgcggagagcctggcacagagcaccgggcatctggtatgtattaccgacagggaccatgtgattgcggctgcaggaaacggaaagaaggaattcgaaggaaaaccaatcagcaggcagttagaggaactgatcgaagaccggaaaaatattcttgcacagcagggagacagcaaatttgtacgaattaccttagatgataccgggaactatcatgaccaggcaatcagcacgattatctgtgaaggagatgccatcggagcagttgttttatatgagaaaaatgaaactgcaaaaatgggagaaaccgaaagcaagcttgctattacagcggcgggatttttaggaagacaaatggaacagtagccttgtaactttttatggaacagtgtaaaatagagcaatatggaggaatcccatgtcccataaagagaagaaaaaaaggaaaaagaaataccgtggtttctggctttttgtaaagctgcagatagttctgatacttctggtaatcggcgggctggcgtattactattttggcgggtatgccagtcaggtcagtgccatgcatgaagaggcagtccggtttgtaaaagagtcgacgaaggacacatttcgggcggagcagaccagccaggtttatgatgtgaatggaacgagaatcatgtcacttcgtggcaccaaggatgtaagctatctgaccagtgatgagataccggaagaagtcaaagaagctatggtcagtattgaagataaaaaattttacagtcatggcggaatcgattttaaggcaattatccgtgcagtctgggcaatggtgcgtaatggagaagtaacccagggcggaagtaccattacgcagcagcttgcaagaaccattttcttaaataatgacagaacgtggcagcgaaaaatggaagaaattttcattgccacagagctggaaaagaaatataccaaggatgaaatcttagagttttatcttaataatatttattttggaaatggatattatggcattcaggcggcgagccggggatattttgatacagatgtttcatttttgtcattgtcccagatggcatatctttgtgcgataccgaataatccgacgatgtataatccttataagaacccggataatacgttaggaagacgtgaccgcattttaaaaaacatgtatgaggatggcaaaatcagccgcagggaatataaggatgccagacaggaaacgattgtactcagcacagcagagccaacaaagcgttatgatgcggtagagacctatgcctgctattgtgcaacacgggcattgatggagcagcagggctttgaattccggacagatttttcttcggaggaagatcgaaagacctatgaagatgcctatcaggagcagtataaaacctgcgaacagtctctttatacaggaggctatagaatctatacttccattgatttaaatatggaagagcagcttcagaatgcagtggatgagaagctgcaggattttaccgatgtcaatgaagagggcatttatacattgcagagtgcggcagtatgcattgacaatgagaccggttttgtaaaggcaatcgtaggcggcagaagtcaggaatatgacgggcatatgctaaaccgcgcctatcagagttaccggcagccgggcagtgccatcaaaccgttgattgtatacacaccggcgctggagcggggctataccccggatactgtggtggaagatgcaccgattgaggatggaccggaaaatgccagtggcaggtatcttggcagcgtaaccttacgttatgcagtagaaaattccattaatacagtggcgtggaatcttttagaagagatgactcccgttacaggaatttcctatctgaaggagatgaatttcgcaaagctgtccccggaggatgaaagacctgccgcatccctgggtggatttaccaatggagtctctccggtagaaatggcggcggcttatgccaccatagaaaatgatggaaaataccgggagcctacctgcattgtagagatacaggatgcagacggaaacgctatctatcagaaaattgtcgatgaaaagcaggtttataaaaccaatgcagcccgttggatgaccaatatattagagggtgttctgacacaaggaacagcaaagggactggcattgtccgagactgccagtgcagcgaaaacaggaaccaccaattccaataaggatggctggtttgtaggctatacaaagtattacaccaccagcgtctgggttggatatgatattccggcagaacttccaggactgacaggagccagctatccgggagaaatctggtatgattatatggaaaatttacataaagaattaccgtatgcagattttgtggcacctcttggcacaggcaatgatgctgatgcggagagtggcacagatgtgacagagggtaatgcagcagagaatgacactacaggagataatacagctccggcagaggaagaaaggcgataatatggaaaagaaagctgatttaaagacaatgacctggaaacagcggatcggatttgtctgggattattacagacttgtaatactggcagtagttgcagtgattattttgattggtatgacggtacatcattatatgaccacaaaggaagatatttcccagattgtattagtaaatgcaaagagtatgccagcagatgaagaaccggatttctcagaattcatggagcaatatggatatgatacagcagtccaggaggttgtggtaaatgatgcatattatgtggatttaaccagcacagataccagtaatctctattcctatcagtccctgcagacagtgattgcaggcggtggagtagatgttttgggtgctgatgaaatggtttttgaaaatcttgcccagtctggtgccatagcagatttgacgcagtacttttccaaagacgagctggaacagttaaaggattatatcttctatgtagaggataaggacaccggagatacttttgcagcaggcatccgtcttggaaccggaagctggccggttgaacacggttattatgaaaaggaatgtattcttggtattgcccttggctccgaacataaggaagcagcggagcagatgttccgttatttgctggaaaaatccaatttagactaaagaaagcgcaagatatagacgatataaaaatgagaaatggtacattgtgtatatcttgcggaaaaatcttgcgaaagatgacaaaatgacctataataaaactacctggaccatgagaagataaggcagatgaatcataaattatggatgaaaagatttataaaataggtgattatgaattcgaaaccttaagggaatacaggcaggcgcaggaagatttaaagaaaatcaagtatattaccgatgaactggatatttatgatccggaagtagcaatccggttgtataccatgatgcgcacgaagaaaatccgttttaaaagtgaaatcggaaaatcgttcttctggtgcatttcagatattgttgcggatagttcgcagaacatgatagaagaaaaaattgccaaggaagaagcggaagcagaagcaaagctgccatttcattttacctggcagaaggtggtcggcatcgtatgcatcattgttgcgacagcctgtatcggatattatgcgatttcggaatatgcggattataaagctgctaacaggcttaaggatttacagaataagaaacagaataatgtagtagagcaccttgtaacaggaacggagcagatgaatccggaaatcacagaagatgcaactgaaacaggagagacaacagagcagccactgattatgttagaggattatgtttccctgtatgcggaaaatccggaattaatcggatggttacatattccggatacggatattgattatccggtcatgcagtcttcacaggaagaaccggattattatctgaaacatgattttgataaaaatgacgacctgaatggcaccctttttatcgatgtcagaaatgattacataaacagggataccaatatcatcatttacggacataatatgaaaagcggaatgatgtttggcgaattaaagaaatatctggacgaagatttctacaatgcccataagacgatagaatttaatactctttatgaaagaggagtctatgaaattattgaagtgggattatcggaggtccagtatcaggatgaaaatgtattccggtattataattttctgaatgcagattccgaagaagaatatcaggaatatttaaataatgtggcacagctttctgtatatggcacagagatagacagtacttatggagaccagctgctgactctttctacctgcaataattatacacaggacggaagaatgtttatactggcaaagcgtgtacagtaagcagataagaagtataatgtatcaagcagataaagctaggagagatgagagatgcagatattgaaaaaaggattttctatttttgcagcagtatgtttgctgctggcagtgatgccgggacagacagtccgggcagacgagacaacagatgaaaatggatttacagtagatgacagtggaacactggttgcctacagcggagccggtggagcaattacaattccagagtcggtatctacaattgcaagtggtgtatttgcatccaatacatccattacaagtgtaacgattccatcttatgtgactggaatgggaaccgcagttttctataactgtacaagccttggttctgtcagcatagaaggagatatcggttctattccggcagagacattttataactgtacaagccttaccagtgtatctattggaacttcaatttcatccattggttcccaggcatttgcagagtgcagttcattatcccagtttacaattccggaatccgtaggaagcatcggggataaagcattttatgattgtacgtctttaaccggaattacaattccggctggcgtttccagcatcggaagcaatgtatttaccggctgcagcagactggcatccatcagtgctgcatcaggaaatggtacatatgcatccagtgacggatgcctttataacaaagcaatgaccaggttaatccgttgtccggagggaaaatccggtgcaaaaattgcgaccagtactgtaaccatcggagcaggtgcttttgcaaactgcaagtcggttacttcactgacagttccggattctgttaataccattgaaacagatgcgttcagcggcagcagtatcagtacaattttgattccggcgagtgtaacgtcaatcggaagccagagcagctggagtccatccacaatttccggttattcaggaacacaggcacaggtatatgcaaccggaaatggaatcagtttccagagccttggaggagagaatccacagccgactccggataatggaaataattccaatagcaatggttcaacagatacttccaacagcaacaacggaagtggttccgctactacagtaaccggtggaggcacagcagtgactggcggaaatgtgattggcgcaaccaagtacagcaattccggtaagacagtaacttcaggcagccatgagaaggacagcacaccgaagacaggtgacggtatcaatccggtattcttcttatgcatcggagtattattagtaggtgtttactttgtagtatcaaatcgtaaaaaagctgcataagtgataaaaaataaaagaagtaactaacataagacagtgaaagaacagaaaagttccgacactgtcttttttacgcgagtagcgagaaaaaatctgagagaaaagaaagagccaggcttgcctgagcgaatttcttttctcagcagattttggcgagcaccgcgataactcgagaaatacgcaaagcgtgtttctcgtagtttacgcgagtcggtaaaaatatagttgacaactgaaatgcttatgtatatactttgagttgcaaataatttgataatcaaaatatttgcaactcaaagtattatcaaagaaaagacaaaaaaggagaacaaaataatgttagagaaattagcagaattaatcaaagagcagttaaactatgacggagaggtaaaagcagaatccaatttcaaggatgatttaggagcagattctttagacttgtttgaactggttatgagcatggaagaggaattcggtgtagagattccgtcagaagatttagagaaaatcgcaactgtaggagatgttattgactacttaaaagcaaagggcgttgaggaataaaatatgaaaacaagaatcacagaactgttaggaatagaagagcctgttatccagggcggaatggcatgggttgcagaatatcatctggctgctgcagtatctgaagcaggtggacttggtattatcggtgcagccagtgctccacctgaagtggttcgggagcagattcgcaaggtgaaggaacgcaccagcaaaccatttggtgtaaatgtcatgttgatgaatccgaatgcaccgaaagtggcaaaggtggtagttgaggagcaggttccggttgtcacaacaggagccggaaatccagccaaattcatgagcctctggaaagaagcaggtgttaaagtaattccggtagtagcaagtgtagctatggcaaaactcatggtccgcggtggcgcagatgctgttgtggcagagggaatggaatccggtggccatatcggttccactacaaccatggcattggtgccacaggtggcagatgccattgatgcaccggtgattgcagccggaggaattgcagatggaagaggaatggctgcagcatttatgctgggtgcagaagcagttcagatgggaacaagatttgtggcagccaaagaatctatcgtacatgcaaactataaagagaagctgataaaatccaaagacattgattctgaaataacaggttccagtaccggacatccaatccgtgtcatccgtaataagatgagccgtgagtatctgaagatggaaaaagaaggcgcaacattagatgaattagaacagcttacccttggttccctccgcaaagcagtgatggacggcgatgtggtaaatggaagtctgatggcaggtcagattgccggaatgatacaggatgaattgtcctgtaaggaaattattacttctatcgtatcagaagcagaacgtctgatgaatcggaaataaggagaagaaaatgagtaaggttgtattcatgttccctggacagggagcgcagtatattggaatgggcaaagatttctatgatgcctgtgaagagagtaaagccgtatatgagcttgcttcaaaagtaaccggacttgatattgcaaagctttgttttgaagaaaatgaagaaatcaatattacagagtatacacagattgccatgctgaccacagaggcagcaatttatgcagcattaaagaaagctggaaaagaaccggcagcctgtgcaggattaagccttggagaatacggtgcattgattgcatccggtgtcatgagtatggaagatgcattccgtgtcattcgtgcaagaggaatctttatgcaggaagcagtaccaaccggcggagcaatggcagccgttttaggactggatgcgaaggcaattgaagaagtatgcagcaataccgaaggaattgtatctatagcaaattataactgtccgggacagattgtaattaccggagaagaagcggcagtagaaaaagccggtgcagcattaaaggaagctggagcaaagcgtgtggttccgttaaaagtaagcggaccgttccattccgccatgttgaccggagccggagaaaaattagcagaagtattggaaaatacaaagctgcaggaatttagcattccgtatgtaaccaatgtgacagcagattacgttaccacaacagaaccggtaaaagagctgttaaagaagcaggtatcttcttctgtaagatggcagcagagcatcgagcgtctgatagcagacggttatgatgaattcgtagaaatcggaccgggacatactttatctggatttatgcgtaaaatcaaccgggatgtcaaaacagtaagcattgaaaaactggaggattataaagcttatgttggagaataaagtagcactggtaaccggtgcagccaaagggattggtcgtgccattgcacttcgtttggcagaagataaagcaacggtaattgtaaattacaatggcagtaaagaacgggctgaagaagtggtaaaaatgattaccgatatgggtggcagagcagaatcctatcagtgcaatgtggcagatgacgaggcatgtcagaccatgctcagagatatcataaagaaatacggacatctggatattcttgtaaataatgcaggaattacaagagataatcttgtgatgaagatgaatgatgaagaatttgatgcagtctatgagacaaacttaaagggtgtattccataccattcatcatacatcccactatttcttaaaacagaaaagtggaaggataatcaatatatcatccgtatccggaattaccggaaatgccggccaggcaaattattgtgcagccaaagccggagtcatcggattgactaaaagtgttgcgagagaactttcctcccgcggtattactgcaaatgtagtagcaccgggaatgattgagaccgatatgacaaaggatttaccggatacggtaaaagaaaatatgcttcataacattccacttggaagaatcggaaagccggaagaaattgcggcagcagttgcattcttagcatccgaagaggcaggttatatcacaggacaggtgctggctgtagatggcggaatgactatgtagatgcagaaataatactggctgatgaaaaagctagaaagaacagcggatgacgaatgacgagagatggattgtttagatagagaggataagaacatgaatcgtagagttgtagtaacaggattgggtgcaattaccccgattggaaataatgtgccggaattctggtctgcagtaaagcagcagaaggtaggtattggagagattacacattttgatgcaacagactataaatgtcatcttgcagcagaagtaaaggattttgatgcaaaagaatatatggatttccgctctgcaaagagaatggaagcattctgccagtttgccgtagcggcagccggagaagcgctggaggattccggactttccatggaagcagaggatgcataccgtgtgggtacttccatcagttccggagtcggaagtttacaggcaatcgaaagagagcatagcaaattattggaaaagggaccgggaagagtaaatccgttattcgtcccgatgatgatttccaatatggcagcaggaaatgtatccattcagtttggattaaaaggaaagagcttaaatatcagtaccgcctgtgcatccggaacgaatgccattggtgaagccttccgtaccatccagtatggtgatgcagaagtgatggtagcaggtggaacagaaagctgcattactccgcttggaatagcaggatttacatctttaaccgcacttacttcttcagatgatccaaaacatgcatccattccgtttgataaaaacagaagtggatttgttatgggagaaggtgtcgcaatcgtaattctggaagaattagaacatgcaaaaaaacgtggagcaaagatttatgcagaagtaaccggatatggatgttcttcggatgcataccatattacatctccggcagaggatggtgcaggcgcagcaaccgcaatgataaatgcaatgagggatgccggtgtaaatccggaagaaattacttatatcaatgcccatggaaccagcacccatcataatgacttatttgagacaagagcaatcaagctggcgtttggtgagcatgcaaaggatatccggattaattccaccaaatccatgattggacatcttcttggagcagcaggagccatcgagtgcctgacctgtgtaaaggaaatcgaggaaggttatattcatgcaaccgtaggttatgagacaccggatgaagaactggatctgaattattgcaaagaggcatatgaagaagaagtgccatatgccatcagcaattcactgggctttggcggacataatgcaagtctgcttctgaaaaaatatcaggcataaaggagaagggaacaatgtcagtactgacaacgaaagaaattatggaaatcatcccacatcgtcatccgtttcttctgattgacacgattgaagaactggtgccgggacttcgtgcagtagggaaaaaatgtgttacctttgatgaaccttattttgcaggacattttccgggagaaccggtaatgccgggtgttttaattatagaagcactggcacagaccggcgcggttgcaatgctctgtcaggatgaattcaaaggaaaaaccgcatattttgcaggaatcagcaatgcaaaatttaagaaaaaggtggttccgggggatgtacttgttttagagacagaaatcataaaagtaaagggaccgattggaattggaaaggcaactgcaacagtagatggaaaaatagctgcaacagcagagttgacatttgcgattggaagtggtgagtaaagtgagcagattactggataaaatcaaggaaaatagagctgtaaaggatgccacagaaggtattttacaggaagaaaaaaagaaagaggaagtactttgtaaagcctgtggcaaaatggtaaacaaagcagaggtagtaagaaaccgctatgtctgttatgagtgtggagcatatttccgcgtaaaaaccggaaaccgcctgaagatggtattagacccacagagctttgaagaatggtttgccgaagagcatggaacgaatccgctggattttccgggctatgtcgataagctgacggcagtccgtgagaaaaccggattaaaagaagcagtaaccgtaggaaaaggtaagatttacggagaagatgcagtcattggtgtgtgcgatgccagatttatgatgggaagcatgggccatgcagtcggagagaaaattgcgggggcagtagaacgtgctacggaagaaaaacttcctgttattcttttctgttgttccggcggagccagaatgcaggagggtattgtatccctgatgcagatggcaaagacagcggcagctttaaagaaacattccgatgccggacttttatatatttccgtattaactgacccgacaaccggaggtgtaacagcaagttttgctatgttaggtgatattattttagcagagcctggcgcactgattggatttgccggagcaagagtaattgagcagaccatcggacagaaactgccggagggattccagagagcagagttccagttagagcatggttttgtggatgccattgtagagcggaaagatttaaagaaacgtctgtatgaaatccttcgtatgcataaagtaagtggatatgccaaatttgatccggcaactgaagtagacggaagaccgacagagttgatgcgggaacgcgcttacaatacaaaagaaaagagtgcatgggaaaaggttaagatggcacgtaaggtagaccgtctgtccgcagaggattatatcaacagtatctttaccaaattcatagaatttcatggagaccgttattacagggatgacccggcaattgtgggcggtatcgcataccttgacggacaaccggttacggtaatcggaatccagaagggaaaggacatgaaggactgcatgcgtcataattacggaatgccatctccggaaggataccgtaaagcaatccgcctgatgaagcaggccgaaaaattccatcgtccggttatcacctttgttaatacagccggagcattctgcggtatggaagcagaggaaggcggacagggagaagctattgcaagaaatctttatgaaatgtcagggttgaaagttccggttattacctttatgataggagaaggcggaagtggcggtgcattggcactggcagttggaaatgaagtctgcatgatggagaatgcaacttattccgtactttctccggaaggctttgcatctattctctggaaggatggcaagcgtgccaaagaagcagcagaagtaatgaagataacagcaaaggatcttttagaacttggcattatcgagaaaattataccggagtatggtggagcagatgatgaggcattgagttccattgcagtttatatgcataaatgtatccgcgaatttttagaatcatatgaaggaaaaagcggagaagagattgcaaaagcacgttatgaacgtttccgtaaattttaaaggagcagagcatgaacattcgaatatgtggaactggaagtgcgttaccggaaagaaaaattaccaatgacgatttaagtcagattatggatacttccgatgaatggatttccagcagaacaggaataaaagcaagacaccttgcaacggaagagacaacaacatcacttgccgcagaagctgcaaaaaaagcacttgcagatgcagacatgaagccggaagaagtggaacttatcattgcagcgacggtaacaccggatcatcttgtgccgacactttcctgtgaagtgcagagggaaatcggagcagtgaatgccgtagcctttgaccttggtgcagcatgttccggattcttatttgcattgagtacagcacaggcatatattgccagtggcagatttaaaaatgcactcttaatcggagcagaagtactttctaaaattatggactggaatgaccgcagcacctgtgtcctttttggagatggcgcaggagcagcggtagtccgggcagacgaagaaaatatctgtcatgtggtgcagggctcagacggtgcgaagggactggtactggcatgtgagaaccgtccggtcaataatccatatcataagatggaaagtccgctgggttatgtaagcatgaatggacaggaggtttataaatttgctgtccgcacagttccggcaaccattacaaaggtgctggaagagacggatttagaggcagaggaaatttcacttttcgtattacatcaggcaaacttaagaattattgaagcggtagcaaaacgattgaaacagccgatggagaaattcccggtaaatttgacggaatgtggcaatatttcggcagcaagtgtgccgattttacttgataatatcaaccggcatggtatgatacatagaggagataaagttgtactggctggtttcggcggcggactcacatggggcgcagcggtactggcctggtaaaaggagataagaatgaatgcggataaaaccttaaatgacattctggtaaagctgtttaatgatttgatggaaattgaggaaaaatgcttaatctccggagaattcatgaacatttccggaaatgatatgcatattattgaagcaattggtctggatgaaccaaagcggatgtcggaagtggcggcgaagatgaatgttacaacaggaaccctgacaaaagcaattgaagcactggaacagaaaggttatgtaaaccgttgcagaaatgacagggataaaagggtggtccgtgtatcactcaccgattccggagtccgggcatatgagcatcatgcacgttttcacagcaatatgatacatgatatcaaggagagcctgactgaccaggagagtgagattctgattggaacactgggaaaactggtgaagttcttccagaagaaatatgaatcatatttgaaaaataaaaaatagtatatttatacaaaaaaagaagtggagaatggaaataaaaaactgttttctacttctttttaattataaaaatgaatttttttggtacaaaacttgcaaaaaagaagaaaaagtacacaaaagtataaagtttttgacacaaatatgaaaaaaacgttgcgaaaaaattcatttcatactaaaatagtagtgttgatgtatatataatactcaaattaatatgtaaaggagatataatatgagctacgttgatgaagtattagaaagagtaaaagcaaaaaacgcttctgagccagaattccttcaggcagtagaagaagtactggagtctttaagaccggtaatcgaagcaaatgaggagaaatatcgtaaagaagcattacttgagagaataaccgagccggatagacagcttaaattccgtgtaccttgggtagatgacaagggacaggttcaggttaatacaggatacagagtacagttcaacaattctattggaccgtacaagggaggtcttcgtctccatccttccgtaaatatcggaatcatcaaattcttaggatttgagcaggtatttaaaaactctttaacaggacttccaatcggcggtggtaaaggtggttctgactttgatcctaagggaaaatcagaccgtgaagtaatggcattctgccagagctttatgaccgagctttgcaaatatattggcgctgacgttgacgttccggcaggagatatcggaacaggcgcaagagaaatcggatacatgtttggacagtataagagaatccgtggaatgtacgaaggtgttctgacaggtaagggacttacctatggtggatctttagctcgtacagaagctaccggatatggtcttttatacattacagaagaattaatgaaatgccatggtgaatctatggaaggtaagacagttgttgtatctggtgctggtaacgttgcaatctacgctatccagaaagcgcagcagatgggtgcaaaagttgttacctgttctgattctaccggatggatttatgatccggaaggaatcgatgttgcattattaaaagaagtaaaagaagtaaaacgtgctcgtcttactgagtatgctgctgcaagaaagagtgcagaatatcatgaaggccgtggtgtatggcagattaaatgtgatatcgctcttccatgtgctacacagaacgagctccttatcgatgatgcaaaacagttagtagcaaacggatgtaaagcagtttgtgaaggtgctaacatgcctacaaccttagatgcaaccaaatacttacaggataacggagtatggtttatctgtggtaaagcttctaacgcaggtggagttgcaacttctgcattagagatgagccagaactcagagcgtttaagctggacattcgaagaagtagatgctaagttaaaacagattatggtaaatatctatcataacattgatgatgctgcaaaacgttacaacatggaaggtaactatgtagcaggagctaacatcgcaggcttcgaaaaagtagctgaggcgatgttagctcagggtgtttgctaggcattgaacacttagagaacgcgagccataggcgaagcgtgaacttagtgtgaaagcccatcccgagacttgatgaaaacgagtcgcagacgaagtttgaatcctagccgagtggatgtcattgaacacttagataacgcagatgtcattgaacacatagaaaacatccccgaaacgttatgtttcggggactttttaatttacacgagaaactcgcaaagcatttccggtggaatttctttcctgtttggagtataatagaacgaacaacgggaaggaaagagaccggaggcaatttagatgcagaaaaaagaaagaaatgaagaattagaatatatagatgactttgagaatatcgaagaaccggaagagtcagaggacaaccgggaagaattagaagaaccagaagaggaatattcagaaggcggcagacgcaggaagaaaggaagaaaatccgatacaaagaatgcagcttctgtggcaggggaatttctaagctgggtaattacgattgtagcagcggtgctgattgctatgtttttaaatcgttttgtgttaattaatgcagagattccatccggttccatggaaaatacaatcatgaccggagataagctgattggattccgatggtcatatctgttttccggaccggagcggggagacatcattatctttaagtttccggatgatgagagccagaactatgtaaaacgtgtcattggctgtccgggagatacggtaaagatagaaggtggcaaagtatatgtcaacggagaactcttagaggaggattatctcaaagagacatggacggtagctacaggaccgtatacctttgaagtgccggaggacagctattttgtaatgggagataaccggaataactcctatgatggaagatactggaccaatacctatgtgaagaaaagtaaaatacttggaaaagcgattttccgatattggccactgaagaattttaaaatattgaattagtgcgaaacgaataagggagcaaaaggagaagatttatgataacattattagcccggatatttatccgggaagatgacaagccggagaaggtacggctttcctacggtattttatgtggtattgtaggtattttgctaaatgtattattatttacaggaaaatttattgcgggaaccatcagtaaatccattgcaattacagcggacgcatttaataacctgtcggatgccggctcatccattgtaacattgctgggctttaaactgggagcagcaaagccggatccggagcatccatttggacatggaagaatggaatacgtttccgggcttgtggttgctgcagttattttaattatggcagtggaactgatacaggattccatcagaaagattcttcatccggaagcaacggaatgctctgcattaattatcgtgattctgctgatatcgattgctgtaaagctgtatatgaccttctacaacaggagagtcgcaaagaagattaattcagcggctatgcgggcaacggccatggacagcttaagcgacagcattaccacatctgtggttttaatcaccacattgattgcagaatttacgtcagtcaatattgacggctactgtggtgtggcggtaggactgtttatcttatatggtggaattaatgcagcgaaggagactttaaatccactgctgggacagccgccggaggaagaattcgtaaaagagatagaacatctggtgctggaagaaaaaatgatcattggtattcatgatttagtcgtacatgattatggaccgggacgtttgatggtatcactacatgcggaagtgccggcagaaatgaatattcttgtaatacatgatatgatagacaatgtagaaatgaaattgaaaagggaactgaattgtgaggctgtcatacatatggacccggtgattaccggaagcaaggaactgaccgagataaaagaaacggttacaggtattttaaaggatattgatgaggtcattaccatgcatgatttccgtatggttcagggaccgacccataccaatcttatctttgatgtagtgattccatttggctaccgttccagtgatgaagcagtgttaaaagaactggagcatcaggtaaaagaaaagctgggcgaacagtatcatatcgtggtcaacgtagataaaaattatgtgaaataaaagaaataacaaagccccgatgggagaaatctgatagaagaattcatcccatcggggctttctgtgtattattttaattctgtgtcagtggagtattgactgtatgctctacagactggtcagttgctgtaccggcaccacttaaagactgttcagaggactgctcagtggatttctcagtggtctgggtagaaccttctgtatcagtagaaggctgctccgtttcggttgtctgttcttcggtatcttctatatctggatcctcatagaggaactcgttggaacttcggaagatggtactgctggaacctacaatgttagcaacaatagtatcgccgtcttcaatgtcatccagattaatctttaacatggtgcttcctaagaaggaagtggataccttctctccgttgacataaattttcgtccaaggagtaaatccggagccgtaaatacataacttattgtcatcggatttccatacactgttaatcgttacatcatcaatacccataaccagatcacttgctggatatttatctgttccgttgtaagcataacgttttccgtaaagaaggtcatactgtaaattctctaagttctcgtcgtaagaagcagaacccttctggctctggatgtaagagaacatggttcctttgtggatgtcaagctggttggtgatgtttgccaataattcataagcagcacagtcagcatcctgttttggtaaattaaagttgttccaggtaacatatttggttttgaaaatgtcaccggataccatatcatcatcggtcagtcccatggtaggaaggtggtcgccgaagaataccacgatggtcttttcatcccgtttggaaagctcttcggttaagttgccgatgaatttatctacttcgtgaatcatgttaatgtaatattcccaccgattgttagaagcctcatctgcagcaccgcttactgcaatttccggattttcaagaatcttttcagtaggataatcaccatgtccctgtacggtaatggtatataccagatctgactggtcaggggtagaatccatagcctttaaggtttcactgattaagatgttatcggttggccaggaaccaagtggtgtgtactcctgaatgttcatacactctttactggtgaaactgtcaaatcccatcagggagaaggcattggcacggctgtagaagttaccaccgttgttatgtacaacatgtgtaccatagccgagacttccaaggtcggaagcaatactttcgcaactgtcgatttcttttaaagtagtcttatatgggtattcgccggtaccaaaatactgcatgctcataccggttaatacttcaaattcagtattggctgttccggcacctacaacaggaacttttaagtaaccggaagaatagttgtttaataagttgtgaaaatttggaaccggatcttctgaagtctgtaagaacttaacatcagagggatctacaaaggattccagtaaaacaacaataatatttggcgtatcttcggcagcttcggtagtttcttccggaacggaagcccctattttggcaatacgctcttcggaataactgtccggtttactcataccacggtcaacaacgctggatgagaagccgtagacaaaaccataattttcatagccctgtgcaatattggcaaaataggaagcaacaatattattggactgggctgccttggtagttaccggtaacatcaggaagataacagcaaccataagcggacttacaatccagttgattttgccctgatattttggtcctttgataaaaagccagatacagaaaagcaggaaaagaccgactacgataataacggcgagtgcttcaccaaaggtaaagtatttggtgttctgcatggcaaataagtcagacagacatttcaaatctgtaaaaccaaatggagttacacgtttggaaagaataacaccattgatggttccaaggaaaagccagaagccgctgattaagagacgggcaagtgttcttcttcgaatcagatagaccagggataaacttgcaaaaataataaatgagttataaaggtaagcaatggtgtgtcctgcaataaaggaaaatgcagaaagcacatttcgtctggaaatacattcaatcaccagaacgaggaaacaggacagtaacagatggaataccaaagagtatttgttcataatcacaactgcacggtcaaggtgtggatgtggtttcttctcccggttcttaaaagtatttattttgttttttagtttaaaaaataagttcttacacttacttgaaaaagaatgtttttctctcataataatggttctcctcccagtagattacacactttttacatataatttacttttgactgaataaggatatatctatttaagaaaaaaaacaacggtaaatctcgataaaaatttattaatatttcattaaaaagaatccaaaatgtataatagaagggaaagaagttggcaaataagccattttgtgctatcctttttttataaaaaccaggttcgcagagaggcagataggtgaatctgacagtaaggtgaggaaagagaaatgctggaattaaaagacattagttttcaggtaaatgatgaaacagcagacaaggaaatattaaaaaatatcaatctgaagatagaagaccggtttgtggcaattaccggaccaaacggtggaggtaaatccacgctggcgaagctgattgccggaatagtaacaccaacttccggacagattttattggatggagaggatattacaggattatccattaccgaacgggcaagaaagggaatcagctttgcgtttcagcagccggtaagatttaagggattgaccgtaaaggatttgattacactggcatcgggaaaagatatttccatcagccaggcatgttcctatctttcagaagtaggactttgcgcaaaggattatattggcagggaggtaaatgacagcctttccggtggggagctaaagcgtattgagattgcaatgataattgcaagaggaaccaaattatccatatttgatgagccggaggcaggaattgacctttggagttttaacaatctgattcaggtatttgagaatatgtatcagaaaatcaatggctcgattctgattatttcacatcaggagagaatcttaaacattgcagaccggattattgtaattgcagatggagaagtaagcgcagccggaagccgggaagaagtgcttccaaagctgttaggcagcagtgaagcctgctctactttgatggaaaaattagtctaggaaaaggtgagaaaatggacagtatagaaaagaatcttttagcagagatatcagatttgcacagcgtgccggaaggcgcatataacatccgcaacaacggaaaactggaggcaagaaatacaactgcaaatattgatattgtaactaagaaggacaagccgggaattgatatctatgtaaaaccgggaacaaagaatgagagtatgcatattccggttatcttaagtgaaagcggcttaaaggacctggtgtataatgatttttatatcggggaaggtgcagatgtgacaatcattgcgggatgcggtatccacaactgcggagaccagacatcacagcatgatggaatacacaccttttatataggaaagaatgcaaaagtaaaatatgtagaaaagcattatggtgaaggggatggaaatggagccagagtcttaaatccaactaccgtgatccacatggaagaaggcggattcatggatatggacagtgttcagattaaaggagtagactccacaatccgtacaaccgaagcagaccttaaagaagatgcgtcccttgtgattcatgaacgtattatgactcatggacagcagaaggcagagacagattttacggtagatttaaatggagcacattccagtgcaaatgtggtatctcgttcggtagcaaagggagattcccaccagaagtttgtttcttatattcgtggtaataatgcatgcagcggacatacagaatgtgatgccatcatcatggacaatggaaaggtggaggcaattccgtctcttgcagcaaatgatatcgatgcagcattgattcatgaggcagcaattggaaaaatagcaggagaacagctgattaagctgatgacactgggactgtctgaaaaagaggcagaggagcagattgtaaatggatttctgaaataggatatgtatggggaatgaagggtgcaggaaagaacaaacaagagaagagaaataccgaaagaggcggaagaatggaataagataatatttgaaacattatgacgggtatggatattaagtgaagtggcatctgtatttgaacgatgcaaaagtgggtggtaaaaataaagtctgttgcagtgcagattaagacagaattttcccgggataatagaaaagaggaataaatatgtggcttgcatatgcatgtggctctgctttttttgcaggtattacggcaatattggcaaaagttggaattaagaaaatagactcgaatcttgcaacagcaatccggacgattgtagtattgatttttgcatggattatggtacggcttaccggatcttatactccaatcggaagtataggaacgcggacgttaatttatcttacattatccggaatagcaaccggggcatcctggctttgctattttcgggcattgcagctaggagatgtaaataaagtaacaccgattgataaatccagtacaatcctgacgatgattctggcagtcattttcttaaatgaaggactgaacgagaagaaaatcattgccatggtattgattggcgttggaacgatgcttatgattaccagaaagaaaagcagtggcacaaagagccgggcgtggcttatctatgcactgctgtcggcagtatttgccagtctgacgtccatccttgctaaggtgggaatagatggtgtgaattccaatcttggaacggcatatcgtactggagtggtacttgttatggcatgggtggtagtatttgtaacaaagaaacagaaacaggtccggagtatgaccttccgggatggaatgtttctgattttatccggaatagcaaccggagcatcctggctttgttattaccgggcgctgcagctgggcgaagccagcgtagtggtgccgattgataaactaagcattgtagttacaattgtattttcatctgtgtttttaaatgaaagactacagccaaaggcattctttggattacttatgatagtgggaggtacattactgctaatataagcaaaagcggaggaaaaagtatgctgggaaaaagaaaatcttattatgtggagaatggaatcattcattttgcatttgaatatggcaagggaagtttagaggttctgacagataacattgtaaatgtgtttgttccgtttgaatgtgaggaacatcgttcaaaagccatcgagggagaaaagtcaaagcatatacattttgatgtgcaggaaggaattgactatcttgaggttcggactgcaaaattaattatacgcatatatgataattttatggtggacttttatgatacaagagggcaacttctctgtgcggactatcgtggtggaagggaatttgtaacacagattagtgagaaatttatcgaattcttaaaagcagagggacatgaggtgccgcaggcaacagataagaat

SEQ ID NO: 1099 - DNA, 8278 bp, unidentified
  source 1..8278: mol_type = unassigned DNA
tcacttttttgcgccgaacaggcggcgggccgtcacgaaggggccgccgcgggtcggcttgcagagatagacctgccggtagctgcttttgagggcggccacggccttgcgtgcggcgtcctgcctgtcaaagatgccaaagacggccgcaccgctgccggtcatctgggctgtcacggcaccatgcgcccgcagcgttttgcagatggcgggtgtttcgtccgcaccggagcaatgctcgagcgcattgccagccgccgcgcagacgccgggcaggtcgtttttgcggatggcctgctcctgtgcctcgcagtcagggtggacagggctgcccattgtgtcatagcgggcaaaggcttcgggggtggaaacgcccacgctgggcatcgccaccacgaaccagcagtccgggcagggcggcagggctttcatcagatcgcccacgccccgcacacggcaggtgccgcccatcagggcaaacggcacatcagccccgatgcccgcaccgatggcgcacagctcactcatcgaaagctttgcgccgtacagctcattcagaccgaccagcaccccggcggcatcggcactgccgccggccatgccagcccgcaccggtacccgcttgtagatcgtcatatccacgcccgccagcagaccggtataggcaaagaaagccagcgccgccttgacagcggtgtttttatcgttggccggcacaaagctgccgggcagatgcagcgtcaggtcatggctgcggcgcagcgtgattttttcatataggtcgatggtctgcatgaccatatccagatcatggtagccgttgggcagcgtgcccacgacatccagcgacagattcagcttggccggggccagcaccgtcacagaacggtattgcataggggtcactctcctgttatttgctctgcggatggcagggttacttcgtccagccgttctcgctcaaaaattcgcggatgcgcttcattgcgatctgcagatgatccacgctgtaggcatagctgatgcgggcgtacccctcgccggaggcgccgaacgccgagccggggataatggcaacctctttttcacgcagcagccgctcgcagaattcactgctcgtcaggccgctgatctggatcgaggggaacacatagaacgcgccgcgcggctcaaagcaggtcaggcccatatcgttgagcgccttgaccacataacggcggcggcggttgtactcgtcccgcatcatctcgatctggtcatcacactggcgcagcgccgtgaccgccgcatactggctggtggtcggggctgacatgatgcagctctggtggatcttggtcataaccttgatgagcggcgcggggcctgcggcatagccgaggcgccagccggtcatggcgtaggatttggagaagccgttgacgacaacggtgcgctcggccatgccgggcagcgatgcaatggacacatggcggtcgaggccgtaggtcagctcagaataaatttcatccgacagcaccagcaccttcgactcgcgcaggacggcggcgatctcctccatctcgtcggcgctcatgacggcaccggtggggttgttgggatacgggaagatcagcagctttgtccgcggcgtgatggccgcccgcagctggtcggcagtcaggcggaactgatcctcggcgcgggtagcaatatgcaccggcacaccgccggtcagctgggtgatcggctcatagcagacaaagcatggctcgggaatgatgacctcgtccccgggctggaccaccgcgcggatgatcaggtcgatggcctcactgccgccgaccgtgacaaggacattttcctctttatagtgcaggtcaaagcggcggccaaggtagctgcagatctcattgcgcagctccttcaggccggcgttggctgtgtatttggtgcggcccagctcaaggctgcggatgcctgcatcgcggacgctccacggcgttttaaagtccggctcgccaacgcccagagagatgcagtgcggcatttcagccgccagatcaaagaacctgcggatgccggacgggcgcattgccttggcggcaggggcaagcagttcatcgtagttcatcacaggacggtacactctctttcatcgggttcttcggccagatacagccggccaccgcgcttgtaggggcgcagcacaaagctggtggcggtggagagcacatcgtccagcggagagaggcgcttggccacgaagatcgcaatttcctgaaagctgcggcccttgatgatgacctgcaggtcgtagctgccgctcatcagcagcacggtatccacctcgtcaaactgggcgatggtcataccgatgtcgtcaaagccacgggccttgtggggggtcacacgcagctcaatgacagcctccaccagattgacgccggcctgttcccagtccaccagcgtttcatacccgcggatgtagcccttggcggcggcctcgtccatcatggcggcgatctcctcgggggtcttatccagcatcgccgcgatgtcctcgatcggcatgcgggcgttcttttccagaatacggagcaattcttccatagtaccacacctcactcaagtatatgcagctattatagcatattcgcggcaggattgcaccattgttttttgcggcaaagccctgccgcacacaaaaaaagcagcacccccgtgccttacacagggatgctgctctgttttttgtcagccctcggcaggctgttcatctgccgtctggggttcctccggctctgcgggctgttccggctctgcagactccggcgcaggctctgcagccgcttcgggtgcctcggctgtgcccagttcctcgttctgcatgttatccacaacggcatcggtcggcgcaggggtgggtgtgacctccacctgcatctcactctcctgcagggcggtcagataccactggcggttctccccgcgggtaaagacataatccatatacttcgtcggctcggtgggggctgtcagcgaaagctcaccggtggcgttgttcgtggcggtgggcacatagccgaccgtgacgatgcgcttgccgtcccggcggctgatcttctcgaccgtcggcgtatactgcgccacagagctggtgaccggcaccagataggcctgcttttcctcatcatactgatagacgaattcctcggtgctgaaggtcccctccggcaccttatactcagggccgagaaggttggcgatgtaggtatcgacctccagcgcggggatcatggccgaaccggtatcggggtcacgttcatactggtcaaggctgccgccgctgttctgcacctgatagacggtgccccagatggcggcctgcttgaatacgccggggtcaacgctgttcacatcgtcaaacgccacggggtccagcatgaccatgccgtacaggcggtcacggtacgccttgcgcaggccgctgtcgtccagcgccgagcgcacaagccctacgatccagcccagcacggtaaacaggccgatgagcgccagcagcagcgccacactgcccacgacctgccgtgccagacgacggttattgcgaatatgttcttctctgtaatttgccattgtggatgtgttgctcctttgggggattgaaaagcggtgcggcgggcttattacttattcttgtacatctgctcgtagtatttctggtaatcaccgctggtgacatgcgccatccagtcggggtgtgccagataccagtcgatggtcagcacaatgcccttctcgaacggggtctcggggtaccagcccagatcctccttgatcttggtcgggtcgatgccgtagcggcggtcatggccgagacggtcagcgacgtgggtgatcagctcctcgctgataccctcgtccttcaggcggtcatgcaactgggcaatgacggtcttgacgatgaagatgttggggcgctcgttatggccgcccacattgtagacctcgccgtccttgcccccctgggcaaccatgtcgatggccttgcagtgatccatgacatacagccagtcgcggatctgcatgccgtcaccgtagacgggcagcgtcttatgctgcttggcattgttgatgagcagcgggatcagcttctcggggaactgataggggccgtagttgttggagcagcgggtgatgttcatcggcatgccgtaagtgtcgtggaacgccttgacgaacatatccgcgctggccttggaggcagagtaggggctgtgcgggcacagcggggtggtctccataaagtagccctcggcacccagtgcgccgtagacctcatcggtggagacctgcagatacttcttgccttccttccaagtcttagcggcggcatcataccatgcgtccttgcagcactgcagcaggttcacggtgcccagcacattgctctcgacaaagatctcggggtttttgatgctgcggtcaacatggctttcggctgcaaagttgatgacataatccggatcgtacttggcgatcaggtcggtgacgagtgccttgtcgcagatgtcaccctgcacaaagatgtgacgggcgtcatcctcgatgtcctgcaggttctcgaggttgccggcataggtcagcttgtcgagattgatgaggcggatgtcctcatacttttccagcatatagtggacaaagttcgagccgataaagccggcacagccggttacgagataagtcttcatatatcaaagttctccattccagtttgcaaaaaagtccttgagggcgtcctgccagtcgcgcatctcatcgccgaccgtgcagcgcagcatacggttttcgagcgcgctccacgccgggcggttggcgctggccgggttggcggccgcgtactcggcgctggtgacaggctcgacccggcaggaaagccctgccccctgcatgatggcgcaggcaaagtcataccagctgcagatgccgttgccggtgcagtggtagatgccgtaatcgtggctgacggccagcttcaaaatatggtaggccaaatcaacggcgttcgtcgggttgcccagctggtcattgacaacggtgattttatcgtgggtctgacccagacggaccattgtcttgacgaagtttttgccgtaggcactgtagagccatgccgtgcgcacgatgaagtgccggcggcagaaccgctcaacatactgctcgcccagcagcttggtctggccgtaggccgagatgggtgcaggcacggcgcactcgtccagtgccacaccgccgttggcggtgccggggaacacatagtcggtcgaaacatggatcagccgtgcgccgattttctcgcaggcgagcgccagattgcgcgggccgagggcgttgactctgaacgccgcatcgcgggcggtctcgcaaccgtccacattcgtgaaggctgcgcagttgatgaccgtatccggctggtggcggcggatatagttgatggtggcctcgcggtcggtgatgtccagctcatcgacatccaccgggataacggtggccttgcgcagacgctcgggcagggggccgatggtgcagccctcctccgcaagctggcgctgcagctcagtgcccagctgaccacggcagccggtaatcaaaattttcatagattctctcccccgctccgatcaatactgcagcttgtcgtctgcgacattcttcaggtgctgaccgtaggggctcttgccgtagcgggctgcgctctcaagcagcttttccttggtgatccagccgtacttgtaggcgatctcctcgggggccgagatcttgatgccctgacgctgctcgatggtctgcacaaaggtagcagcctccacaagggagtccatcgtgccggtgtcaagccatgcatagccgcggccgagcagctggacatccagcttgccctgctccagatacatctggttcagggtggtgatctccagctcaccgcgagcgctgggcttgacctgcttggccatctttacgacctcattattgtagaagtaaaggccggtgacagcgtagttgctcttggggttggcgggcttttcctcaatgtcggtggcgtggccgtccttgtcaaaggccacaacgccgaagcgctcggggtcgttgacatagtagccgaaaacggtgctgcgccctgctgcggcgttggcagcagcggccttcagccgcttggagaagccggcgccgtagaagatgttgtcgcccagaaccatcgcgcagcagtcatcgccgatgaactcctcgcccagaataaaggcctgtgccagaccgtccggactgggctggaccttgtactgcaggtgcaggccgtactggctgccgtcacccagcagcgcctcaaagcgcggcgtgtccgtgggggtggaaatgatcagaatgtcctggatgcccgccagcatcagcgtagacagcggatagtagatcatcggcttgtcatagacgggcagcagctgcttggatgtgaccattgtcagcgggtaaagtcgggtgccggcgccgccggccaggataatacctttcatcgtttacaactccttattttattggtgcagtgcgcgccgcccatcccatcggggcataatctcacacaatacgattaaagtcattatacagcatttaagggccacacgcaagggggaaattctctcacccgccccgcattttttgacacgccggccggcataaccgcacccggcgcgcccctgcaaaagcggttctccgcccgcctttcgcctcaaattgtttccgttttgttacgatttctttgcagcgtcttgacgtaacgccccggctgtgctacaatacagaaagtataaatcacgatagcacgttgctgcatcgtttccaatagaagttaaagactgaaattaaggaggcgttttctcgatgaaacgctttttttgtgcggccttttttattgccgtcattaccttgctggccgcctgcggcgctttgaacaccactaccgccgccgcgcaggccaccgcaaccccgaccagttctacctcccgcacccaaaaaacaccgtccaccgttaaggtgaacgagaccgccgccaaggtggaggtcgtcacggcccagagcagcgccacaccggagtccacgacctccgctgcagccgagaccccggccaccggggattttcccgtgatgtatctcatcggcgtggtcgggcttatcctgatttgctccgccggtcttttgatgctgcgcaaaatttgagttctgaacgccctgcggggcgttttttgtttttattttgcagagtaccattacaaattgccaaaccggaaaggagtcccccgctgtgcccaaacgctaccgcaagctgcgcggggaaaccgcgtactacccctttgccgcccgcaccgggctgcgggcgcgccagcgccgccatgcgcgggcgctgcgcaccgccggtgccgccgcgctgattctggccgccgtgctggccctgcggcagggtgttttccgcggcggccagcctgatgcacccgccccgctgcccagcgcagcccccgccgtcaccgctgcaccgggggccgcccatgtgagagttcagccgctggctgccacgcgggacgcattggccgagacccagcaggccgacacgcaggcccacacaacgccggaaagcgccgcccagccccctgccgcccgcacggctgaggtcctgccccgctaccgcagcctttatgagcagaaccccgatctcatcggctggctgcgcatcgacggcaccggcattgacctgcccgtggtgcagacccccggcgacaacgaatactacctgcggcgcggctttgaccggttttatgccgtgggcggcacgctgtttctggacgagcgctgctcggtggagccggacgcccccaccgacaactggctcatctacggccacaatatgcgggacgggtcgatgttcggccagctggtgcgctaccgggacgaggccttctggcaagcccacccgacctttacctttgacacgctgtacgagagcgccacctggcaggtcgcagccgtgctggacaccgcgctgggcgcagacgaactgccctactacaccttttttgacgccgacaataagctggactggcagcgccgtgtagccgccatcaccgaaaaatcgttgtatgacaccggcgtcaccccggcgtacggcacccagctgctgacgctttcgacctgcggggatacccgcatcggcaccgatgcccgctttgccctgctggccgtccgggtagggtga

SEQ ID NO: 1100 - DNA, 14196 bp, unidentified
  source 1..14196: mol_type = unassigned DNA
tcagctgtccatatcctcaaaggcctcaaggcccttcttcgcttcggccttggtgtcaccgtggcgcacaaagcacattgttacaaagctcagcgccacaaaggctgcggcgtaggggaagagtacgcggtagtcgatggcgcgcatcaggctgcccgcgacaatgggtgtcacgacctgcgcggccatcgagaaggtgtaataatacccggtaaacttgccgatgtcactgccgcggcacatctccacgaccatcggcagcgaattgacattgatggctgcccaggcaaggccgaccagcgcaaacaccacatacatgatgggctggatggaggaatagacggtcgtcagcagatagccgagcataaagcaggtggccagcagcacaatgccgcactggatcgtgcgcttgcggccgatcttggcggccagcgcgccgataggaatgtaggaaacgatggcacctgccgtggcaaccagcaggcaggtggacgcaccgcccagaccctcgcccatgacagcctcgacatatttggtaaaccaggttgtaacgccgttatagccgataaaccacagcgagatcgagatcagcaggaaggtcaggctgcgcttgaccggcgcgggcagcacctcatggccctgcccgtcatcggcagcaaggttccattcggggtgggctgcctccagcctttggttttcggcctcgagcttaggctccttgatggtcaggcagaggatcaaaacagccgtgaccatgataagcgaaacgatgaggaagagcggacggtagctgacatgcgccagcccgtggggcttggaggcggggtacagcactgccgcaagccctagatagaggatgccgcccacggcgcccatcagattgatgatggcattggcgcggctgcgcagcggcttgggggtaacatcgggcatcagcgccacagcgggggaacggtaggtgcccatcgccaccagcagcagacccagcaccacgatgaagagcaccagtatggccgggctggggttggcggcatagcggtcatccaacaggggaatcaggttcatcagcacagctgcggcggctgtgccgcccacgatgaacggcatgcgccgcccgattctggtgtgggtcttgtcggacagggcaccaaagaacggcagcaggaacagcgccagtacattgtccgccgccatgatggcaccggcgaaggtctcgttcagtttaaaggtgtcggtcaggatcagggtcataacgctgtcgtacatctgccagaaggtacagatcgacaaaaacgcaaggcccaccagaatggtgcggcggttgttcagcttcacggcaattctccttacttgcggggggataatccgccccatactgtcacctattgtaacactgtttgcatgtattgtctataaatttataaactttacagaagaatttgctcaaaaatgccgaaagtcagccgtttgctgtccgctctgcgtgggcacagtgttactctctgctgccgagccggtatttgaaatcctcatacccgaaggccgcgatactgtgcacagagccgtccgcacagcggcggaggatggctggcagcggcataccgttgaaggtgttgtttttgcaggtcgtgtagatggccatatcgccgaataccagcaggtcatccgcgcggggggcggtgtcaaagctgtaatcgccgatgacatccccggccagacaggtcggcccggcaaggcgtaccgtgcagggcttttcaccgggttcctctgcgcccagcagcggcgggcggtagggcatctcaatgacatccggcatatggcaggcggcgctggcatccagaatggctacggtggtatcgccgtttttcactacatccagcacgcgggtcagcaggtaaccggcattcagcgcacaggcctcacccggctccagatagaccgtcacgccccacgcattctgtgcgcgggcgatgcagtgttccagcgtggtaatgtcgtagccggggcgggtgatgtgatgtccgccgccgaagttgagccattgcatgttgggcagcagatcgccgaatttttccgccacggagtccagcgtcacggccagtgcatcggcgtcctgctcgcagagagtgtggaagtgcagtccgtccaaaagctgcggcaggctggggtcctgcgacacggcggcatcccacgctgcgcgggtcgtaccaaggcggctgccgggcgcgcaggggtcatagatcgcgtggccgtcctgcgtggagcattcggggttgatgcgcagccctacgcttttgcccgccgccttgacctttgcaccgaattgtgccagctgtgcaggggagttaaagacgatatggtcggcatagcgcagcagctcgtccatctcgtccgcgcggtaggcggcgcagaatacatggacttctttgccgggcatctcctcggcacccagccgtgcctcaaacaggccgctggcctcggtgccagccaagtgcggcgtcagcaggggatacaggtcatagttgctgaacgccttttgcgccagcagcaccctgcagccggtgcgctgtgccagcccgcccagaatctccgcgttgcgggtcagggcggcctcgtccagcaggtagcagggcgttggcagggcggtaaattccggcggcaccgtgccgccgatggccgcaaacggcggccgtgcatcgtgcagtgccatcagtccaccagaaccgggttgtggttctcgctgcggggcaggccgtacttgtccagtgcgtcgaggaacggatcggggttgaactcctcgaccgtgtagacgccgggcttgacccactcgccggtcagcatcatcagggcaccgcacattgcaggcacaccggttgtgtagctgatggcctgactgccgacctcgcggtagcactcctgatggtcgcagatattatagatgtagtaggtcttgtccttgccgtcctttttgccggtgaagatgcagccgatgttcgtcttgcccttcgtgcgggggccgaggctggcgggatcgggcagcagtgccttcaggaactggatggggacgatctcctgaccattgtagttgatgggtgtggtggagagcatgcccacatcctcaaggcagcgcatgtggtcaaggtagctctggccgaaggtcatgaagaaacggatgcgcttgacgccgggcaggttcttgcccaaagactcgatctcctcatggtgcagcaggtacatatccttctggccgacctgatcaaagttgtactcgcgcttgatgctcatagccgggatctcgacccacttgccgttctccatgtagctgccgggggcagagacctcgcgcaggttgatttcggggttgaagttggtggcaaaggcgtagccgtggtcaccgccgttgcagtccagaatgtcgatcgtgtcgatggaatcgaactcatgcttggcagcgtaggcgcagtaggcctgggttacgcccgggtcaaagccgcagcccagcagggcggtcaggccggcgtcctcaaactttttcttgtaggcccactgccagctgtagtcaaagtaggcggagaagccggcctccttgcagcgcttctcgtagatggcgcgccattccggatcatcagtgttttccggctcgtagttggcggtatccatgtagttgacgccgcaggcaaggcaggcgtccatgatggtcagatcctgatacggcagggcaatgttcatgacaaggtcaggcttgtaggcgttgatgaggtcgcagagctgctgcacatcatcggcatcgacctgcgcggtggtgattttggtctgggtgtgcggggccagcttggcggcgagggcatcgcacttagacttggtgcggctggcgatgcacagctcggtgaaaacatcgctgacctggcagcacttggagatggcgacagatgcaacgccgccgcagccgataacaagaactttgctcatgatgggactcctttgcattttttattgtatgatgtgtatgggtattttgtaggggcgaacattgttcgcccgtgcctgtttaaggcagcggcaactttcgcggtcggatatggaatccgcccctacatccgctcccccgataaggttgagaatgtagggaggggtcttgacccctccgcggtgcgtcgaggacgccgccccctacagggatggctgcttacttttccagcgccagcagtaactctcttagcaccttgcaggccgtggcggtcgaaacgccgctctggtcaagcatgggggccagctcgttgacatccgcgccgatgatgtttgcctttgtcacggtgcggattgcctgtaacagctgcagaaagcttacgccgcccgcctcgggtgtgccggtgccggggaacgccgaggggtcaaggcagtcgaggtcaatggtcaggtagaccggcacgcgcgtctggcacagccagtcggtcagctcggccagaccggtgaaatcgaaccggtgcatatcggtgtggagggccgcgaactgaaattcctcccgctcgccgctgcggatgcagaactggtggatgcgcccgtcaccgatcagatcatggcagcggcgcagcacgcaggcgtggctcagctgcgcgccgaggtaatcatcccgcaggtctgcgtgggcgtcaaaatggacgatgtgcagatcgggatatttgcgcacggctgcgcgcacggcacccagagtcacaagatgctcaccgccgagcagcagcggcagcttgccgtcccgcaggatctccgccgcgcgggattcaatgtccacaagggcactctcgcttgagccgaaacacagctccagatcgccgctgtcaaacacattgccgtctgtcaggtccttgtcctgataggggctgtaggtctccagaccgtagctttcgtgccgcatggcggcggggccgaaccgcgcgccggggcggtagctggtggtggaatcaaacggtgcgccgtacaaaacaatgcttgccgtgcggtagctgctgtcgcagccgatgaaattttcaacattgcgatgcagcatcagtgttcctccacttcgcgcagcatttcctccagaaacgccggcaggtaaaatgcaccgacatgcagccgggtcgtgtaatagcgggtgcgcatgttcagtgcattccacgcatcggcgtccatatcgttgatgggatgatattttttgctggcaaagccgaacagccagtagcccgccgcaaaggtagggatgtgtgcctgatacaccttgctgatcgggaaggtactggcgatgcgcttgtggctgcgctgcatggcggtcgcgtcatcagcatagaaggggctgccctgttggttgaccatgatgccatccgcgcgcagcgcgttgaagcagttgccgtaaaactcgcgggtgaacaacccctccgacgggccgaacgggtcggaggaatccacgatgatcagatcgtactcgtcctcacaccggcggatgaatttgagcgcattctcgtagtagatatgcacgcggcggtcatccatacggcaggcgttgccgggcaggtaggcgcggcaggcctcgatgacctgcgggtccatctcgaccagatcgatgcgctcgacccggtcatagcgggtcagctcgcgcacaacgccgccgtcacccgcgccgatgacgagaatgtccttggcatttctgtgtacggccatcggcacatgggtgatcatctcgtcatagatgaactcatcgcgctcggtcagcatgacattgccgtccagcgtcagcacgcggccgaactccggcgtttcaaaaatgtcgatgcgctggtagtcgctctgcttggagtagagctggcggttgacccggatgctatgcttgacatccggggtgtgaaattccgaaaaccacatttccatactgcaaacctccctgtcaagccagcacattcaggcgcagaatgtccgggtcctcggggccggtcatgctgcagcccttggccttggcatactcgatataatccagaatctgcgcggtgatgcgctcgcccggggcaaggatcgggatgcccgggggatagcacatgacgaactcgctgcagaccatgccctctgtctcgcgcaggggcaggctctttttgggggcgtagaacgcctcctgcgggctggcggcaacctcggggtcgatgtactcctgactcaagagacccgcgccatcggtgtgatagcggcgcttgatttcagccagtgcgctgacaagacgctcgacctcctgcgggcggtcaccgatggagaggtaggccagaatgttgccgatgtcgccgaattcgatctggatgtcgtattcatcgcgcagaatgtcgtacacctcaatgcccgcaaggccgatatccagcgtgtgaacactcaattttgtcgtatcaaagtcaaaaacggagtttccgttgcaaagctccttgccgaaggcgtagtacccgcccacggcgttgatctcctcgcgcgcgtactcggccatgtcggctacctgatggaacacctgccggccccgcagtgccagattgcggcgggaaatgtcaaggctcgacatcagaagatagctgccggaggttgtctgggtcaagttgatgatctgccgcacatagcccgcatggacattgggaccggtcagcagcaggctggactgggtcaggctgccgccgctcttgtgcatagagacggaggccatatcagcgcccgccgccatggcggagacaggcagtccgccgccgaagtagaagtgggtgccgtgcgcttcatcggcaaggcagagcataccggcgtcatgcgccatccgcacaatggcgcgcagatcgctgcagatgccgtagtaggtggggttgttgaccagcaccgccacggcgttgggatgctcggcaatcgctttcgcaacctgctcacgcttcatgccaaggctgatgcccagccgggtatcgacctcggggttgacatagaccggcacggcaccgcacagcaccagcgcgttcagcacgctgcggtggacattgcggggcagaatgatctcatcgccgcgcttgcaggcggtcagcaccatgctctgcacagagctggtcgtaccgccgaccatcaaaaaggcattcgccgcaccgaaggcctcggcggccagttcctcggcctcccggatgaccgataccgggtggcagaggttatccagcggcttcatgctgttgacatccaccccaacacactgctcaccaaggaaggcggtcagctcggggttaccgcggccgcgcttgtgcccgggaacatcaaaggggacaacgcgcatttttcggaacgtttccagtgcctcgtggatcggcgcacggcgctgatccagacgggaacgcttcggatctccgttcatttttccctccgtccgcggttcctttgcaaacaaaaaagcgcaagccatgcacagatgtacaggcttgcgcttaaattcagcattttttgcacaggcagaaatacccccggtcttgcaccgagagagcatttttaccgtatgattcaaaaaggctgagcgtgtcagagtctatatagcaattacacttttactactcttattgaccgtttcacaagtctgcacgatacccgtgcaatttcatggttgtaaaggaaccaacttataaaatttgagcttctaactcaatcaataaggcaacctgcgttgccgatcggcagtggacccggctgtccgtatggccatggggcaaaacgaagcttttgcaatcgcccgccccgcccctgttgggcggtccgtaggtaaattgctttgaaaaactcttacaaactcgattcgtctttcaaaatcgaaagaagtatagcacagatatggtgcattgtcaagaaaatgcgagatattttttcacgcttttcacaaagtgtagcgcactccagaagggggagctgtggagggtgcgtatccatcagtggcagctgtggtttccgcagccatggctgccgcaggtgtggccgccctcgccgtgcgcttcatcgtggtgggtgcagcgcacatcggggtcatagcccagcttgcccgccagcagggccagcacggctgcatcagcatcgccgctgacaccgccgtaaagacggatgccggcctgcgtcagggcagcctgtgcgccgccgccgatgccgccacagatcagtgtatcaacgccgttttgtttcaaaaatccggccagcgcaccgtggccgctgccgttggtatcgaccacagctgtgttgaggatcataccgccggaaacctcgtacagcttgaactgcgcgctgtggccaaagtgctggaagatctgtccgttgtcgtaagtgactgcaattttcatggggggatactcctttgttacgatgtgggtcggaatagacataactttgccaaatgcgaagggcaggggttacaggtatcggactgtctcggtcagcggtttgcgggcgctgtggttcggcagcggcgtgacaccctcagcggcaaagcccagatcaaggatcatgaggatctcctcgttttcaggcagtccaagtgcctgtgccagcttgtcggggtcaaaaaagttcagccagcaactgtccacaccggtgttggcggccgccagcatcaggtgcgttgctacaatggacgcatcctccacgccggagtcccgcttgccgccgggatatgtaaaaacattgctgcggtcaaaggctaccacaaggcaggtcggtgcgccgtaacggcaaggcgttgcagcgtcgatcttagccagcccctgtgcagactggatgacatagatgcgctgctcctgcaggtttttggcggtcggtgcgacccggccggccgcgaggatcgcgtctaactgtgcgggcgcaagctggcgcgcgctaaaatttttgcaggaatagcggctttcaatgacctgtgtaaactccatcagaatagccctccttatatggcggcggtaaagagccgcctttatagtttgattctaccaccgaaccgcgcggctgtcaattttagggcaatactgcataattctaagtgccgatgcggcgctttgctttgcattccggcgggattgctggtataataaatgtatcccatcaggccgcctgtgcggctaaagaaaggtctccgctatggaaacaccccctcagggcacggccctgtttcatctgcccggtctgtttgagttttatgacttgtatgcggcgtttttgccgctttaccgtgcgcatagggaatatttttacgactggtgcgccatcggctcaatctacggcgcaccgtctgactgcttatgggcgggcggccgggtcgagtacagtgaccgcaccccgcgcgaggtgctggcgctgacgcatgaatatggcatctcggcgcggctgaccctcagcaattcgttgctgcgcccggagcatctcacagacccggattgcaacgcgctctgcaggctgtttcaggaacaaagtaatccccaaaacggcgctattgttcatgctgaactgctgacgcagtacctgaaaaagaactatccttcgctgtatcttgtctcctcaaccacaaaagtgctgacagacttcaatgatctgcagcgggagctggcgcggccggagtttcgttatgtcgttccggatttccgactgaaccgggcgtttgacaagcttgcagcgctgccccagtcccagaaggacaaggtggagtttctctgcaatgagtgctgctggttcggatgcacggaacgcagggtctgctatgaggccgtcagccgcaaaaatctgggtctgcccggcccggagcatcactgcagcgcccccggcgcagcaggagggtatcgcttctcccgggcgatggcaaaccccggctttatcggcatcgaggctattcgggatacctacctgccgatgggcttcacccaattcaagatcgaggggcgcggccttggcagtgcgctgatccttgaatttttgctccactacctgacccggccggaataccagctggctgtccgtgaggagctgtatctggacaatatgctggaccttttctgaccggctttgtgatgagccggggaaagctgtttgcatttttctccgatttgcgttataatggcaaaaagcaacaaaaagcaggagaccgccatgaacaaactactactcatcagcgctatgcaatatgactttcacacgcttttaaaggtggcggatatctgcggctttaccggggaaatcggctttcacgatgctgaggacggttatctgctcaccttccctgacaacgatggccacgccgaccgccgcattgcggagtaccgcagccgccttcgcgaccttgaacataatatctggaaccgctgaaagcgtatcccgccatttttatctctgccaagtgcgccttgctcttggcagatttttttgtgccgtatgttaccccagcgccacatccagcaccatcatcacactgaagccaacggcaaagaatactgtgccgaggttagagtgccgtccctgcgacatttcggggatcagctcctccaccacgacatagagcatcgcacccgccgcaaagctcaagagataaggcagtgccggtatcacaagctgtgcggccagaatcgtcaccactgcgccgattggctcaaccacgcccgaaagcacaccgcctgcaaaggccttgcccttgctctccccttcggcgcgcaggggcatcgagatgatggcgccctccgggaaattctggatggctatgccaagggacagggctagcgcgctcgccgcggtgatctgcgcgctgcctgcgagaaagccagcgtacatcacaccgactgccatgccctccgggatattgtgcagggtcaccgccagcaccatcatcgtagtgcggcccagtctgctttttggcccctcagcctcctcactgccgacatgcaggtggggtatcagatgatccagggcaagcaaaaacagcacgccgaaccaaaatcccgcaaatgccgggaaaaaagcaaaccgccccaacccctccgactgttcgattgccgggatcagcagactccagaccgatgccgccaccatcacaccggcggcaaagcccgcaagcgagcgctgcaccaaatcacccaatgcgcgccgcataaaaaatacgcacgctgcgcccagcgatgtacccaaaaagggaatcagaatcccccaaaaagtttctgtcaatgaagtcgcctccttttataatatatagacataaacacaggtactttataccctttcctgccccccgcaggcacagtcacttcgctttacggcggtcaaacacagccagcctgttttgcttttgtgtaccgcaatgtcacaaaagcccgcttgctcaagatatgatttcagctcagtatccttgtagatggtcatgccaccaatgatttctgtccattttttgtctttgtccgtgtcgccgttgacttcattgcagatgaggaaggtgccgcccggcttcaaaacccgccaaacctcccggaagcattttgcaaggtccggccagaaatagacggtttcaaacgcggtgactgcatcgaaccaatcactggcaaaaatgatgcgctgcacgctgccctgccagatggcacagcgatccctttgaatcgcctctgcattgagacggcgggatttttcgacgctgacagcggagtaatccacgccctttacgatgccgcgcggacaccttttcagcagccgtttgatattcgctccgccgccgcagccgcagtccagtacctttgcgtccggcgcaagatgcagaaagtgaagcccccacagcgccacgggggtgtgagcaaggttcatcatggtgaccatcagcctgccgccgaagcctttggggtctcttgtattttcaaaaaatgacattgttattctcctttcgattttttacactctgcgtaggtaagcggaatggaattctgcaaaacaacacttttgcaaacggtccagccgttttgctgcaaaaatgccagatacgcagcactcgtccatctgctgtgcagcggaaagcctgcaattttcagcgcaagggcctgaagccttccacaatgggaattctctgcatgggtaaaggtcggcgcaatcagcatgccatcgtttttaagcacacggcgaagctcggtgagtgctttctcaggatgcggtacaatgtgcagtgcattggagacaatgacaacatcaaaggactggtcagcataaggcagatggaacatatcctgcacggaaaaatacagcttggaggaaaaattgccccgctttgcctgcgcaatcatcgctgcggaggcgtcggtagcctcaatgtgatcggcagaacacaggagatgctttgccacctgccctgtgccggtggctacctccaaaacggttttgcgccacacagcagggcgaagcagcgcatataattgatcataggctattgcattcttacgcataaagcggtcataccttgctgcatttctgtcccaaaaattctttttcgtaatgctcagctccttggtttacatcaactaactgctgcttatttgaaaagctgcccggcggcagcatagaagcttgtatatgcgcgttagaataatctaaccgttggatcgtaaaaaagctgcctgcagccaaaacggcgcaccagcaacgattctacgatatttctgtcatataataacagtctggcacccaaatgtcaatagggtgctacaggtgcttttgtgcgtttgaatttcaacaaaaaatctatagcgggcagtgcgttttacactgcccgctatagggatgcttactttaaccgttttcgtccttgggaatggccagattcaagaggatggcaacgagtgcggcgggcacaatgccggagccgccgaataccagagagagcatctgcggtgcgtgtgcaaggatgccgttgttggcaccgatgccataaccgagaccgagcgctaccgagacgatgctcaggctgcgcggggtcagcggctcgcgggtgatgagctgaataccgctcaccacgatcgaagagaacatcatgacagctgcgccgcccagcaccgactgcggcatgatcgagacgagcgcgcccagcttgggcaccaaaccgcagagaatcaggaagatgccgccggtggccagcgcaaagcggttgacgaccttggtcatgctgacaaggccgacattctggctgaaggaggtgttgggcagcacgccgaacagtgcggcaaagctggagccgataccatcgcagatgacgccgccggacagctctgtgtcggtggcctcgcggtccatgccgcccatgataacgccggaaatatcgcccacggtttcgactgccgtgacgatgaacataatcatgaccggtgcgattgcgcgcatatcaaacaccggtttgaccggcatcagctcgggcaatgcaaaccatttggcctcggccaccttgttccagttcagtacccatgccttggtataggcaacgccctcggcgttcagcgccgtggtgggcagaacaaggcccatgagaaacgctgcaatgtagccgcagatgatgcccaccaaaatcgaggaggaattcaaaaaggtgctgccggagtgcttgcagatcaggatgacgaccagcacaaagatggcgagcagcaggttttcgaccgagccgaaatcctgcgcggtgttgccgccgccgaaggaattcacaccgaccgaaatcaggctcagaccgatggaaagcaccaccgtgccggtaacgacagagggcagcagcttgcgcaaaggcttcagaaagaagcccagcacggtctcaaacaggccgccgatcagggaggcgcccatgatcgcgccgtaggccagcacaccgccgcccattgaggctgcgaccgagctgaacaccccgatgaagccggaggaggtacccatgataataggaaccttgccgccgatggggccgatggaatacagctgaaccagtgtgacgatgcccgccacaagcatggcattctgcagcagcgtgacgcgcaggtcggcaaattcgccgccggcaagaccgcaggcacccgtgatgataagcagcggcgtaaggttgccgacaaacatcgccaacacatgctgcatgcccagcggcagtgcctgcttcagggacatcttgccttcaaagcggaaggcctcgggggaaagatcgttttttttcat

SEQ ID NO: 1101 - DNA, 63377 bp, unidentified
  source 1..63377: mol_type = unassigned DNA
agggaagcgcgattactcagcgtcgcccagctcaaaggtcttgacagagacagtgccgttgcggccagccttgtcggtgcgcagatactggcgggtagtctcgccgttgctggtcacgtcagcaacatagatctgctcggcctcggcctcgatggggaactcctcggccatgcccttcatgggcagagcgctcaggtctgcgtaagcgccgttcaccttccacagcttcatggtgtcgccgttggacagggtgaactcgccgtagcagtcagcggagtaggtggtgccgttcacatccagatcctcggtgctgacaacgctggcggcagcggtctcgctctcggcagcttcgctggaagcggccacagaggaagcagcctcgctggaagcagcggaggatgcggtggaggatgcactattggagcagccagtcatggcaacagccagcacagcagcggtcagtgccagacccagagtacgattgattctcatgtgatagtctccttctattctgaaaccatatcaattcctgcgcccggcgtaaaccttgtacgcaccgggcgtgcatgtgctagtctaccacaactgactatattgttcaaggctttgcacaaaaaatagccctctcggtcacgctgtcgcatgactgagagggccgatattacttcaggatctcctgcagcacgctgtggccgtccaggctggaagcatccacgcccagatattcacacacggtctgtgcaatggtgccaaagcagagccgggtgcccagatccacaccgggcttcacgcccttgccgcagaccagatacggcacatactcgcgggtatggtcggtggtcttggtgtaggaggggtcgcagccgtggtcggcggtgatcatcagcaggtcaccctcccgcatcccggggatgaagtcggccaggaagcggtcaaactcggtggcggcggcggcatagccgggcacgtcgcggcggtggccgtagagcatatcaaaatccaccagattcacaaaggccagaccctcgaaatcccgggtctgcaatgccttggtgaaggcgatgccattggtgttgccggtggtcttgatcttttcggtcacgccctgtccgtcaaagatatcaaagatcttgcccacggcgatgacatccctgccggcctccttcagcaggtcgagcatggtggcacggggcggcttcaggctcaggtcgtggcggttggtggtgcggtagaaggtctcggcgctgctgcccaggaagggccgggcgatgacacggcccacgccgtacgcgcccttcagcatctcgcgggcgatctcgcagtagcggtaaagctcgtgcacgggcaccagctcctcgtgggcagccacctggaacacgctgtcggcgctggtgtagacgatgagggcattttccttcatggcctgctcgccgtagtccttcagcacctcggtgccggaataaggcaggttgcagaggactttgtggccggttttggcctcaaactcctgaatgagctcctccgggaagccgttggggaaggtgggcagcgggttcgggctgaccacaccggcgatctcccagtggccgatggtggtatccttgcccatgctctgctcctgcaggcgggcaaaggcaccggcgggcgtgtcggtcttttcgcccgcggtcacaccgtcaatgttgaacaggcccagctttttcaggttggggcagttgaaattgggatgccctgcaatggctcccagcgtgttggtgccctcgtcgccaaaggcggctgcatccggctccgcgccgatgccaaagctgtccagtacgatcaaaaatacacgcttttccatatgttttcactccattttcctccggggctgccccggaacagtcgcacttttgcttaccttcattataagcaaatcccaccggttatgcaagcgctttgtggtggaaagttttttgttcaaacctgatgaaatcttagcagtttctttgcaaagatttttcttgcgctattgtatccaagagcttataatgtatagtggtatggttttttgaaacagccatattggcgtatactgccgccgcgggcgcaaagcaatcactgcccgccagagagcagccagcttgggctgctgcgtcaagatagagagcattatagcgtgaacgttggaggtattttatgagaaaaacgaagatcatctgcaccctgggcccttctaccgataagggcgatgtcctgcgcgacctgattgcaaacggcatgaacgtggcccgtttcaacttctcccacggttcctacgaggagcatggcggccgtctggcaaagctgaaggcgctgcgtgaggagctgggcaagcccgttgccgccctgctggacaccaagggccccgagatccgtctgaaggagttcaagaacggtgtggagatgctggaagccggccagacctttaccctgaccacccgcgaggtggaaggcaccaaggagatctgctccgtcacttacaaggatctgccccaggacgtgcagcccggcggcaccatcatgctggacgacggcctgatcatgctgcacattgagcaggtcaccgacaccgacatcatctgcaccgtgctgaacagcggcaagatcaagaccaaaaagggtgtcaatgtgcccggcgtgcatctgtccatgccctacctgagccagaaagaccgcgaggacatcatctttggcgtgcagaacggctttgacttcatcgctgcttcctttgtgcgcaccgcacaggatgtgtacgacatccgcaacctgctgaatgagtacgattccaacatccgcatcattgccaaaatcgagaaccgcgagggtgtgaacaacatcgacagcatcctctccgcagccgatgccgtcatggtggcccgtggtgacctgggcgttgagatcgacttcaccgagctgcccggcatccagaaggacatcatcgaccgctccttctccttcggcaagcccatcgtcactgccacccagatgctggacagcatgatggtcaacccccgccccacccgtgccgagatctccgacgtggcaaatgccatctacgatggcacctctgccatcatgctgtctggtgagaccgctgccggtgactaccccgtggaggccctcaagaccatgtccgccattgcagagcgcaccgagaacgaggagcactaccgcgcccagcgccacgccgagatccagatcagcgtcagcgatgcaaccgctcatgctgcctgcctgaccgccaaggacgtgaacgccgccgccatcgtcaccgtgtccgaatccggcaacactgcccgcctgctgagcaagtaccgccccaagcagcccatcattgcctgcgttatggacgagcaggtgcagcgtcagctctccctgagctggggcatcacttccctgctgatgggccccgcccacagcaccgatgagctgattgagatgtccaccgctctggccgaaaagaacggctacctgcacaacggcgagctggccgttgtgaccgcaggcgtgcccgtgggcgtttccggcaccaccaacatgatcaagatccacatggtgggcaactgcctggccaccggtgtaggcgtgggccgcggcaagaccgatctggtctccgccagcggcaaggcctgcgtctgccgcactctggaggaggtcaaggcaaagttccgccccggcatggtgctggtcgttccctccaccaccaacgagatgctgggctatgtccgcgatgccgccgctctggtggttgaggagcccggcctgaacagccacgctgccatcgtgggcaactccctgctcaaacccaccatcgtgggtgctgcaggtgcctgcagccacatccgcgacggcctggatatcgctgtggattgtgcccacggcagcgtccagcgcctgcaggcctgatcctgaaggagaacatcatggaacgcattgcaagcttctgtgtcgatcacaccaaactggaccggggcatgtacctgagccgccaggacggtgatgtgctgacctgggacatccggatgaagaagcccaatcagggcgattatctgaccaccggtgccgcccacacgctggagcacctgtttgccacctacgcccgcaacagcgcggtgaaggacggcgtgatctacgttggccccatgggctgccgcaccggcttctacctgctcacccgcgggctgaccccggcgcaggcattggagctgaccgtggattccttccgcttcatggccgcctttgagggggatatccccggtgccagcgaggtggaatgcggcaactaccgcgatatggatctgcccgccgccaaggccgaggcagccgccatgctgccggtgctggaagcactgaccgctgaccagctgcactactaagcgatacagcaaaagacctccccatgcaggcagcacctgcacggggaggtctttttgcgtttcaggaaagctcttttgcggagtgcttactccacgatgatgctcttgccggtcatctcagcggggacaggcagaccgatatagggcagcatggtgggggcgatatctgccaggcagccaccctcgcgcagcttcacatcgccgcagccaacggccacaaaaggcaccacgttggtggtgtgggcggtgaagggagtgccgtccgggttcatcatcttctcggcgttgccgtggtcagccgtgataaaggcgcagccgcctgcgttcagcacagcggtgaccacctgatccacagcggtatccacagcctcaacggccttgacagcggcatcgaacacgccggtgtggccgaccatgtcgcagttggcaaagttcaggatgaccacatcatacttgccgctctcgatgcgcttgacgcactcagcagccacctcaggggcgctcatctcaggctgcaggtcgtaggtggcaaccttcgggctggggatgacgcagcggtcctcaccctcgtagggagcctccacaccgccgttgaagaagaaggtgacgtgtgcatacttctcggtctcggcaatgcgcagctgggtcttgccgttctcggacaggtactggcccagaacattcttcagctccacgggaggataggcgacctcgcagttgggcatggtggcatcgtactcggccatgcagacatagttgacctgcttgcggccgccgcggcgctcgaaccccttgaagtcgtcatcgcagaagatgcgggtcatctggcgggcacggtcgggacggaagttcataaagatgacggtatcgccatcctgcacgcggccgccctcgcaggtgacgcagggcagaacgaactcgtcggtcttatcggcagcataggatgcctcaatggcctcggcagcgttggcagcgtggttgccctcaccgtagacgaatgcggcgtaagccttctcctcgcggtcccagttgttgtcgcggtccatggcgtagtaacggccggaaacgctggcgatcttgccaacacccagctcatccagcttggcctgcaggtcagccaggaagcccttgccggcgtgggggtcggtatcacggccatcggtgatgcagtgcaggtagacttcctttgcgcccatgtgctttgccatttccagcacgccgaaccagtggtcagcgtggctgtggacaccgccggtgcccaccaggcccatcaggtggatggccttgcctgcctcaatggcggccttcatgttcttgaccagcacggggttcttgaacatctcaccgtcccggatggacttggtgatgagggtcagctgctggtaaacgatgcggccagcgcccatgttggtgtggcccacctcagagttgcccatctgaccatcgggcaggccgacagccatgccggaggcctcgatggtggtcatgggatattttgccatcagggcatccagatggggggtctttgcggcgaccacggcattgccgtaggtctcgttgggcacccagccaaagccatccatgatgcacagaagtacaggtttcttggacataacgttgaatctcctttgatttagaacaaatagcgcccggcacagcgctggaaaaacggcgcagccgggcgctgggaaaacaggtcagaggactttctcagccgttggaagcggcattgacgataacagcaaaatcaggagccttcagagatgcgccgccgatcagaccgccgtccacatccttcttgctcagcagctcctcgcagttcttggcgttcatgctgccgccgtactggaccgtgacagcctcggccacagcctcgccgtacacttcgccgatgaccttgcggatctgagcgcagacctcctcggcctggtcagcggtcgcggtcttgccggtgccgatggcccagatgggctcgtaggcaatgaccacatttgccatctgctcggcggtcacgtcgcgcagggcgatcttggtctgcatccgcaccagctcctcggtcacgccctcttcgcgctgctgcaggctctcgcccacgcagatgatgaccttcaggcccgcattcagggcagccagagcgcgcttgttcacggtctggtcggtctctgcaaagtactggcggcgctcggaatggccgacgatgacgtactccacgcccaaatccaccagcatatcggcgctgatctcgccggtgaacgcaccggacttctcaaagtggacattctcagcacccacatggatgttggtgcccttggtcttttccacagcggtgaccagatcggtgtagggggtgcagataacgacctcacaggaagcatccttgacagcggggatcagctcatccaccagcttggctgcctcagtggcggtcttgttcatcttccagttgcctgcaatgattgccttacgctttgccttatccattcttacgatctccttatcaaaatatctctccgccgccttcgttgccgcctctcccggcaggagaggcaggataaacaacatctcctgcctcccggatggggagctggcgagcgtcggcaagcctgagagatcttattacccaaaataaaaagtgcggcggcgtatatgccgccgcacctcagtgatgctggttcagatgcttatgcgttctggatcacagcgataccaggcagctccttgccctccagatactccagagaagcgccgccgccggtagagatgtgggtcatcttgtcgcccaggcccatctgctgcacagctgctgcgctgtcgccgccgccgatcacggtggtagcatcgctctcagccatagccttggcaacagccagagtaccggctgccagggtggggttctcgaacacgcccatggggccgttccacaccacggtcttggatgccttgacagcatcggcaaacagcttcatggtctcggggccgatgtcgcagccctccatgtcagcagggatggcagtgacaggcaccacagtgacatccacgggagcgtcgatgggatcggggaagtccttgatgcaggctgcatccacgggcagcagcagcttcacgcccttctccttggccttggccatcatttccttgcagtaatccagcttggtatcgtcgcacaggctcttgccgacctcgtagccctgagccttgacgaaggtgtaagccatgccgccgccgatgatcagggtatcgaccttctccagcagattggagatgacgttcagcttatcggcgaccttagcgccgcccaggatggcggtgaagggacgaacgggatcgttgactgcgttgcccaggtacttgatctccttctccatcaggtaaccgacagcggtatccttgatgtagtcggtgacacctgcggtggagcagtgtgcacggtggcagctgccgaatgcatcgtcaacgtatgcatctgccagagaagccagctcctggctgaactcaggcatgttcttggtctcttccttgcggaaacgggtgttctgcagcagaacgacatcgccgttgttcattgcggcaacagcagcctttgcgttctcgcccacaacgttatcgtcatcagcgaacacaacggtcttgcccagctttgcgctcagagccacagcaacaggtgccaggctgaactttgcctcggggccgttcttgggtttgcccaggtggctgcacaggatgaccttagcaccatcgttgaccagcttctggatggtgggcagagccgcattgatgcggttctcgttggtgatcacgccgtccttcatcgggacattgaaatcgcagcggacaaggaccttcttgccgcagtaattctgatcgtcgatcgttttcttacctaaacccatggtaacaaactcctctcaaattcttttcgttcggaatcgaattttgctcttcatcgggggccgcgcactgcgaacttccccgtacatccttattataaacaaaaagcgtgtgtattgcaaggacgggagatggataatttattaacaaacatttgttgcagaagcaaagaaatgtggtgattttgccggaacgcaccaaaaaacgccgttttttctgaaaaagacccgctgcagggagtgtttgcccccgcagcgggtcctgtccattcaggatattttccggaacttctgcttcgctttttccagatattccagcaccagcggatttttcatgcccagcaggatgaccgcgtatgcagccactgagcccagcactgccgccagaatgcagatgagattgggcagagccagtgccttgaccccggtacagacaagaacgatgcccacacagccgcagagcaccgagccaacggtgcgccggtcagctgagaccgtgaccaaacccctggagcagcggatacagagcatcatggagcacagctctgccagcagggtggtaaaggctgccgcattctcccggaaccgcgggatgagcaggatgttcagccccacgttcagcagaccgctgaccagcgtgatccagaacagttccttttctcttccgcagggcagaagcgcgcaggaattgtacagccagccaaacaggcagacaatcagggcaaggctcaggatctgcaggggcatcaccgcatccagatagctttccccggaaataaagaggacgacctcccggctgagggcaaacagtcccaccacagccggagccaccaccacgatgagcgcgttgaagatattgttgaacagcttgttgaagtttgccttgtcccccacgcccgcataatgggacagccgcgggatagacaccaccagcaccgccgaaagcagattctttacaatgccatagatcttacccgccaccgagtaaatacctacattgtaatctgttcccagaatgcccaaaatcgtggtatccgagctgacataaagggtcgttgccagcgtggatgcaaagatgatgaggatgggcttgaggtgctttttccagtcgatctttcttgtcagccggatggtgcagtaccgccgggcccggaaaaagttgagcacattggcacctaccgccgcaaacaccgtgatgcctgcatagatgcagtagtcatcccgggtcttgacgaaggcaaacagcatgaaaatggacagtacctgaaacagcaggccccggatggtgatataggtatactcctcaaagatcgtgaacacccattcggtgccgatggtcgtaaagaagatctgtaaactcagcaccagcatcaggtcggtataggcatggagctttgtccagaagagcatcgtcaccgccaatgccgcataggtcagggccgtggagatcatattgatggagaacatctccgatgcaaaagccgacagtttttctcggtcattcacatagcgggagccctcacgcaccgcataggaggagatgccaaggcctgcaaacagcagaaaatacccgcagaccgagctggcaaagttcactttgcccaggttttccacctgaagaacattggaagcgtaagggaatgtaatgagcgggaagataatattcatcagtgttttgaatgcgctcattgctgcattcagactgagggattttttcattcagatctccacttcgtaagtttttctggcctgtttctttttcagccagctgttccagagcagatacgaatacagcgtttttataaaataccgatactgccctgcacgaagccagcctgccagaagggggccggcatttctcttaaactcccgttccgcttcggcacacgcctgctccataaaagtatcatccttgcagtatttcaccacaatttctctgcaccggagcgcatatccggcccgtgcagaccgatacacgaacggttcatctgcaaacacttcacagatacgccgccatgccttcagctctgtcagttttcctgccgaataatgcccgctcgtcaccgagtcatcgttgacatagtaatagtaaagtgccttgtcgatgcaggcaattttttctgcctttcggatacattttgcaagaaacagcgtatcctcaccaattttcaagtcagtatcgaacacaacgtcttgtgtgaccgcacggcggtaaagcgcaccccagcacactgtatgtgccttccggctgttccagtcatatcgtctgaccggcataacactgattttctccgtctcatcgctcttcgtctgcgttcgtccggtcgtgcccagaagatccagaccgtagcaataagcaatctccgcaccggtctcatccagcactcttttgagccgttctatgcactcggcgtggagtgaatcatccgggtcagcaaaagaaatcagcgtgcctgtacttttttccaatcccagatttcgcgcagaagaaacaccaccgtttgacttatggtatatcttgatccgcagatctttttccgcgtagcgctggcagatggcaagggagttgtctgttgacccatcatccaccagaatgatctccagatcccgataggtctgaccgaggatgctgtccagacatttttccagatacttttctttgttatagatcggcacaatgatactgacggtatcgttcagcacaaattttcctcccttattttgccgccgggccgtttttcagcaggaacagttttgcatacagcctccggctgcatctgagcagctgatacttccgctggctgctggtgcagagcagctttgccgccgccgggtcacactcctgcaaaaaggcctccatttttgcgcagcgctccgtatcctgcatcagatacggatagcagtgctccaccacgctcagcatggcggcatcattttccgacattcccgggtacgcttcccggatggcccggtacttctggtagcccatatccagcttatcctcgtagaacttcatgttcctgcggtgaaggatgctgtccgggcgctgatagtaataatacagcggcaccgggcagtatacgaccttgctgcactgctgaaaaatgcggtatgtggtcccctgatcctccatcatccgccccagcggatagcggatatcccggaacagctcccgcttgtagagcttgttccaggcaaaatcccccagctcatccgagacaagagtgttgcggatggcttcccggcctgtcatacactgcaccggtacggtgagttcagccggggcaagctcttcctcccgttcaaacatccggaagcccaccacagcaacatccgcatcctgttcctgcaggtcacggcaaagcgtttccagcatccggctgtccagaaaatcatcactgtccacaaagcagagatacgttccctgtgcccgttcgagtcccgcgttgcgcgctgcagagagtcccccgtttttctggtggactgctgttacacgttcttcctgtgcggcatattcgtcgcagatgtctccgctggcatcggtggagccatcgtccaccagcaggatctcaagatcctgataggtctggtgcaagatgctgtccacgcagcggcggagatatcgctccacattgtagaccggaacaatgacactgatcagctctgtcgccatctcagcctctcccccaccgatcgatcataacagccaatggatccgggctgattcccaagctttcagaggtatacgggaacgtccaatcattctgctgaaggacaatttgatatagccagatcattacaaacataaagaacaatgaagcaccaaccagccttgtccactttttgcgatctggatttttttctagtgtgtgcatcatccgtccaatagccatacagcggaatgtctcaaagtaaaaactcatccggtatatttccgcgctgaccgtacgcaggatcgcaagaaccatctcaatgaatagcagaatcaacagaaaatcagcatcctgattatgaaatgtataactcttggctttttcctcctgcgcgaactcacggtagaagaacagcggcattataaagaacggaagccgaacaatgactggtttgatagaaaatggacttcccgacaatgaatttagatatccagcaaaacgatctccaaaaattcctgtttcaagaacaagacgcagaagcggcactgcaaaaacagcaaacagcaaaatagccgcaataatgaccgtcttgacctcttttgtgtcccatttttggagaatgagatagagaatcaatatcaccaacgccagaagtgctgttaaatgaaacaaatatgccgtcgcaagcaaagcaaaaaaagccacatactttttccgctgcagaaatgcaaaagcacacaataccagtgtaaccgctgcagactgccggatctgattcaacgaaattccatacatgaagaaaagatatgcagcccatgcatacggcagtgaaactgtctcccgcaccatcaccaaggctgtcatagcgccaccatagatcacagcggcaaacgccagaaagaagaaacgagcggaattcagcttacctgccacatatgcgatgccacaagataggacttctctcccggtataccatgaattcagatactccaggaaggtatcatattttgctgctgtctcaatccaccccagataccccagagtatctgttcctactgtataatctcgcagtcctgccagaagaacaacgagtagcagtgcgaggaaaaggcataatgcactttcttttaccttttcctttttctgcagtgattccgcccaaaatgtcaatccaatggaaatgccaaatgtccccaagtatgccagcatttttgcttcccttcactttttagccataaaagatgtttgtgatggacgctctaatggttcttagatgccacccatcatgttttatttctcttttgtcttataaattcattcaacgcatagacactataaaacaatcgtttgctccataaaagtgcttttaccttgataatatcttctcttttcgcccatggccgctgaatcagactgtgatgatctcttacaaatttacagatttttttctgcgtatgcggataattatcaaatcctccatccagaatcccctttaacgttttcaaattcgtcacaagttccaaatattcagcttcctccctcagtgcaggaatcctctccgaaacaaacagcgttacatctcttgcaacatccagtatcataagattcttttcctgcactgcctggtgcataatcgaattatttcgtatccggtaattataaacaatttctttggtaatcgccactgttttacaacccgaaatcaccttataaacagccgcataatcttcgtagagcattcctttcgggaattcccatccgtcccaacagctccttcgatagagctttgcccatgcagaatgcccgattccctgatgcagaaacatccgttgcagcgtttcctctgccgatagaatctctatcgaaggatccgctttcacatttttctgtacttcttccgtaacctctcgaaatgcaccaatggctacatctgcatcatattcttcacagagccacaccaaccgttcaactgcttttttttctaagaagtcatcactgtccagaaagcagaaatattctccccgggcatgatgcattccgtggtttctggcatcggacaggcccccattgggtttatggaacacctggatgcggccatcctccgcagccagttcatcacaaagcttcccgctgccatcggtggagccatcgtctaccaaaagcagctcccagttctggtaactctgcgcctgcacgctcttcacacagtcccgcagataagaataaacattatagaccggcacaatgaccgatacaagcggttttcttgcctccaaccggatccctccaccttacttttttccacgccactgcgttttttcataaacccgccgggtcatggcatagccgctgtaggaaagcgccgccgccagccgggcctttttgcgggcccgcggatccagcagaacgttccggcggtattttttcacttcctgccagagggccttctctattttttcatgctgcctgtcccggatctggaacaggatattgcagacattgctcagatagcggcattctgccgcacggctcaactgggggaaatcacgctttacgttttccatcagcgcgtgacagtgccgcacactgtccagctttctggggttgaaggccatattttggatactgctgccccgctggaaatagtagtaatcccggtttgcgatatgtgccgccttatgggcacgctttgtcacctcgtaggcgaccgggatatcctcatagagcttgcccaccgggtagcgcacaccctcaaacagtgcacgcttatagagcttggtgggggtggtcacctccatgccctcctgatacaggatgcggcacaggcattcctcccggctcaggatctcgaatgcttccagacgctctgtgggcacggactgcaccggctggccctcgaacacctcttcaaaacagctggctgaaaaatccgctcccgcctgctccagtgcccggtacaggttctcgatgtaataaggtgacacccagtcatcgccatccacaaaagagagatattccccctttgctgcgtccacaccagcgtttcgggcatcggacagaccgccatttttcttgtggagcacccgtacccgggcatcctgcgtagcatattcatcacagagggcctcgctgccatcggtggagccgtcgtccaccagcagcagctccatgttctgatagctctgccccaatagactgtccacacagcggttcagatatggcttcacattataaacaggaacgatgatgcttaccaaagggtccatcttatctcctcatttcagcaggtcgaagtaaaacgcttccagcttcttcgcctcggtgacgatatcaaagccgcctgcccgcatctcagcagaggtatcccgccgccgggcattttctgcagcccggatcgccgcatccgcccagactgccgggctttcctgcaagctcaggtattgcatctcgggcaggacctgagcctcctgcggcacctctgtggaacagatgaccggcaatgccgccgcttgtgcttcgatcagcacgatcccaagcccctcataccgcgagggcagaacaaaggcatccatggcctgatagaactttgcgggatcgctttggcggcccagaaaacggacattctcctgcagccccagcgcctccgctttccggcgggaagcggcttcgttttccccttctccgatcagcagtaaaacggcatccggccgttgcttgcagacctccgccattacatccagcagaaattcgtgatttttggcatagcagaaccgcccgacatggcccagcaccagttcatcccccaggccaagctcctgccggacgactttccgttgggcggcatcataagtaaagcggtcgagctcaatggcattgttgaacacccggaaaggcttttcaccataaagccagctgcctgccgttctggagcaggcacagagccgggtgggatacactgtggcaaagggacggagcaggtacttcatcacattttttgccccttctcccctgcccaccgtagaatggttatgcgcgatccggttgggcacccctgcacgctttgccccccagagggaaagcacgctcaaggtgttcatgtgggagtgaacgatctggtatccgttctgacggaacagccgcccgatctcccgttcatactgcggcaggtgggtatattttggcaccacatacacccggccgcccagccgttcgatttcttcccgctggggcagagtcgagccttccagcgcgaaaaaatcaaactgaactctggaacggtccatgtggcggtagtagttcatcaccaccatctccacaccgccgtagttcatatccgtcatcatctgggccacacggatgggctgtgcattctgctccatggtcataccagctccttgcggtcacaatcctcgaaccagtcccggaagctctcctccagcgtatagtggaacttgtaatcggtggcggccagctttctgccgcaaacattggtggacaccatcagcttccggacacgggctggatggatgcccacctttttgcccccgatgggtcccagaatgcccgccgcaaacagcagcagtccggcgggcaccaacggcacatggcggtgcaggccggtcgccttctgcattgtattgcagatttcttcaatggtataggccggctcgtaggtacagttatagatctctgctccggggaaggaatgatccagcatccggtacttgaagaagcgcaccaactccttgacatagatgcacgccttgatggtgtccttccggccggcatagaaaaagtagcccttcttctgccccctgtacaggcgggtcatgttgccgtgctcccctttgccataaacgatgcctggccgcacgatggtcaactcccgggccggatcacgggcctgccagatctggtggatcttttctgccaccagcttgctgatcccatacggcgtgttgggcgttggcagagtctcctccgtcttaaggtcctcagacgcgccatagggtgcaatggagctggtgaacaggatcttccggatgccgtatttttccgcaaatgcggtcacattttccgcgccccggatatttgtttcaaaataggcttcttccgggtggccgggggtgcggtggaccgctgccagatcaaagatcacgtcctccggggtcggaacgaactcaaaatcgatgggcttgcgcacatccagccggatatactgcaccccatcgttcttttccacaatgcccggcaccacgccctcttccccgggcataacaagatccaggtcgtagatcacgtcgctgggtctgacgcactccttcagcagcaaatgaatgagatgggtgccgataaaaccagatccaccaaaaagaatataattcattttgcccctttccggtcaaacacaacgcccaccgtcctgaacagcaggtagatatccatccagatggaccagttgtcgatgtactggacatccagcttgaccacttcttcaaaatcatcaatatcgctgcggccgcttacctgccacaggccggtaattcccggcttcatggaaaggcggcgcttgtgatggctctcgtactgccggtactcatccagcgtgggcgggcgggtacccaccaggctcatggagccccgcacaacgtcaaaaaactgcggcagctcatcgatgctggtgcgacggatgaagcggcccacccgggtgatccgggggtcatcttccatcttgaacatcaggccgttcatttcgttctgggccatcagttcctttttgcgtgcttccgcgtccacatacatgctgcgcagcttgtggatgtagaacacccgtccattccggcccacccggcgctgcttgaagatcagcgggccggggctttccagcttgagcgggatggccaccaacgcaatgatggggatgctgatgatgcaccccacgatgccgcctacgatatccatggtccgtttcagcacctgatcccgcagcttgagttccaccgtgcccatcgttacaacattgccgcccgcacagcggctcagttcccggctgatgcgcaccgcactggtctcatcacagcaggctttttcaatccggtccagcaccggcaggcggaaatggaccgtcagccccatgctctccatctcctcgagatagggcagcatgttctcctcactctcctgcgccacatccagatacacttcatccagcgctgcctgccgcagccagtccatgaaattatcgaagttcgcctcgatcttcaccccatcgatctcagtgtgaagctgctccggggcagcttccagaatggcaaggccggtcacacgcttggaccagtcctttttcagctcttccagaatggggcttgcgttttcctgcgtagtcaccacccccacaaggctctgaatccccttggtatagcgggagcgtaccagcatctttttgaggacagcatgagcgcccgtcatcacaaagacatcgatgatgggcacaaacaccagaaaatagcgggagtgcagcatggaagccttggtcagcgccaggcaggccgcatcaatgagggtcaacaaaaaattgaaccgcaccgcaatttcaacttcacgaatcggagtgcggttcacgatattttcactctgatcaaatgtaaaaaaggtcaggatataggccagcagcaataaaaaacaggcttctaccagatcgtccagctggaagtcccccatcttgtgcagaacacctgcggtcagcccccacgccagcccaatgctgagaaccagagagagcagatcaatcagaaacaggtatccatactgcagtttttcacgtttcgtaatcatactgtttcgttgtctccatttatttttaccattttatcatatcgggagaagggttgcaatagatggagatcgaatgcgcgctgcttttgtcggatcactacaaatggatcgcgccattttacgaaagcgccttatcgcatccaaaatggtcagcaaaaagcgccctttctctcgcatcacacaagagaaagggcgcagtcaagctttattcagctcaggagaaactccgatcagcagttctcagcgaagtacttaatggtacggaccatctgagaggtgtaggagttctcgttgtcgtaccaagacacgacctgaacctgataggtgtcgtcgcagctacgctgaatttttgcacttttccaagtagttcttcacagtttcgtaataacagttacagtaccagaacataccgttgtcgtaccaaaaccggtttgttcgtaccacaattatatcacgtttcagcgtcatttgcaaggattcaatccgtttcgcttctgacctgcatttttcagatttcaacgtatattcttacggtattccacggttcgagcgcctaaggcctagggcttccgccggggcagcagatctcccaagcactctccccagaagctctatgacagctagatttccaacatgttcctgctgattaaccgaaatttctccggacgtgattttgagccatggtgtgggaaatgtagccatttcgttcgatatagagcagttctattcgttccaagtcacaccaattaccatttatataagaaaaccgcgtgaactgccagagctataactctacgctccgactgatccacacggctctaaaatatttatttcagctttgcgaggatttcatctgccgtcataccactggccaacagctttttcagcacatcctccgcttcagctttctttgcggattccgctgctttggtttcagcatcctttttcttactctccagcttcaccagttctttgtccagttttttgagcgaggccttcttggttttcaggtctgctttcagagcatcaatgttcgcagtgatagatgcaatttcagcggcagcggcttcctttgcaacctgcttttcagcgatctgtgcagcaaagtcaacggttgtttttacggtcttgggcttgttcttgcttcctttgggacggggcatatgggacacctccaatgttttttgatggcttcagtatagcactcgttttttatgttcgcaagaggtgcagtttgtagaagaaaaatatatctttaatttaaacaatagatcgattcaaattgtgcaaccatgcaggaattgcgctgtaatcttttacccacagaatattaattccgatgcgataaaaataattttcaatttgaagccaatcttttgatgtcagttgttttgttgttgaagcaaacgcatctgtgcttttataaatcatagcgaaaatcgcataatgttttggcagatcagttgcggtgatttctaaaagtcttcggatgtttggatcacttattatctccacatatcaaacgggcgaatgttaagaatatcacatatctggatttcaacatcattttttaacaaaataacgttctccatgtcagaaaacgaacaccagtatgccttcattaaataattcatcactttttcctgttcagaatcactatttcttccatcatatacaattttgtctgcgctgacccttaccacaatttcatagggtgtatgtgtagtcacccactccgctgccagatctgtattcagtagctcatccatgtccttcaggatttccggtcttttatgaatatagcctccatatggctgcttactataagaaagaaatccacagatgcaataatcgtaatacaactttcgtccaacacgccatgcagcatactcttctctgttatgtactggtggacaatcgccaaaactgatgtcatatgttcttccgttatatttcaaagtatgttgttcaatattaatatcaacatcatgattggaaagaaacaatccaagctccgttaccttattggtacacgcaagcttcattaatccaccatttctaatagattcacaggcagttgaacttgttgtaatatgtccaaatgtgaactcaagttctctaaatgctggcaaaaagcagtcttctttgtccagaatcctttttacataatcctcatcgcttaaaaattgctccttattgtaatttctgtttaggtattgccacgttgaccattcaattcctgttaacctttgcagtgtttttcttgcgttttgctgcgcaagaatatcatatgtcatcgtgatatttttccttttccgactcaatcaaaccgcttctcagcgtctttcacaatctcacattcgaccttttcagcaatttccttattctctgcgctgacagagatataggtcttcagcttcggctcagtgccagagggacgcaccacaatggaacagttatcttccagcaagaacttgagtacatcggacttgggcagaccatccagacccggcgcgtagtctagcagcttgatgaccttcttgccgccgaactccttgatgtcaccccggaatgcctgcatgatgctctgcatcttggcaaaaccggcactgccgtcgaactcgtagctgtgcagggtgttcaggcagtagccgtagctcccgtacaactcatccagcttgtccagcaggctgatgccacgggtcgcatagtaactgaacatctcgcagatcatgtaagcaccgtccacgccgtccttgtcgcggacataggaaccggtcaggtagccgtagctttcctcaaagccgaacacatagctgtctgcctttccctgcttttccagcttgccgatctgctcaccgatgaacttgaagccggtcagcacattaatggtacgcagtccataatgacttgcaatctgctcgcccatatccatggtgacaatggtcttgaccatgactggatcggcaggcatcttgccatgctttacgcgctggctgcaaatataatccagcaacagcatacccgtctggttgccagtcagcagctcgtactcccctgccttgttcttgacggcgatacccacacggtcacagtcggggtcggtcgccagcagcaggtcagcgttgcacttcttggcatactccataccaagtgccatagcttcttcgatttccgggttgggatacgggcaggtcgggaagtttccgtccggctgctcctgctccttgaccacggtgatgttggtgtaacccatctccttcagggtgcgggtcacgggcttcaggccggtgccgttcaatgggctgtacacgatggccacattcttattgacttcttcgccaaacagaacagattggctcttgacatgctccacgaatgcggtgtagacatcgtccggaatgtattggatgctgccgtttaccacacctgcttcaaaatcgctggtcttgacgtccgcaaagatatccagcttctcgatctcagccagaatttccgcagcagcctcggtggtgatctggcagccgtctgcgccgtagaccttatagccgttgtacttgctgggattgtgggaggctgtcaccataacaccggcagaggtgtgcagatagcgggtcgcaaaggacacggtaggaaccggcatcagaacaggccagatattcaccttgacgccgttggccgcgaacaccccggcggcaacttttgcaaacacatcgctcttgatacggctgtcgtaaccgatcaccacagaaggcttttcatagttcttctttaaatagtccgccagaccctgagaagccttagccacggtatagatgttcatgcggttggtacccgcaccgatcacaccacgcagaccgcccgttccaaaggcgaggtcacgatagaatgcgtcttcgattttggcatcgtccagcgatttcaattctgccactacatcggcatcggcggtggcattcgccagccagcgttcatattctttcttgatatccatttccggtcacctttcattacactccgagctttcttgcagcccaaaggattccatgtgcagagctattgcagcatatttcgttattcatcaccatctcaaccgcctgttttaacggaacaacgagaacatccagttcttccgtagggtcaagattctgttcgctaacctttcggcaatgattggaaaaaaatagatacatatagttcgttagctttgccgagctttctaccgttgctccgatatattgccagtcgtccgaaacatagccagtttcttccagaagttcccgtttggcaactgtcaagccatcttcgcctctctcaaagcctcctgcaggaacttcaataaggtcacggtcaaggcaataccgatattcctttttcagaactatatttccggcatcatccagtgccacaatggctgccgcatcgttgagtgaaatggcatagaaatcatcaatgtgctgactattcggcaagtccactgaatcttttcgcaccttgacccatcggctgtctacaagtggttcagattttattgtcttccacttttccatatatcagcctcttacatccagaaattgtgcctgtccatgaatggttagagttacggaatctgccgggacaaagatgcagtctcccttatagaacggaatggttccgttctcatgggaaatcgtaccgcagccgtttacgcagagcagcacacggaaagccaattcatccgcccggtaatgcacagtttggcgtcgttcggtgttgacgatcatccgatacacctcaaaatacctgcatcgggtcagcagctcagatgccacgccctgccgatatttcagaacacgcagtggctgtttcggttccgcgctgctgtaaagatttgccacatccagtgccttgtcgatatgcagctcacgctttttaccgtctttgccgatgcggtcataatcgtacaggcgataggtcaggttggagctttcctgaatttctgccaccagcgcccctgccccgatggcatgaaccgtccccgcaggaatgaaaaataggtcatccttatggatgggcaccttttgcaggtatttcatcaccgtgccgtccgcaatcgccctgcgcatttcttcctttgtgcagtccttttttagcccatagaccagctttgcatcccgtccggcgtccagcacataccacatttccgtcttgccaagctgcccgttttcatgctcctgtgcgaaggcgtcggtaggatgcacctgcaccgacaggtctttcttggcgtcgataaacttgataagaatcggcagcgtgttttcgcccttatggcgctcgcccagatactccggatgtgttctgagcacctctgccaattcctgtccatcgaatgcaccgcccaccacatagctgggtccatcggggtgcgtggagcactcccatgtctctgccagcggggtcaaatcaatgtttttctcaaattcatcatttaaacgactgccgccccaaagataatctttaccggacggtcggagcaaaagaggctcattcttatatggcatagatgcctcctgcattgtatcaatattccagttcaaatttctgcttgtcgtggacgttgatgtcctcgcccagttgtacctcaatgagcttcagctcggtatctgccataaccgtatgacggcagccagcggacatggtgatcacgtcgcctgccttgaccttctgctccatgccgtccacaacagtctttcccttgccggaaataacgacccacacctcatcacggttcttgtggctgtggtagttcatgctgtgaccggggttcagcgttaccttaatggtcagagaggtggtttccacgtccacaaccttaaagctgccccaggacttttctgcgaacataatctgctgctcgaacttgtccacgaagggcttaatgtaggagctttgctccttatccgaaaccagaatgccctccggcgatgcggagataacgacatcatgcagccccattgccagcacaggaacatccatctcattgatgatgtgcacatcagaacacttgtcgttcagttcgcccttaccaataacgttttcttccattgcctcggtcagtgtgttccatgtgccgagatccttccacataccggcaaaacgaacgacttggatcttcggctcatgctccaccactgcataatcgaaggagattttcttcagcgtatcgtacttatcaaacaagtcctgatagtcagtaaaatccatcagctcatgagccttgttcatcacatagcccagcttatacgcaaagacgccgccgttccaaagtgcgccctgcgcaatatactgctctgctacatctgcagtcggcttttccttaaaggtctgaaccgtagctacatggtcagcactctcaggaataatataaccgtacttttcgctgggataggtcggctcgatgcccatcagcacaaggtttgcatcgcatttatccgcctgctctgacaattttttcagggcttcaaagtaattatcctctacataggggtcgactgggcatacaaccacggattcagaagggtcaatgtgcatcacgtccaccaaataggcagttgccagtgcaatcgccggaaaggtatcccgacggcagggctccacgctgatacccacgtcctcgcccaactggttgtgaatcgcagaaacctgcgtcttgctggtagcaatggtcacggttgcatccgtgtctaccttcttgatctggcgatagacacgctgtaccatcgactcataggtaccatcttccttcttgaagattttgatgaactgcttggaacggatgtcattggacaaaggccacagacgcttaccggagccaccggacaacaaaatgatattcataaacttctcccttatcggaaagagccgcaccccgattcaggatgcggctccatgattctttagcgctcggcacgcatcgggttgttcaggaagtcctcgtaggacaggcgcaggccgtcttccagctcggtcttgtaggtccagcccagattggtagccttggacacatccagcagcttgcggggagtgccgttgggcttggtggtatcccacttgatctcgccggtgtagcccacaactttggcaaccagctcggtcagctccttgatggtcagctccttgccagtaccggcgttaaccgtctcattgccagagtagttgttcatcaggaaaacgcacaggtttgccaaatcgtccacatacaagaactcacgtagcggagagccatcgccccagcaggtaacactaggcagattctgctccttggcctcatggaaacgacggatcagtgccggaaccacatggctgtgggtcgggtgatagttgtcgttggggccatagaggttggtaggcatcacgctgatgtagtcggtgccgtactgacggttcaggaactcgcagtacttcagaccgctgatcttagccagtgcataggcctcgttggttttttccagttcactggtcagcaggcagttttccttcatgggctgaggagccatgcgggggtagatgcaggaggagccgaggaattccagcttcttgcagccattcttccatgcagagtggatggcgttcatctccagcgtcatgttgtcatacatgaaatcggccagtgcttcctggtttgccacgatgccgccgaccttggcagcagcaaggaacacatactccggcttctcctgtgcgaagaactcttccacagcatcctgacgggtcaggtccagttccttgtgggtgcgggtgatgatattggtgtaaccctgacgttgcagttcacgaacgattgcagagcccaccatgccacgatgacctgcgacataaatcttagcattcttttccatcataacagaattgccttctttccaaattacagaactgccttgagtgccttttcgcgctttgcacgctcacggtcgtgctttgccatgatctccaccagctgctcgtaagtagtggactgcggattccagcccagaaccgtctttgccttggtcgggtcaccccacaggttatctacatcggtgggacggaaccactgcgggttcacgcaaaccagcatcttaccggtagctgcatcatagcccttctcaccgatgccggtaccctcccagcggatggtgatgccattggcggcaaatgccttctcggtgaagtcgcggacagtgtgctgcacgccggtagcaatgacgaagtcttctggcttatcctgctgcatgatcagccacatgcactcgacgtagtccttagcgtaaccccagtcacgcagagaatccatgttgcccagttccagatgatcttgcagaccctcggcgatacgaccggcagccagcgtgatcttacgggtgacgaagttctcgccgcggcgctcggactcatggttgaacaggatgccgttgacagcgaacatgccgtaagcatcgcggtactccttgaccatccagaagccatactgctttgcgacagcatacggagagtaggggtggaacggagtggtctcgcgctgaggaacttcctcgaccttgccgtacagttcagaggtagaagcctggtacaccttgcaggtcttggtcaggccgcaaacacggacagcctccaacacacgcagaacgcccagtgcgtccacatcgccggagtactcaggtgcatcgaaagaaacctgaacatggctctgtgcagccagattgtagatctcatcgggcttgatctcgcccaccagacggatcaggccggaggaatcggacaggtcgccgtcgtgcagggtgatagcgttcttctcgatcaggtggtcgatacgagcggtgttagagatggatgcccggcggacaatgccgtggacctcatagcccttctccagaaggaactctgccagataggaaccatcctgaccggtgataccggtaatcaacgcaactttagacatatattgacctcaactttcctgttgttctttgcagttctctgcttggttttcttgtaataccgtatattattttagcgaatcccgaattaaaactgaattcactatcttgcctttcgaggcaaatcgcttacacaatattgccctcttttgaagaaagccgttacattcacacgaccgcattagagtcaatacaacgtttaccacttttcacggaactctgatggtgtaattccctcgacctgtttaaagatacggctgaaataatgcggtgcgcccaaaccacactggtatccgatatcctccaatttcttatccgtaaagcgtagcatctgcttggcttttgtaatgcggagattcagaacataagtattgatactcacaccgtactgttccttaaacacacgggtcagatagaacttgctgataaagaactggtctgccaatgcatccaatgacattttttcggtgtagtgtgtatccagataatctcgaatcggttcaaggttctgctttttcaatatagcatctgaacgctctgctggatgccatgactctttcatgagtagcaccagcagttcatttaaaccgctgttaatccgcatatcccggatgtaatcatctgacgaggcaagcataaaaagagacttatgcagttctgcaaatgcggtaatattctccggatggaatactgggcaacctccacgttcttgatatttcctgtagatgtcctgcattgtaacaccagaaaagtgaatccacgacaaagaccacaaatctttatcggtactatgggagtacggttgctgacagtcaataaacacacagtctcccctgcctagcttatatttctttctctgatactccagctcaccagagccggaattgacacagaaaaacaaatacgaggacaaatgagtacgggaagatatatgaggctgctctgcttgcagactgccaatctcctgaagatatagaagtgcagatctagcaaaagtagtcggtgtatagagcacacggttagaagaaactattggggaggtgtccagtgaatcatgtaaaaacaaatcattcattgccggacgcctccccattgtttggctttttcgctattttcctttattttcgctttccatagaacagataattcgtagcaggtatgctcttcagcacaatgattacaattcccataagcaccacggtacagattaaggatactgtgaaagtcgtaaatccaggaaccgtaaaaaacgcatcattcgcaaccttggagaacaaatggttcgtatacatatgtgtcacataaatctcaagtgtatacattccaacccagtccatctttatcttctgtagctgaggaatcagcttttttaccacatagtaaaggacatagtttccggtggctcctgctatgaaacgtaacacaatgccaactatgttatcgtctataagatacaggtttacattaaaagtagttgccgcaaatatgcaaatgcagataaatgccactgtgtcataaaagaccgttttctgcttttcccagaaggaatatgtccatcttataaaccagcctagtccataaaataagccataatagagaacgaacttgattccgagaaaatttacagatgtcagttttgccaagacaagaagaatgccgtagctcccaccgaatgtcacagccacagtcactaactgttttacaaagccattgactttacctcgaatcaaattacataaccccacaattagagatagaacgaataccacccagataaaccacagtcctccgtccactctccacgcaaggctgctcaggccagtcaacacgttgtgctcataatttcccaacagcaatacactgatcaaaacaaaccatgtaagaaacggaagaagatacctctctacgcttttccggtatcccgccaacagcttctcagcatttttcacatctctgaacgaaaagtatccagacaccagcataaagcccggcatctataccgcccaaatcagattctgcaaaatgttatgattccagtctgaaactgagtattcaaaaatatgtccaaggacaacaagcacaatcagcacgcctttataacaatccagtgctttgttacgttccttattgattataggatcaaagccatcttgcttccttactaacagattgtcactcatttcaaatctcctgtcaattgtcaatatcatatttaatcattccagaagaaataataattgtattctgtaacccactctggtcgatagataattgttccagcagtaaatgttaacagcataagtatacttgcaaaaagaacaatgcctttgtttgtttcaatataccatttcttttgaaaataatccggtattattatcaacagcattatcgaatagtacaaatcaagtctcgaaagcgcaggtattcccaatgataaaattgaaatcgctaaacatataacaggaatccactccttaacccttatatctatcaattcaattttattagcaacactcattttcgcattgccatctccaagctcatcatcgcccctatcaatattattattcataaatacaattattccaagaagtaacaaatttttcgcaatgtccatgtaaatagatgttcctgccgaaattgttgaatatgatgtctctatttttaagaatgacagcaatccagtaattttcccaccatagcccaatacgactgcaccgcagagaaccgctatttttttacttttagtaggctcgacatataataggagaaggtatccaagtgcagcaaaagccgtcttatgaaaaaacgatgcaataagaatgagtgcaacaaacttgaccacatgacgcttgttcaacatcggaatagccaataaaactatagacaatgccaatacttgtcttaaaagattaatataatttccccaaaacacaagataaaaaagtataactgaaattgccaaattaggggaatacatcttcaaaaatttaacaagtactgtatatgatataatagcaactatgctaataaaaatctgataatttccagttatccaaaaaacagccttttcaataagctgataacctttttctattccatttagccaattaatatgttcaattgacatcgtacttattgattccaatctcgccacataattaaacatatgtgcataagattttgtatcatttcccaccttcattccacgaagacacgttagcaaaagcaaaacacccattgataggattagaaaaaaggaatcatttttgcaccgagtctgataaaccaaatgacgtttataaacaaatatagagactaataataaatatactaaaacagagagaaagaaaatcattttgattttgcccctttctctttgatatgctcccattgacttatagcgtaattccattcaccattcatcaagatacatgtcaatgctaaatataaaataaaatacagtaaagcacaaataattagattgtgaatcaagcacaataaaataaatgcaactagcaaggctgcaacatatccggcttcttttttgcttggtatcatatacttaaatttattcatattcaaccccagccaaatcaagcaactaatcaatgttgctcccgaataaagaactgcatttggatgcaaaattgccacaataaagtctagggcaccggctacgctaagggcaatgagcagagatctcatataggtctcctgcattttatatatcttatataaattcacaaatattgtcagattcaaactcaagaaaacctgtgtaatcaaaagaagagaaacaaggctgattgcactgttatatttgctcatgaacacattgataataaacataatagcataaatcgcaactggcataagcattagtatcgttacaagcagccgcttaattctcacttcaaaagcatgatcttttcttctactcaggtgactataaagtgtcatcgaaatcggtgtaatgaacatattaacaaccgtgagcatctgacttgcaaaagagtacattgaaaagtcagtaatgccaagtgtaaattttataaaccacttatctattccaataaaaagggtatatgcaaaatttcccagcataagcaaaattcccattttgatataattcattagtacatcaaatgaaaaactgcttttccttatccatccggattttttgaaataaaaagtacccacaaggaaagaaatcaactgtactataatgcaaacaattatatatgctctataatctcgaactttaaagagtacaagaatgccattcatcagcagattaaacattgtcgacaaatttaacatccatgtgtactttttgaaatctcctgttgcctgatacacatatgagtaaaatgtatatacaatagtaggtacaactgttaacccaaggcatacaatagtaaagtcgtggcgcaggattccccataacaaagcgattaacgacaagccccctgagaagataaaaattgttgcaagctgtcgacttatctgttcggttttaatctcactttctttttttccaccatagtctaaataaattccatcacagaaaccaaaatggagaataccaatatatgcggcatagaatgtataaaccttataatatccatagtcatcaacagataataccattggtaccaagaaagcagtcacaaaggttactaacatcttaattaagtttgaagagaaaattttaaatatgtcttttttcatttgttcgtaatcctacttaccaaaactctaagatattgtagcggaacattaaaaaaatccaaaaaatccaacagtagcatctgcgctttgctacatttcaaatattgctttgcataatagtttcttgcttgcattccacatttgtttgcaaatttattaactttgcgccgattatttcctgtagacttaccgtgttcgtgacgcacaataaactgtggcataaaaagtagttctttaccaatattttctagttttttgcccaaaatatgttcttcaaaatatagaaatgtattctcatcaaacttccctatacgatcaaacacctctgctcggattacaaaaaatgccccacttggtacttgataacggatttcctcctgatatggcatcttgtcagcatatataaatctttcgtaccgctttttgcaaattaacttcaggaacaaattcgatagcatgcaaagatccacataatctggcactcgacgaatattctgttgcattcgtgcatcatcaccataatagcaattccatactaaaggttgcccaccgaccacgttctctccagattcttctattcgagcaatcattttttcaatcgtactcttattcaaaataagaacatccggattcattattacataatactgtggactatacttttctctaacaaaatcaatcgcttgatcatttccagtcgcatatccactgtttttgtcaaaacataccgttactatatttttctccgataagtttttgcatctttctctatcctgttcttttgtagatgcaccatccgcaatgcaaacaacaaaatccgaagttgtagcggccttttttacactctccgctgccgcaacggcatcatctattgtgttgtaattcaaaattatgactgcatataaaactttatccatgctagtatttactccaccgcaattttaatccagttttctggaatcatgtgcaaattgccataccgttttgccggacaaatatgtaaagcatcttcatgttcattaagccaagaagcccaccagctgaaagtactattagctgcaataatgtgcttgcaattcttcatcaacatcatctcatcaatgtccgcatgcttggtatgcaaactgacaaaccgaaagttttctgtttcaccaaaattctgtttcacccaatcaatatcatctgagaaccagaaaaacacaggattttcaagacattcattcacatactttaatgcattatggtaatactgctctcccaacagatagtgattagggttcggatcattctgggcactgagaaaatctccacgccttacatgaacggcaatagaattgcatttatttattttatcgagttcttctaaaaattcagtttccggtttatatgtcggattgaactgctctactagatattttttatagtctttgaagtaaagttcactttgataatatccgtctatatatatattatcatctttcacttcattgaatttttccactaaatcacttctgcattcaagcatataagtgctattttttccacaacgaattatactccagcccacttgccgcagtagtttattcaaatatttactcttaagaatatttatcttaatattctgctcatttgaaatcgtaacttttgaatctatcagtagcttatctaatttatatccacgcagtgtttgttttgggtaaaatgaagtatcaattgacattttctgctcaagccgttttgacatagcatatccagttgcatactgaaatagttggtttcctaatccgccctttgctcttatagtaatcatggcttttccctcgctattaaatatatttggaaccggatatggcagccagccatattccattccatctcgttcctaagctacaataagagaggcatcggccaacgttcacctcgcagggctttcacgttcgtatgaaagacagttgccatctctctgtaaaaagtatctgcattggtgccagaagcacggttataatttcactcgttcaaaatcggataaaatttatgcctgtgctactaacgctgcttctcttccaaaatctgcaacctcaatgttccttgttcagccacaggttgctcgatttttaatccaactatacttatctgttctttatattcgcagaacagacttcctctgttctcttcaatcgaactacttctctataatcttccatcttggacagccacgattaaagtaagcttattctatcaaatcagcgccacatttctacatcaaataatctcgtattaaggctattcgatttcaatcaaatcatttcggttattatagtcctctactattgaagcaatagtttttgatatttcttgatctatgtaattcatcccatgtctggcctcaacggatttcgcaaatgctacaatttcgtagcggattccttcaccgtcaagttgataaaaaaatctttgattgtcttctggattctcgtaccgcacttcaaaataatccgttttccaccagggggcaggaacataaatatatcctttcgtgccagtgaccactaactctccttctgattttgccgccttagcaacttttattgatgccaccgcatcggcataagtgaagtcaattttagtaaatgcatccatattggcgtttttttccaggaatttcgttgttatcactttttttctatagtcaacgcccagaatctgaaaaacaggaagcagtgcaataggtgcccactcacacatactattccatttataagttaaatctacaccttctcttgaaatgccttctcttaagctggtacatactgcatcaacagaaaccacttttccgatttttccagattttgccagtaaaacgagacgctcatatgctgtagaataagcagttttgattgcttccataagaattttcccctgcttctcggcaagagcatacagttcttcacactctgtacctttcagggctattggagattcgcacaatacatgtcttcccgctaacagagcacgcctgatatctttacaatgattttccggctttgaaacaatataaactgcgtccaccttcgagattagctcgtcataactagtcgtataaagcaatccatcaaattcaggttcatcagctgtaatagacgaacatataccgatcacctcaacaccatttacgtacttcgattctgacacgaattttgtacgaaatggagcctctcctacaattcctatgcgcaatttacattgctcactgcgcacttcagaactggaaatcccctcggttctcggaaggtacaccaccttgcagtactcattcaagtaatcgaattttccaacccaatcagaaccaactgtgaaaatatccacatcgtacctgcgaatatcgtcaattttttgcccctcatattcctctacaatgattttgtccgcaagacctgtggcacgtacagcctcaatacgctccatcagtgactgctgcacattaatttttccacgcgttttatcaaagtcatctgccgtaacacctacaattagataatcacccaacgcttttgcgcgctctaatagcttaatatgaccataatgaagtaggtcatacgttccgtatgtaatgacttttatcatatttcaattccttatagttctattgtatagttgtatgttgggtatacttctccgcccattttcaacttatactgctccgttcccctgcacaaatcaagactcttaatctgcgtgttatccgccaaatatttaatcgtactatcaactaggagcattcccggagagtagaagccgaatttatcatctatggctagctttggaatctcaagagagctcttttgattgtttatgtacccatacataaatgccgcaacttctccgtcaatcaaaaacgcagccactaccccttctcctcttcttaacagcctcgtattgaagtctagagttttaattgttaatttacgcaaaaagccaacaccgtactttgttttctgcctgctataatataacttcaaacagtcctcaattattttctcatctatatttcccatcatgctaatctgaaactcgtggtttttattgtcacgaattaatcgatttcgtgcagtccgcaaattctgtttggtgcttttgctaagtgccgccttatagccgtcataatcactgaaaggaattgttgtattatcgacaacttcttctctggattttcgataaccatcgctccctacaattgtgtgtgaaacagaatcgtttggcatccagttccaatgcagcctctttattccttcgtttttcatttgcataattaagaatgaaatcgccttttcgatttcattctccgacgcatcagaagaataaaaaaagtccacgaaatcaaaccactcgttggtacccgcaacaactgcttcattctttctaatgaacaacggcgctatcagtataatcttattctcgactgtaacaagataaaaccacattaatccatttcccttgagaatattgcgaatgcgatacggtccatcttttacctcttaaacgacctcaatattgttgcagtagtgccccccccccccccccgaaattattattctttatgatttctttaaccaatcgcgtatctctcgtcttctctagtcgaatcacagtaatcccctccgtagcatatcttcaaaagcattcacaagcttagtattgtcctcttttcttaacgcaccaatatgaccaacacggaaaatggtttccttcatttcaccaccattgggacaaatccagataccatactcatccttaagtgttgtaaaaacatcgtaagccgaaacattcaaaggatgtaacggcgttaccgcattggacatcgattccgatacgatttcaaacggaagtcccttgattttttgtctaaaatcccgggcaagttcagaaatctttttggtttcgctctcaacgccacctgcggcttcgatttccttcaaccgaacattaatctgtcgaagtgttccaaccgctggcgtgaaaggagtttgcccccgttcaccattctttagcgcagatttcaggttcagatacatacacttcacttcacggctctctatccgtttgacagcctcacttgacaaaacaattactgatacgcccggagggcaagccaatgctttctgggatcccgtaatcatcacctgaacgcctaatcgcttcatctcaaactcatccgccaggaatgaactgatagcgtcaacaaccagaaagattccatttctcttgcagaactcgctgatcatttccatgtcgtaatgaacacctgtcgatgtttcatgaacattgactaagaagcctgtaaaacccttgccatcgtataaatccaactgttctctttttaacgccttacccggctccaagcaaatctcttcatagggaatctcatgaatttgacacagttccacaaagcgatgtccaaagctaccgccatttacaaccaaaaccttgtccgtcttatcaaagacattcataacagtggcttccatagacgccgttccagaaccagtaataaagactactctggcattatcttcagcctttgcaaatttttttatcaaattctcattttcaagcatgactgccgaaaactcaggggttctaaagtacggaacctgttcagcgccaatagagcgcactgcatcatccgacattaccgggccaactgtaaaattaagcattcttattttctccttatactcttccatctgaagtcataatttactattgcccaagatctagcactttagggcaatgagtatatctctcattttccgggggaagctgcatataatttccaaattcattccgcaaaaacgaattccaattatgcggtgcacagattgtcgtgtttccaaattgcaatttaataattgggaaaatatcctcatagttctgcacatcctcggtgcaacaatgtacatacttggtttcttctttattatacttttgcattgttttatcaacgaggttgtacaagcattttttgggaactggaatcagtagactatgaattccctttcgaattatgtttgcaagacgtctttttttttcatttttctcatttgtagcctgagaaacactttttgaaataaaaagatgccgtgccagccgtgcctttttcatatgtttttttcggcattcttcatcatccgcagttttatcatacggaaaaacatcaacaaatatgccttgatgaataggcatattctcaatgtagtcttccgcaaatcttgtaccatctttccgaacttttgcatggtaggtcggcgtattaggatccacaagaaaatgctgcaaggtgtaccctttcttcaaaacttttggcgcctctaagataaagcgatcataatccttacgtaacatacagatatcgatatcatcgtcccatggtatgaaacctttgtggcgaacagcgccaagcaaagtgccataattcgcaaagtattgtatatccagtacatcgcatactcgttcaatttctttgagaatatctatttcaatttcttgtaagcatttcaactgttctgctgtataaactgccatctttatttcctcaacactttctcaaacataaacttccgcagccagttcggagccaacgatgatccaccacgaatcacacagctctttatgtactgaccattcccaataaatccttgctgtttcataaatttgaatagcttcgcctgcgtcttggcgtatttccagcctgctcttcttaaatacatatccgagccagccctcatatgtagcaacggctcctgaatgttatagccctgataaccagccatcagcatccggagccaaaggtaatagtcctccagcaaatagaagtcctgataggaaccaactgcttcaactgtggattttttatacatcacgcagggatgattaaacggattgcgcttctttgcaaattctacaatttccgcattcgtctccggtggcacgcgcttcgtatcaacggtattcggatcagtggtaaactcctccacgatgccggagcaaatgctcacctccgaatgtgtgttaaacacagcaatctgtttttcacaccgatctggataagcgatgtcatcgctgtccatccgggcaaccaactcatttttgcaatgcttgattccctcattcagcgcattgccaagtcccccgtttttcgcaagtcggacaacatttaatgtgtcacccatctcctgctgttttgtagcaatcacgccatctagctgttcgttcagcggtccatcgcataccaatacgaaatcatttgtggagagcgtctgcatttgtatgctctctatcgcctgcttcagatattccggcttccctttgtgataaaccgacataagaacggagtatcctctgtattccacaacactcatagttcctctccgcatatcaaagattacagcccagactcatctcaaagagtctgagccgttttttcttataaagctctactaatcgtcctcgtcctcagcagtgtgagtcacactgccgctatgtcttgtaccgctacactcatctacgctacgataacccctgcctttattccaggttccactcattcacgctacggtagctcgtgagcttatgccggattaccccacacgaatgagcatctctgcgaccatgtggttatcaccatcttgctcacatctgccttgttatctccaagaccgggatgaaatcgcagatgatgttatcatcgtcaagtcccgaaaccgctatgtgaaagtcaccgtaatctcggcacatcccctcacagtgcaatcagacataaacccacgagctaccgtcgcatccataaaagtgctttttcggggcataaacgtctcaattcacactcgttctgccctctctcacgcccatgctctcggcattttgcgctactaaatgcagtatttcggcttcatacagggtaacctgccgactttccggcttaacgctactgtaagaggtgtatttatgcccgattccactctggaatcccttccaatttttagcagcttaaaatgcacagaatcatcgatatttagcgattttctccactcatagcagtggtttgaccctcagaaatcccctcggtgctctccggcataaacaggattttcaccgttgccagcatgatcttcaagtcttcaatcaggctgggatgtgcaatgtacatcaaatccatctgcaacttgtcatagggagtggtattgtacttgccgtacacctgtgcataaccggtcaagccagcctttgcttgaagccgcaacgcaaactctggcatctcctcgcaatactgggcagcgatctcagggcgttccgggcgtgggcctacaatggacaagtctcccttcaagatattgagaagctggggcagctcgtccagacggcaggcgcggatgatatgaccgaccttcgtgatacggtcgtctttgtcaccagtggaaagacgcgccacaccgtctttttcggcatccacacgcatggagcggaacttcaaaatctcgaactgcttaccgtctttggtcaggcgaacctgcttgtaaaaagcaggaccaccatcggatttgactgcaatagccgtaatcagaaacaccggactcaggataaccagtaccaccagcgagatcacaatatccatggcacgcttgacaaacaagaactccgggcttgccatatagcggcccacacgcagcatgggcagatggaacatatgcatcggctgggcaccgctcataatcacatcgcccacacgagggatcacgaacgcattgataccctgtcccacacagtatttcaggatgatattgcgctcatggctgtggacaccgctgatgaacacgctctgcattccatccagcagactcaggtcgttcaggcactcttcaacgttcagtgtcatcttgacatcgtacttttttgataggccatactcattgataagcttttccagtccatgccggacatcatagaccactgcagtgggctgaggcggaaaggtccggaaataccagcgatgggcacatcttgcccacagggttgccatcatgacctgtccgacaatcgctgcgatgcccggcagaagattgcagagccgccgggccatcaggcagatgacaatgtacagaatgccatcggttgccatggctgccagtacctgtccgtagatcaactctgaaatgcgctgcaaagacatccagaacgcatcgtagactttacccaacagaaagaacaacaccgcaaacagaccgatcatggtccagttgcccctccagccaaactttgcatagacctgatacgaataatacagctcccaacaaagtgcaaacggaattgtgatcattaccaaatcgatgatttttacgatcttcaacatcacatcatgctgaaattttgacataataccccaataactcctttagctttttcttttgttcttcgctcaacttttccgacccgctttgcagcaaccgcttctggttgtacacccatcggctcagccaaatgccatccgtagtcttatatttcgccggaatctccagatttccatattgctttttatactcctgcgccagctcgtaccggtgctgccacgggtcaggtttctcccactgcattccgatggcatccagcaactcaatgcgctcttgtgataagattgcattgcttttctctggattccgatatgcatactgctgccgccgcacccattttccaagggcatagccctccggcgaaacataggccaccggaatgtcaaggcttccatttgcctcaaagtaccgtttcgctgcctgataaacctcattccactgtcggtcatagcgacagccccactgcattcctatggtttccagtcgtttgatctgatccgcagacaattttttctgctcataggctagttcttgattttgaatccagcgaccaagcgtttttccatctgctgttttataatctcgtggaacatccagatttccatacttctgcgcataaactgccgaaagtgcatacccctgttcccatcggacatcaaataccttccatgccatccccaactgatccaactgtcggatgcgttcttccgtcagctttccatcgcttcggcgtttccgcgcattgttgatccactttcccagaggatagtcatttttcgttttgtatttcgccggaacctgtaaatttccaaactgctctcgaaattttcgtgcttccttcagaccacgctcccatgcggcatcgttgcggttgccccactccatcccgatgctatccagccgtgcaatctgctgttcggtcaagttccccggaatctgtcccgcacggacacggcgttgagtcgtcagccactcgccaaggctcagccctgccggcgtagtataacgttttggaatattcaggttgccatgctccgcatagtaaatgcttgcttccgaaaaataatgatcccaactggaagaaaggcttgcctgcagctgctcgaacagcacccggcagtcatgtacctgctcaacgacctcgaaccgctcggtgacgatcttatcgccctcgccgttggcatagagccgatggaccgcctcctgcatctcgctttgcagaccggaaatgctggtcaaaccttcgaagttatcaacaacgtctaggataagtggtgtcgtattatccccggcggtcaaggctcggccgatctgttgcttgtaaacgatgggcgaaatcgtaggtcggaacaggatgaccccagaaatcccctccacatgtacgccctcgttgagcatatcgatgcagaacagcagcttcagccggtcactggtgtccgttttgaagtccgcaaacgccttatccgtattcgggtcattggagtaggcttcgtacaccaccacctctgggttgacccctgcaaaccactccggcacatgggacaccatctcgtccatgtgctccttgttggcgcagaacacgatgtacttgccgcacttattcgtgatatgatgggcaaagaccctgtccaggccatccgcctgctccaatgcccggcgcagggcatccagatatttttgattcacatcctgaatgccgggagagcgcaaattatccactcttgtctgatagcgtgccaagtctttctggtactgatagacggtggtcacatattgcggggctggcaaaatccccctgacgactgcttcgccaagggtcatgtcgctcgcgacacagcaatcaaaaagctcttcagccatgtcacagttattatccagatatcggatatttgttgctgtcagctccagaagttttgcgtccgagcataactttaataaagccaccgtgctttcgccccagcattccgcaccggcacgatggaattcatcgagtataatataggcaggtttctgcgctgcgatatcattcagttgtgcctgggtgcagcacatcagtttggcataggtataaaagtgaacgtttgccaacggaaaatccgggtcgttccttttcaggctctccagctgtgtcttgaagatatattcactgggcgaaagccagatcacgaccttctccgggttgtcctcgatcagcttgaacgcaatgtagctctttccggtgccagtgggatgaacaatggcggccttgccatactgctccatcatccggactgccgcatgatatgctttctcgttgtgctcaaacagacgcaatgccaccttgttcacccctttccgcaattcagggagtatccttcacatggaaaatggaggataccgttcctttgacatcgttgtctataatctcatcttattttatcatggttatatctgggattcaatagaaatcatcataaatgtatcacatttgaccctgaaaaaacatcgcgaaggccggattgtttttgtgtcatgcccagttctgtataataattccagctgtaaacgaagattgagaaaataaggggtcagatgagggtctaaacggcaggaggaaacagcgatggcgcgacggggagaaaacattcgcaagcgtaaggatggtcggtgggaaggcaggtacatcaaggcgcgcacaccggaaggtaaagttcagtggggctacgtctatggcacagtctatgcagaggtcaaacgggtactaatccagagaaaagcggaggcggggttctacaacctgaatcaaaccgacctgacctttgaagtactggccgaggtgtggctgtactccctgaaaaacgctataaaagaatccacctatgcgcattattcgtacacactgcacaaatatcttcttccggttttgagcaaggtgcccgttgcatcccttgaggaaagctttctggaacaggccatgcagcaaatcatcacgcccacagatgcgtcacacaagccactgggaaactcctctgcccgggaatgcctctcgatgctgcgacgtatctgcaaatatgctgctcatttacgtctgattcgtccaatggagctggaagttgcgttgccaaaagccctcgacaaaatttctgcgcctctctccccggcggaacagcagcgacttcatcaatatgtacaggcgaaccccacgcctcgcaaaatcggcttactactggggctggaattggggcttcgaattggtgagatctgcggcctgcaatggggcgattttgacctgaaactcggcacgctgaacatcaatcggacggtctgccgaatttcctgtggaaacggtcatacaaaggtagtcattcaaacgcctaaaacccgcacctcccgccgggaaattcccatcccaaagcagctatcgctgatgctgaaaaagctgcgcggaagcgccagcaatgctgcatggttcctgtccggcagcgagtccaagcccaccgaaccccgctgctatcggaaaagcatcaaagcgtttctgaagcaggcgactgtccgtcaagtgcccccgcacgcactgcgccacacctttgcaacgacctgcctgcaggcgggtgcgatgtaaagactcttagcgagctgttgggacacgccaacgccaacatcaccttgcaacgctatgtgcattctgacctgatccgaaagcgccgggagatgaatcggatattttcccatcaggtgtcaatgaggagtagaaaaacgccaagtctaatggaataacgttatatttcgctcatggccctccattttccatgtggaggatacttttttcttttttgagcaaccttcttcttaacgcaaaaaggcccctgcccatcacatttctgtgaaaggcagaggccttctgttgatagattttaatgtttcagcatccgggcaaccgcttcatccgtcaaaggcttcccgtttttgctgagaaacaggttcttgtggcgactagggtattcctttaaataggcatcccggaggctacgatacttcatcagctgcttggacagcgcaggcgactttggcaccacgcgttccttgctgcccttgccatgcttgaccagaatatagtccggtttgatgtcttccggctccatcaggatcatctcattgcagcgcatcccggtgtcgaacagcagcataatgatagtcttattcctcaccgacaggaaatccgtcccatcgtaaaatcggatcatccgcctcatctcatccacggtaaaggtatcaatgatggttttgggctgacgaagaggcttcactttcttggccgggttgtcccgttcgtccagatagccctcggtcaccagataattgaaccaagtccgccagactttgagcagatcattgatgtaccgtggcgtgctgcccatgtcctgcttttccttcatcagatcccggatgtggtgtggcttgacctcctccagttcggtgatccgtctcaattccagaaagtccaccaggaatcgtgtcgctgcccggtagttgcgcagggagcctttggcaagatggcggcattcgcagtcgtacagaaattcatcgcggagatccttcaaacacataaaaaacacccttcctctcacggaaacccgcaaaaggaagggtattgaactcgttatcctgttgtcgtaccaatcacagcatgttcgtaccagcaaagccggtaccagccgtcattcagcacggcacttcaagcacttttgagcgtagagctgtaattagcagttctcagcgaagtacttaatggtacggaccatctgagaggtgtaggagttctcgttgtcgtaccaggacacgacctgaacctgataggtgtcgtcgtcgatcttagcgaccatggtctgggtagcgtcgaacagagagccgtaacgcatgccgatgacatcggaagaaacgatcggatcctcgttgtagccgaaggactcagaggtagcagccttcatagcagcattgatggactccttggtgacatccttgcccttgacaacggcaaccaagatggtggtagagccggtgggaacgggcacacgctgagcagagccgatcagcttgccgttcagctcggggatgaccaggccgatagccttagcagcgccggtgctgttgggaacgatgttctgtgcgccagcacgagcacggcgcaggtcgcccttgcgctgaggaccatccaggatcatctggtcgccggtgtaagcatgaacagtggtcatgatgccggaaacgatggggtaggtcttgttcagggtgtcagccatgggagccaggcagttggtggtgcaggaagcagcagagatgacctgatcctcagcggtcagggtcttctcgttgacggagaagacgatggtcttcaggtcgttgcctgcgggagcagagataacgaccttctttgcgccagcctggatgtgagccatgctcttctccttgctggtgtagaagccggtgcactccagaacgacatcaacgttcagctcgccccagggagcatcctttgcgtccttaacagcatagatcttgatctccttgccgtcgacgatgatggaatcctcggtagcctcgacagtgtgcttgccttcgccgatcttgccgcagaaggaaccctgagcggtatcgtacttcagcaggtgagccagcatcttggggctggtcagatcgttgattgcaacgacctcgtaaccctcagcatcaaacatctgacggaaagccagacggccaatacgaccaaaaccattgatagcaactctaacagccatgttaatagtacctcctaaatgttcttacccttttatcggataataatcacggtagctttattatagaccaaattgcggaaaccttcaagtgcccgccaaaaaattaacaaggtaatttcacacttttttgtttttgaacgattttcacagcttttatgggaatcttttcagcaattcaaccaacggcgtgtcggggtattgcaggccttccgtcacttcctgccacccgcgccacagtgaacagccccagcgcgccgatgcagcacatgccaaagccaaacagcacatcgggcaggtcagccgccgtgatgccgtggaacagcagcaccagcacccggggcagctcccagcagaggcagagcaggaatgtgcagatcccggcctcgcacagctggcagccgttggacgtttccggcagccaaagggcgcggaccatcgccgaaagaaacaccagcgcagccagcatctgccagaccatggcagtcggttccacccggtgccagctggagctgttctccataaagcggctcaacaccccccagtagaacaccgccgtgccaagcaccgccggggtcatgctccggccgggcagacggtattctcccttatgcgtccagctgcggcccagccggatcagccagacagcgcacaccagctccagcacggcacgcaccagcgcaccaacgccggtcatgcccactgccagacgcaccgcaccggccaggccgacacacacgccgcccagcaccgatgtaactcccaccggcctgcaggcactgcgcagaacaaggggctggcgggccagcttccgggcggcaatgatgccaacgaccagcgctgcccacaggccgccgtaccgcagccagacagagcccgccgtgcacaggccggtgttccagtccgtccacagggcaagatcaagcccgcgcccaatggcaagggcaccaccacaggtgaaaatcagcacaaataaagcgttcatcagcgttcctcgatcggtttatatttctggcgcacgcccagatacttataggagggacggatgatccggttggcaaaaatgacttcctccacccggtgtgcgcaccaacccggcacacgggcaatggcgaacagtggggtgtagatatcctcagagatgcccagcatgttgtagatcaggccgctgaacaggtccacattggcgcacaccggcttgctgctgcccttctcctcggcaaagatatcgggagccagccgctcgatgctgcacagcatgttatactcttcctcaaagcccttctcgtaggccaggtgcttggcgcgctccttcaggatgacctcacgggggtcgctcatggtatagaccgcatggcccataccgtagatcaggccggagccgtcgcccgcctgtttgcgcaggatgcggcgcagatactcgcgcacctcgtcgtcgtcctccgggtgctccacatgcttgagaatatcctgcagctgacggttgaccaacaggttggcaccgccgtgcttggggcccttcagcgcgccaatggcggctgcaatggccgagtaggtatcggtgcccgaggaggacagcacacgggcggtaaaggtggagcagttgccgccgccgtggtcagcgtggaccagcaggcacatatccagcagcttggcttcctcgtgggtaaacttctggtccgggcggtaggtgctcaggatgtgctccgcggtgctctggccgggcttgggcatgtggaagaacatgctctgcttgtcataatagcggcgcttcatctggtaagcgttcaccatcatggtgggcatactggcgatcaggttgatgctctggttcaggatattctccagcgtcagatcctcggcgtgctcgtcgtaggaatacaggcccagcacgcaccgctgcatcttgttcataatattgggcgaaggagcattcatggtatccataaagccatcgggcagggcgcggtgctctgccagcagctcacagaaatcgtccagctgctcctgggtgggcaagctgccgaacagcagcagccagatgacctcttcaaacacaaagcggtcattgcggtaagcctcgttcacgatctcgttgatgtccacaccgcggtagatcagacgacccggaatgggaatgacatgcccctcctgatcctttttgtagcccacaacgtcacagacattggtcaggcctgccagcacaccggtgccatccgggttgcgcaggccgcgcttgacaccgagacgctcactcgtctccgggtcgatgtagttgtttgccagatactcttcacacagcgtccgcatggtctgcgggtccagcgacgctactcctgcatgggtatagttcatgcgcgaatttcccctttctcttatttctctcttatatatactttccggccatccaccatgatggcacacccttatgatagcgcttttgtgaagtaaattcaagtcttggatgaaatgtgcgctttttcaccccgccgtactggtacactgggcccagaaaaatgcctgtccgggagggaaaactacgatgaaaaagacattctttctcctctgcgccctgctgctggtgctgggcgcactcctgccgatcgccggttaccggctgacactggcggtgttcggcccggcacagggggcttcttccgctcccctgccggacgctgcaacttcggaagccgccccggacagcgccgccgtgccgccctccgatcaggacagcgagagctttctgctggccgaccagagcgccggggccgtggtctcggtgccccggcgggaatatctgatcggtgccgtggcagcggaaatgcccatcagctggccggacgaggcgctcaaggcgcaggccatcgcggcccacagctatgccctctactgccgcgaccatgccgccgaaccggcttccggctggctgagcgtggaccccgtccggcggcagggatacttaacagatgcagtcctccgcagctactggggcaccgcctatgaggagaactatgcccgcctctcggcgctggtggacagtgtgctgaccgatgtgctctactatggcagcgcccccgccggggcaagctactttgccatctccaacggcatgactgaagccagcgaaaacgtctggggcactgcccttccctatcttgtggccgtggacagctccaccgacctcaatgcggacaactacctttataccgtccaattcaccgccgaacagatgcagcaggctctcgccgggctggggcttctccctgaccctgccgcacctgccagctggttcggagaggccgcgctcaccccttcgggctatgtagcctccctgcccgtctgtgggcaaagcgtcaccggcccggccctgcgcaaagcgcttggcctgcggagcgcctgcttcacggtgcagtatcaggagggcagctttctcctcaccaccaagggctatggccacggtgtgggtctgagccagtggggtgccaaggcgctggccgaacagggacagagcgcggaggaaattctggcgcactatttcccggggacagagctgcggaggtgaacgggctcaccctctccgtcatcgcttacgcgatgccacctcccccaaagtgggaggccttggcagtaaatgcaaggtttgcggttttgtcaagagctctccctttgggagagctggacgcgaagcggcctgagagggtgaggatgctaacaaaaaaggcagctgacccaacggccagccgcccagaagatcaatattcagccaaacaggctcgtccaccaatcctgactgctgctttcctcgccagcagcgacttcagtctctgccgcagtctcagtttccgcggcggcttcctccgcctgcacagcctcttccagaagctccagaccatcgtcattgccatcctcggtgatgtaccagtagcaggacgcgccgccaatggagatgctggcggcagacagcggcacacggccggaggcaaccccgttggaaggatcggaacagtagaacacgccatcggtgtagtccgtcaggagcacggcatggggtctggtgcggtcgtacagcacgataccctccggatgctctgccagaatggagaccagcgcttccgtcttggccgccttacccgagggcagggtcgcataacccacatgcatatcgttgtatgtaaagctgtgggagagcccgcccgaccaggccgtgctcttgatgccgttttcggtcacatccacccagctgtccatcccatccagataggcccggcggcgaagcatcattgcggcagaggccagggtgcaggtgccgccccggctctgtttaaagtagaacccaacatcaacgttcaggtccacggccagtgccccggggagcagcacggccatcagggccatcgttgcaagcagggcagcgagagttttccgaagtttgcttccaaagtgcttggctgtttccacgtcagtatcctttcttcacaaaagagcgtttcattcactggtgtaaagtatatcattctgttactcttttgtaaacagttttgcagccattttctcaatatttacacgctttggtcacaattcaaaggcagattgcacaatcgtacagtgaagtggttggttatttgctacaaaagtccgaaaaagtttttcatcgtgcttcccacgccttctctcaactgccggtttctttttcaacgcaattatggtataatctgctctgaagttgaattttcaggagcatttatatatgaaagcaaccatcgtcatccccaacatcaatggcaaaggctggctcaaggactccatcgagtcggtctatgcccagacagagcaggattttgagctcatcatcgtggacaacggttccaccgatgaaagtctggagcaggcccgcagctactgcggccgccccaacttcaccctgatcgaaaacggcaccaacaccggcttctcccacgccgtgaatcagggcattgcccgggccaagggcgagtatgtggtcatgttcaacaacgatgcctttgccgagccgaactggctggccgagctcatccgcaccgccgagaccgatcccaaaatttttgccgtgcagagcctgatgctccgccactttgaacgggagctggccgacgatgccggtgattacgtcacctggatgggctttgcctgcaagaccggcgacggccgccgggccagccgctacaccaaacagaggcgcatcttctcggcctgcggcggcgcggcgctctaccgcaagagcattctggaggagatcggcacctttgacgagaacttcttcgcctactttgaggatgtggacctgagctggcgtgccaacaacgcaggctacaagtgtgtcctctgccccaccgcaaaatgctaccacatctgcggtgccagcaccggcgcggtgaagtacaacgccttcaagagccagcagagcggccggaacagcatcctgctccccctcaagaacgagccgctgctcatgctcatcctgaactttctcccgctggcgctgggctatctgctcaagtgctacaagttccacaagcagggctttggcgaagcctgggacaagggaatgcacgaagcctttgccctgctcaaagagggacggctcggcaagcgccccttccgcctgaaggatctgcccaactatatcctcatggagctgtggatgatttggaacatggtgccctacctgtggtatcggctggtcgtggtcaggtttgatctgaagtaatctggaaacaaaaacacccctgcgtggaatgcttcacacattccgtgcaggggtgttctgtcagatttcggttttcggttatgccgccgggctctcagaggaagcctcggtgctctccgccgcctcttccaccggggcagcctcgtcagcaacggcgctggcggccacgctggcggcggcagaatcgcctgcggttgcaaggatggcatcgttgacctcgctctcagccagcggggcaggctccgcggcagaggctgcactgtcggcagattcgggcttggtctcgctgtcggtcaagccggtcaggtaccagctgccgctctggcggctgaacaggtaatccatatacttggtgggcgtgtcggacgaggtgttcaggatgctgtcatcactgctctgggtggggatatagcccacggtaacgtggagcaggccgtccttcttgaacagtctggtgacggtagcgcggaaggtgcccacgctgccggtgacggggatcttatagcactgggtcgtctcgtcaaactcgacagtcatgtcgtccatctcaaagctcttgtgggtcagcttgaagctggggcccaccagctttgccagataggcatccacatccaccgagggcagcagcagctgttcggtgtcggggtccgtgttgtagttatcaaagcttccctgggtctcctggatgctgtacacgcagccccagacggcggcttcgcgcagagtcaggtcatcaatgttctcgatgccgttaaagggcagcgggtcgaacaggaccagaccttccagccggtcctcatattccgctttctgctgggtgtcgtcaaacagggtggccacacccttcacaccggcccgcacgaccgttacaatgcccaccagcgccagcacggcgatcagcaggccaagggtctgccgggcgcggcggcggtggagccgggcgtgtttttccggggtcatataggtcttcatatcgttatcgtctcctaaatcaggtcatcttttggggaaataccagctttcagtataccacaaactgcccgccggtgcaaaacccggggcgtggattttttgtgaaagcgcgatttattcccacgttttccagatctcgggctggtagcccacggtggcctttttgccgttgcgcacgatgggcgttttgaagagctgctgattctcgaacagcttgtcctccttctgccaatccaccagtgcatccagcagggccagcgtctgcttatcctttgccgccgggttcaccagctgctcccagccgcccagcgcgcgggccacgttctcaaactcgccccggctcatctctttttccttcaggtcgatcatctggaacttgatgccccgctccttgaaatagcgctgggcctttttggtatcaaagcacttgctggtgccaaagatctgaatgttcatcatttttcctcctggatcctgtgtgctctattgtatcatatctgccggaaaaaacctagggataattcatcttctttccgtccatacttgctttatcacaagccgcccctgagattgaacgaagggcgggccatttcagaaagagaggaacttcccatgaaagcattcgttgaccccgatctctgcatcggctgcacccagtgcaccgggatctgccccgaggtattccagatgacaggcatcctggccgtcgctgtgccgggcgagctgccgcccgacaccgtacccaccgccgtggaagccgcacaggcctgcccggtgagcgccatcaccatctcggagtaacaccttcacctgccttcccaacacgggagggcatttttgttttttctgcaaaaatcccccgctggcccccattttgtgttatactataaattgagttataatgcaatggaggagactgactatgcgtttactggtcattgacggcaacagcattgccaaccgtgccttttacggcatcaagctgctgaccaccaaggacggccgctataccaatgccatcttcggctttttgaatattatgaattccctgctccgggagtgtgagcccgacgaggtggccgtggccttcgatctgaagcaccccaccttccgccacgaaatgtatgacggctacaagggcacccgccacgccatgccggacgagctggcccagcagatgcccatcctgaaagaactgctcaccgacctgggctaccgccaggtatcagcaaagggctgggaggccgacgacattctgggcacgctggccgctgcctgcgaggcccgcagggacgactgctttctggccacgggagaccgcgacagcctgcagctggtgagcgagaccaccaccgtgctgctggccaccagcgccatgggacgcagcaaaacggagaccatggatctggatgccatccacgaaaagtacggcattgagcccaagcagctcatcgaggtgaagagcctgatgggcgacacctccgacaacattccgggtgtgaagggcatcggcgaaaagaccgccatgaccctggtcaagaacttcggcaccctggacagcgtgtacgaccatctggacagcccgatcatcaagccccggcagcgggaaaatctgctggcctgccgggaggatgcctacctcagccacacgctgggcaccatccgcaccgatgcccccatcgacacagcggaaggggcctacaaggtgaccgagggcaacaagcccgccgctgtccgtctgatgcaggagctggagatccagaccctcatcacccggttcgggctggacggcatcattccggaacaggaccccgataccctgcctgaggtggacgcagccattgcgtccctgcccgcagagccttccggccactatctggtggccgcacgccccgccgttctgggcaaaaagagcgcaatcgtgcagccggaggcctggtacgccgtgcaggacaccaccgtgtatcccctctccgaggaggagctggtctccctgctggacgaccccaaggtgacgctggacgtatttgattccgcccccctctacgccagagccatggccgcaggcagctggggcagcagcatcgtctgggacggcaagctggccgcctacctgctggacgcttccgcttcccactatctgctcaccacccttgccaccagctaccatgcaaggtcagcgttctcctgtgaggagtaccccgatgccggtttcctggcagacctcttcgccaaaatgaaggcggagatcactgaaaatggagaggacgagctctacaacaacattgaattcccgctggcacaggtgctggccgatatgacccgcaccggcatccttgtagaccgtgagggcatcgaggctttcggcgtgcagctgcggcaggagctggaccaggtgctgacccgcatcgagatggaggcaggcacctccgatttcaaccccaacagccccaaacagctgggcaccctgctctttgataccatgggcttgccccacggcaaaaagacgaagaacggctggtccacagatgccgagacactggaaaagctgcgggacatcccgctggtggaggacattctccagtaccgtgcctgccagaagctgaactccacctatgtggagggtctgctcaaggtcattggcgaggatggccgcatccacacccgtttcaaccagaccgaggcccgcaccggacggctctcctctgacaatcccaacctgcagaacatccccatccgcaccgagatgggcagcaagctccgcgcctactttgtggcaaagcccggctgcgtgctggtggatgccgattacagccagatcgaactgcgcatcctggcccatgtcaccggcgacgcacacatgcaggaggcgttcctctcaggtgccgacatccaccgcagcaccgcagccaagatctacaacatccggcctgaggatgtcacgccccgcctgcgctccagcgccaaggccatcaactttggcatcatgtacggcaagggcgcttacagcctttccaaggacatcggcgtgagcgtcaaggaagcagaggccttcctgcagacctatctggccaccttccccaatatcgacggttatatggaaaagaccattgcggatgcccgccagtgcggctacgtttccaccctgttcggccgccgccgcgccctgccggagctgaacagcaacaaccacaacatccgggccagcggcgaacggatggcccgcaacacccccattcagggcacggccgctgatgtcatcaagctggccatggtgcgtgtctggcggcggctgcgggacgagaagatggaaagccgcctgatcctgacggtccacgatgaactgatcgtggaagccccggaggcggaggccgaaaaggccgcgcagatcctgcgggaggaaatggaaggctgcgtgcactacgcggtgcccctgagcaccgatgtgcacactggcaaaaactggctggaggcccactgaattatgatcgttttaggaatcgaatccacctgcgacgagaccgccgcatcccttgtggaggatggccgccgcctgctgagcaacgtcatctccaccagcgtcaaggagcaggctctttatggcggcgtggtccctgagatcgccagccgccgccactgcgagttcatcagcgccacggtcaaaaaggctctgctggacgcaggcaagaccatggacgatgtggacgcggtggctgtcacctttgcgccgggcctgatcggcgcggtgctggtgggtgtgaactttgccaaggggctggcctattctgccaacaagccgctggttccggtgcatcacctgcggggccacattgcagccctctatctgacccatccggagctcaaaccgcccttcctctgtctggtggcatccggcggccacagccatatcgtggaggtgcaggactacacccactaccacattctgggccacaccgtggacgatgccgccggcgaagcctttgacaaggtagcccgcaccctgggtctgccctatcccggcggccccagcgtggcaaatgccgccaaaacaggcgaccccaaggcctatcgcctgccggtgccccatgtggacggtaagtacaacgtcagcttctccggcctgaaaaccgctgtgctgaacgaggtgaacaaggcccagatgaagaacgaggagatcaacgtgcccgatctggcggcaagctttcaggagcgcattgcgggcattctggccgaaaagctgctgctggctgctgccgacaccggggccaagcaggtctgtctggcgggcggtgtggccgccaatggccgcctgcgccagctggtgaacgatggtgcccagaagttgggggccaaggtctacctgccggaactgaaattctgcggcgacaacggcgcaatgatcgcggcgcagggctactaccagtacatggcgggtcacacggcgggccttgatctgaacggtctgcccaccctgcccatcgactacgaataaacgaagcaaaaccaaagctcccggagcggtgcggcattcagtgccaccgctccgggagctttttgccctgctgcgggcgcacaaccaaaaaggcaccctcgcctttcagcgagagtgccttttgtttcaagaataagaattcaagaaagaacgttcagaagggatcaaattacttgatctcgaccttagcgccagcctcttccagcttcttcttgatgtcctcagcctcagccttggaagccttctccttgacagccttgggagcgccgtcaacgatagcctttgcttccttcaggcccagaccggtgatctccttgaccagcttgatgacctgcatcttggtagcgccagcctcagccaggataacgtcgaattcagtcttctcttcctcagcggcagcagcagcgccagcagcagcgggagcagcagcagcaacagcagaaacgccgaactcctcgcagtaagcgtcgatcagctctttcagctccagaacggtcaggcccttgacggactcgatgatggcagtaatcttctcagaagccatggtaataaccctccaatatcaatggtttttgtttgtttcagttttgtgttaagcagcggtcacgcagccatcaggcagcgggctcctcctgcttgtcggcgtaggcctgcatagcaacagccagaccggacagagtgctggtaagagcacctgcgaacatggacagcataccctcgcggttgggcagctttgcgatggcgttggtctcggcagcgtccatgaccttgccttccatgaagccagccttcacgacgaacttcttggacttatcgccatcctggtacttgcacaggatgcgggcagcggacatggggtcttcttcgtgagcaaaggcaacagcagtgtcacccttgaagttctcagccaggccctccagggaggtacccttgacagccagacgcagcatggtgttcttcacgaccatgtaatcaacgcctgcctcacgcagctccttgcggagcttggtgtcgttctcgacgttgataccgccgtaagcgacgacgcagccggaaaccgcactctcaaactttgccttcagatcagcgacataagcctgcttttcagaaagaatctttgcactgggcattcggtttcacctcatttcaaaaacttgtatcgaaagccggagcaacgaaaaagcctctttcccgcactgtgtcgagaaagaggcataaaacaactttacgcgcgtttctcggcaggcggtttgcaccttacgctggactccagcacctgctgtctcaaaaacagcatcattattttaccgcaaacgcgcggtgttgtcaagcgtttttttgaatttttaaagattttttctgtcaaccgtcaggatgacagaaaaaacttcaaagcttcaaattagacaccgtacttcagggtgttcagacggatgccagggcccatggtggtggcgatggtagcgctcttgaagtaggtaccctttgcagcagcgggctttgcctttgcaatagcgctcatcacggtatccaggttggtgtacagcttctcagcgccaaaggatgccttgcccacgggaacgtggatgatgttctgcttgtccagacggtactcgatcttaccagccttagcctcggtaacagccttgcccaggtcgggagcaacggtaccggccttggggttgggcatcaggccgcgggggcccagaaccttaccaagacggccaacgcggcccatcatgtcgggggtggtaacaacaacgtcgaagtccatgaaaccgccggcgatgcgtgcgatcagctcgtcatcacccacgatgtcagcgccggctgcctcagcagcagcggcagcagcgcccttagcaatggcgcagacgcggacagtcttgccggtgccgttgggcagaacaacagcgccgcggacctgctggtcagcgtggcggccgtcaacgcccaggcggacgtgcagctcaacggtctcgtcgaacttggcggaagcggtcttgcaagccagctccagagcctcgttcatatcatacagcttagaaaaatcgacctgcttagcagcatcgacatagtgcttgccatgtttcattgtatatcctcctatgtggtcatgcgggcagtgttatgccctcccactgtttgtgtctcagccctcgacggtaacgcccatggagcggcaggtgccacggaccatgctgcatgcagcttccagagaagcagcgttcaggtcgggcatcttggtcttggcgatctcttccacctgagcggcggtcagagtagcaaccttttccttgttgggcttgccggaagcggtgttgatgccagcagccttcttgatcagaacggcagccggaggagtcttggtaatgaagctgaaggagcggtcagcgtaaacggtgatgacgacggggatcacataacccatctggttcttggtacgctcgttgaactccttggtgaaggccatgatgttaacgcccttctgacccagagcagggccaacagggggagccggagtcgccttgccggcctcgatctgcagcttaatgtagccagtaactttctgtgccatagtaaatgcacctccaaaaatctgtggtgagttgcggcgtggtctccccacgcctcccacgagcgcgtacacgatgcacacgctctataagaaccgcactgcggtcttaccttggtaaacggatgccggttggttacggcagctcgacctgcgcgatatccacttctgcgggtgtctcgcggccaaacatgttgaccttgagcttgactttgaagctctcggtatcgatgccctccacaaggcccataaagccttccagcgggccggcggtgatctgcacggtatcgccgacattgaaatcgacggtcagcggagccgccttttcaacgcccatcttctccacttcctcagcagagaggggaacgggcttggatgcgggaccgacgaaaccggtgcagccgcgcgtgttgcgcaccacataccaggtatcgtcgttcatgaccatcttgaccagaacgtagccggggaacagcttatgctccaccatacgctccttgccgtccttgatctcaggcaccatctcggtaggaaccttgatgtcacagatcaggtcctgcagatggcggttttccaccatggtctgtaggtcgttcgcaaccttgttctcgtaaccggaataggtgtggactacataccaaagggcctcattggtctgttcttccattttggttaagcctccgtttcaagatgaatcatgcgccgatgatcaggcccaggatgccgccgaaaatggcatccagcgcgatcatcacaacggctgcgatcgccacggtcacgagcacgacgatggtgttggtcttaacgtccgccttagacggccacacgaccttcttcagttcgctcttcgtgtcgcggaagaacttggcgatgtttgcgccaaagcccttcattctggctacaaagcccggctttttctcggttttgtctgccatgatgcgtccgcctttcttacttcgtctcgcggtgaaccgtgtgcttcttgcagaaacggcagtacttcttcatctcaagacgatcggggttgttcttcttgttcttcgtggtgttgtagttgcgctgcttgcactcggtgcaggccagagtgattttaacggtcatttgttgacacctccattataacggttgttttgaacctccctcggcttgcggtgcacgccctaaaaacagggcgcacttaataaccccgcaaaagaggtgatatcattgtatcacgcgttttgccattcgtcaagcggattttttgcgtttttgagacttttttgaattttttctctcctgcctgttttggcctacgccttgaatccgccgcatagatatagtataataaagtgtctataactgcttatagaaaatccggccccgggcaaagcgccccttccggccataagatcaggagagatcatgatgcaatctgaagataaactctgtgtcgtcgtgctgtttggcggcatgtccagcgagcacgaggtcagccgcgtgtccgccggtacctttgtggataacctggaccgcgcccgctacgaggtgctgaccgtgggcatcacccgggagggccgctggctgtgcaccgaggccaccagcgcccagatggccgacggcagctgggaagagctgcccggcaacatgccctgcgtcatcagccccgaccgcgccgaccacggcatgatcctgttcacctcgtccggtcaggtggaaaagctgcacgtggatgtggtcatccccgcgctccacggcctgtggggcgaggacggcaccgtgcagggcctgctggagctggccggcatcccctatgtgggctgcggcgtgctggcaagcgctgtctgcatggacaaggccgtggccaacgccctgtttgatgccgccggcatcccccacaccaagtggctgagcgcctgccgctgggagatcgagagcgacctggacggcgtgtgtgacggtgccattgccaagctgggctg

SEQ ID NO: 1102 - DNA, 9470 bp, unidentified
  source 1..9470: mol_type = unassigned DNA
atgagaacatttgaagatataaagattgcggttgcaggaaccggctacgtcggattgtcacttgcaaccctgttgtctcagaagcatacggtgacagcggtggatatcgtgcctgagaaggtggagaagatcaatcataagatttctccgattcaggacgattatattgagaagtatctggcagagaaggagttgcatctgacagcaaccttagatggagggacagcataccgcgatgcggattttgtcatcattgctgcgccgacaaactacgacagtcagaagaacttcttcgataccacagcggtggaagccgtgattgaacttgtgctgaaggtgaatccggaagcatttatggtaatcaaatcgacgatcccggttggttatacggagtcagtaagaaagaaatatcagacaagccggattctgttttctccggaatttctgcgggagtccaaggcactgtatgacaatttgtatccaagccgtattattattggtacagataagtcggatgcagaagtagatgcggcggcgcatacttttgcacggttgttgcaggagggcgcagaaaaggaaaatatagatacgctgtttatgggatttacggaagcagaagcggtcaagctttttgcaaacacctatctcgctctacgtgtatcctatttcaatgagttagatacttatgcagagatgaaagggctggatacccaggcaattattgatggtgtgtgcctggatccgagaatcggaacacagtataacaatccgagcttcggttatggtgggtactgcctgccaaaggatacgaagcagctgcttgcgaattatgacagtgtgccacagaatatgatgacggcgattgtggagagtaaccggacgcggaaagattttattgcgggtcgcgtgcttgaaaaagccggttattacagctatggcgcgaacaatgaatggaatgctgaaagtgagaaaaaagttacgattggtgtctatcgactcacgatgaaatcaaattcggataatttccgtcagagttcgattcaaggcgtgatgaaacgtgtgaaggcgaagggggcaagtgtaatcgtatatgagccgacactgccggatggaacgacattttttggctccaaaatcgtaaatgatctggtagagtttaagaaacagtgtgatgcaattcttgcaaaccgttatagcgcagagctggacgatgtgcaggaaaaggtatatacaagagatatatttcgaagagattaaaggctaagaggaggataaacatgaaaaagtatgattatttagtggtaggtgccggactttacggtgcggtgtttgcacagcaggcaaaggaaaaagggaaaaaggtgcttgtgattgacaagcgtccgcatattgccggaaatgtgtacacagaggatgtagagggtatccatgtacacaaatatggtgcgcatatcttccacacgaacaacaaagaggtatgggattatattacgaagtttgcagagttcaaccggttcacgaattcaccggttgcaaattacaaaggcgagctttacagcctgccgtttaacatgtacacatttaataaaatgtggggtgtggtaacgccagaagaggcagcggaaaagatcgaagagcagaaaaaggcagctggtatcacggagcctaagaatctggaagagcaggcaatcagtctggttggaacagatatctatgagaagctggtaaaaggctatacggaaaaacagtggggacgcccatgtacagagcttcctgcgtttatcatcaagcgtctgccagtccgtctgacatttgacaacaattatttcaatgcgctgtatcagggtattccgatgggcggctacacgaagatggtggagaaccttctggctggtattgaagtaaaggtttctaccgattattttgcaaacaaagcggagtatgatgcgatggcagagaaggttgtctatacaggtgccattgatgcttattttgattataagcttggcgcgcttgaatatcgttccgtgcggtttgagacagaacttttagacaggccaaacttccagggaaatgcggcagtgaactacacagatgctgagacaccttggacacgtatcatcgaacataaatggttcgagtttggcaaggatgatgcaggcaatgatctgccaaagaccgttgtttcacgcgaatactcttctgagtggaaggtgggcgatgagccatattatccggtaaatgatgagaaaaatggcgcgctgtatcagcagtacaaggagcttggcgagcaggaggagcatgtgatcttcggcggacgtcttggcgagtacaagtattatgatatggatgcagtaatcgcatctgcacttgcaatgagtgagaaagagctgggcaaataacagcaatacgataacaatcaaaaagagcagttggaaacagatatgtgttccagctgctcttttggtttctgtgaatttgttttgcgaaaactcaaaagtgttatcgtaacagttccagaattgtatttaccatcaggtcgttctgcatcggattcatgattgagaatcgtacaaaatgcgaatccaggccgtgaaaattctcgcagttccgaaggacaatgcccttcagattgcaatgtgccagcagggattttgcagtgacatcctcttttagaatctgcatcagcgcgaagtttgcactcggtttgaacaaccgcagattcttgtttgtattcattgctgcgtagatcaggttgcgctcggtaaagatgcgggagtgcgattcgtggatgtaggcggtatcctccagcatagcagtacaggcagctgcggtcagacaggaaatgctgtttggtgtggcggtcatattgatgatcgtcatgtttgtttcgttgttcatgatcgcataagcaagtcgcagtcctggtacagagaagaatttggatacgctgcgcaaaataatcaggttatcataggtatttaccagagagatcgcagtgttacgctcatagttctctgtaaattcaatgtacatttcgtcgagtaaaagtgcgatgccaagctccttgcatgcggctgcaagtttctcgatatctgcttttgatataagctgggaggttggattgtttggatttccgaggattacaatatcgtatgtatccgataagtgtgcaataaaatcatccatatccagatggtaatcctgattgatgtccagctcatagaagtctgtttcgcaaccatacacggataatacatgttcataatccgtggctgatgggatcggcagtaaagccttctttggtgcaagaagtgcaacaaagagacgcagcagatcagagctgccgctgccaagcaccaaatgctctggcgcacagcaggcataagaagcgatggcgttccgtaaagggtcgtagtatgtgtcaggatagcgaccgaccgcgctgatattttccatgatcgcgcgtgtcacgctgtccgggacaccgagtggattgcaatttatgtcatatcgcacagtctcatactgttcgatgcgaagtggtccgttgctcatagtttcctcctaataattagaaaacaaaccatttatatccctgtcttgaaaaaagaaagggggtttgttataatgtgatatgtgttaaaaggggatagtgggtgaactataccctcatatcgataattatacctattaaatagacgaatgacaagtaggttttcattacgaagccgagaaataaaggagataccatgaaggcgatagtagaacattacgcaaagggcgaatttcaggtagaccggcctgaggtagcgatatcagaaaagtttttaaaactgaatatagaatcgggaactttgtacgaaggtgtcttcacggtgaacagcacgaatgaccacgtcatcaaagcgatggtgtatgatagccgctatatgctgcggttcaaccagcatacatttattgcgaagaattttgatgtcggattcacattcgatgcaacctgtttggaagcaggtaaaaattacaaaggacatatcagtgtcattacggacggcggagaatttaagattctgtatgatattgacatcacgacaccatatgtaaaatacggagatcagaagatcgatgatcttttcaaatttgcgacactcgctgagagcaactgggcagaggcggcgcgtgtatttgtgcgcgatgattttaagcgtacatttatcaaccgcgatccggtgatcaagcagatctacaacagtctgatggaaagccagtcggtcaatcaggctttggaggaattcctcgtctatgtacacaagaaacgtgcgctgacattgtcagtatccaaggcgaagatcaatctggagttcccggaggagctttccaagatttcgattaacatcagcaaaaacacatggggctacagcagttcaacggtacgctccaccgaggatttcattattccagcgagaaaggtgattacaagtgccgatttttatggcaatctgtatgctttggatgtactgatttcaccggagaatattccggacggcgtgacatccggcagaatcattatcgagaatgtctaccagacaatcgagattgagattaacctgtccaagccgacagaaaaagagataaaagtgtccaaaccgggcagcaaaacacatctgattaagtcgaatcaggtgcgcttgattacgacatatatggattaccgcatgggcagaatccagcttcgggaatacattagcacgaccttatttgcatttaacaatctggcacgctatgtaccagaggaagatctgtaccgtctgggaacaatgcatatgaacattatgcagggagagacagagaaggtagaacaagaattcctgcgtatcgaggcggatgtcgataactctggaatgaacaacaagcagagttgttattatgcatatctgaaggcgatggttggcaaggaccgccgtgcgaccgaacaggcaaaggaactgattcgcagaagctaccacacagaggatgacaagatcttctatttctggttgctgctgtttgtggatgatacttataataacgatcagaccgctttgtatcgggaagttaaaaacctgtatgagcagggatacaacagcccgcttatgtacatggagctttgcgaagtcttaaacaacaacccgttgctgctgaagcatattacagatcttgaggttacaacgatccgatggggattgcgccaccagtatctgtcggacgaagtgatcgaggcgtttatccagcttgcggcatcattccgtcagtttgatgcgaagattttcgagatcatggatagcatttactccaagaaaaagagtgacgaggtgctgtcaagtatctgctcgatgctgatcagcgcaggaaaactggataacaagtaccatcggttctaccgggatgcagtggaacgcaacctgaaatttatcgggctgaatgagtgctttgtcaagagtatgaatttctccagatatgatttgataccgcagtcggtattgatgtatctgaattataagaatacactttccgaaaaagagcttgcgtacttgtatgcgaacgtaatttacaacaagtcccagcacatgaaggtgtaccacgaatatgcgacaacgatgcaggatttcatggagaatatgattatcagcggcaaggtcagcgatgatctgactgtgctttatgatgagttcttggagcctgagacggtcagtccgctttatgcgagcaagctgatcaacattatcttccgtcggaagcttgtctgctttaacaagggcgtgcgtgccgtgatcgtgacgcatcaggagttagaggaagtacagcgcgtaccgatcgtaaacggcgaagcatatgtggagattctgtcgaacacggcttccattatcttcgaggatagcgcggggaaccggtatgcgggatctattccgtatcgactggaacgtattgtagatgaaaatgcatatatggatatctgctgtaaatacagtccgcgggattaccgggtgctgctgcataactatgagcagcttggtgatttcacattcaagaaggcaatcgaggtcaatgctgcacgagatattgttaactgtgatgagatctcctatgattacaagcagcaggcatatctgaatattattgaatattaccatgagaatctggataacgaggtgcttacaaagtatctcgaaaaattggatatcgaatacttaaatcacgcaaatgcacgtgtgatgatcgcttacatggtcgatatgaacatgttcgacaaggcatttcaggcggtgaagctgtatggcttcgatgagatcgacagtgaagagctgtatcgtctggcggattatggtgtggaggacagcaatggcttcttaaatgaggatctgctttccatctgtatccatctgtacaaatccggtaaggtcaatgagcggattttggtatatatcatcaaccattataagggtgacttggaagaattggcaggtatttttaagacggtgcgtaaccgtgtcagagatatttccctgctggcagaaaatacattggcacagatgatgttcgcgatgggaaatgtcgagtacatctacgatatctttaccgcgtattatgcaggcagaaaccgtggactggtcgtaaaggcgttcctgcggtttgcatgctataactatctaatcaaagatgcacagattccaagtggtgtctttgactgtctgtatcaggagattcagaagggcaatatcgaggatgagatttcccgtatgtccatgctgcatcacttctcgaagctggatcgttatacgggcgagcagaagacgtggatcaaggatgcggttggcaagtttatggatgcaggcaagctgcttccgttctacaagagcttccagtcctttatcaagctgccacaggatgtcatgctcaagacctatctgatctacaagagcgagccgggcaaacaggtaacagtgaagtacgcatttgatactggttccagacagaatctgatctacaagacagagcttctggatgagatgattccgggcatgtatgtgaaggaatatgtcgtgttccacggcgagcgccttgtctatgaaatctcggatgataagcagggtacttcttatgtggtagagagtgaatcgctgaagtccaaagcgtttaaccgcaaagaccggaaccgctttgagattatcaacagcatgcttgtcaatcaggaaatgcgggaagataatgagctgttagagacattggatgtttacctgaatacggtacatctgtttgaagagaatttgagtatattgtaatatcgcggggaaacctgtggattgcaatgcatagaaatagatataagtacgaaaggaaaaagacatgtcagaggcgtattatataggcatggatctgtgttcggattccacgcagattagtttttataacgacatctcgcgcgagccggagacagtcaaccaattaaataacaaagaaacatatatgatgccaaacatccttttcttcggcttagagaccggagagtggtatgttggctccgaagcttccgaggcacgtttcaaggagcagggtatcgtgttggatgagctgtttcagaatgcgcgcagtgaggagactgttgaggtgcataatacgcgttacagttatcgcaagctgtttttaatgatgcttaaaatgcatgtcgattctttcctgtatcgttatgagggcgcgacggtaaagaagcttgtcattacgattccagaatataacaaggatctgttccgtgtactttcaacgttttacaaggagcttggtgtcgagaaggagcaggtggagatcacgagccatcttgacagtggtctgtattacatttttaatcaggatgaaagcctgcgcacaaacagtgtgggattgtttgattacaatacggatggcctgcattattacagaattgatatctcgcatggacacgaactgaacacgatcagtgtcacacatgaggactattctgagaatttcaatctggcagccttcggcggtgacaatatcctgatggatattacatttgcaaagattgtggcaaatgagacaaagaaaacatacatttcggccatttatctgaccggactcggattctccgagaaatggctgaacaaatcacgcgagcttctgacgcagggcagacgtgtatttgccggacagaatatctataccaagggtgcctgctacaaggcagtcggcggtgaatatggcgaattttataagaagtattttgtagagacaaaggagaatgtgatctttgatgtcggaatctcttcggaggacgaggaggatcggtttattccgatcgccttgggcggcagacagtggtacaacatccacggaaagatcagtattatattggatgatacagagtccctgactttggtataccggaaccggaagaccggagaagaagagcgggaagtcgtgaagctgcacggaatcccgaaacgtccgaacaagacgtctaagttctccgtggaggtggaatttgagaatccacatcatggcgcatttatcattaaggatgttggatttggaaaattattcccgaccacgaacaagatttatcgtaaggagtttgatgtttaatgtcaaaaattatcttatgtacaagaaaagaagcatcgcatccgttcatctttctgaatacgaaggtggagatcaacacctacgaggagctgtgcttttatatctacaataataccgtgctgatctcgaagtcttctctgtctgagaagctgtttgactggattcgggatgagctggatatgccggagcttgcagcgaagctggtagcactttcgaacaaggcgacatttgcacaggatctgctggttgaaattttaaatgccggggattactatacaccggacgagattgcaacttatgtggaagcatggcagaaatatcgtcggctgacatcaagtcagcgtaagaaattaaaggcagacagttatcttggctaccgcagatacatcaaggcggcatcgatttacgatgagattctggacaaccagcaggatatcacagacaaggtatttcttggaaatgtctatcacaaccgaggtgtggcagcagccaacaacatggatgtggaagatgcaaaaagctatttcatgaaagcgtatgaattaaatggcaacgaggagagtctgcgcagttacctgatcgtattttcggcagggaacgatgcgacgacactgaagcaggaaatgcggaagtttgacctcgatgaagataattttgagaatttgatgattgagatcggagattcgaatgaggatgtccgggagatgacaatcttctctatgttacaacgtgcggtatacaaccgtatgaataaggacatgatcgattacgacaagcgaatggatattatacttggacaattgaaggatgaattcagagagcaggcgatttga

SEQ ID NO: 1103 - DNA, 24819 bp, unidentified
  source 1..24819: mol_type = unassigned DNA
atgccaaccattgccatgtatcccggcagcttcgatcccgttaccaacgggcatctcgatattatcaagcgctccagccgtatgtttgacaaggtgatcgttgcggtactcgtcaacagtgccaagacacctctcttcacggtcgaggagcgcgttgccatgctgcgggaagcctgcaagaacatcccgaatgtcgagatcgactccttcaacggtctgactgtcagctttgccaagcagaagggtgccaccgtcatggtgcgtggcctgcgtgcagtcacagactttgagaatgagatccagcttgcccacaccaactacgccatgatgcctgagatcgagacggtctttctggcgaccgccatcaagtggagctacctgtcctccaccatcgtgcgggaggctgcccactacgggcaggatgtttcccgctttgtaccccgcaatgttgagaaagccctcgtcgccaagcgggaggcaggggagttataacgcattcacgccgtgcgccttgccggcctgaagataaaaagttactcaatagtccatccaaagagaagtatttttaggaggctacttatgaaaaagatcgtcatcgccagcgcctgccgtactgccattggcaagttcggcggcaccctcgccaatgtccccgccgctgagctgggctccatcgtcatcaaagaggcgttggatcgcgcccatgtcaagcccgagcaggtcgatcaggtctacatgggctgtgtcattcaggccggtctgggccagaacgttgcccgtcaggcttccctgaaggccggtctgcccatcgaggtccccgctgtcaccgtcaacgtggtctgcggctccggtctgaactgcgtcaacatggctgcccagatgatcgaggccggcgatgccgacatcgtggttgccggcggtatggagaacatggacatggctccgttcgccatgatgaagggccgctacggctaccgcatgggctaccccatgggcaagagcgagctggttgacacgatggtcaacgatgctctgtgggatgccaccggcttcaacatgcacatgggcatgaccgccgagaatgtctgcaccaacgagacctaccagaagaagtacggctacaaccccatcagccgtgagcagctggacgagtttgccttccattctcaggagaaggccgccaaggctatcgccgacggcgctttcaaggacgagatcgttcccgttgtcatcaagggcaagaagggcgacaccgtgtttgataccgacgaaggcccccgcatgagctccatggaggttctgggcaagctgaagccctgcttcaagaaggacggcatcgtcaccgccgccaactcctccgccatcaacgacggcgctgctgctctggtcatcatgagcgaggagaaggccaaggagctgggcgttgagcctctggccacctgggttgccggcgctctggccggtgttgagcctgaggtcatgggcctcggccccatcgccgccacccgcaaggtcatggccaagaccggcctgaccgttgccgacatggatctggtcgaggccaacgaggccttcgccgctcagtccgttgcagtcggcgaggctctgggctttgatcaggagaagctgaatgtcaacggcggcgccatcgcactaggccaccccgtcggcgcttccggtgcccgtattctggtcaccctgctgtacgccatgaagcaccgcggcgctcataagggtctggctaccctgtgcatcggcggcggcatgggctgcgccaccatcgttgagatgtaattaccggaggaaaccaaaatgtcctttgttaccactgaaattcaggacgctgttgccgtcctgaccatcgaccgcccgaaggcgctcaacgcgctgaaccccgaggttctggctgacttgaaagctgccttcgaggccatcgaccagaacaccgtccgctgcgttgtactgaccggcgccggtgacaagagcttcgtggccggtgctgacatcggctcgatgtccaccatgaccaaggccgagggcgaggccttcggcaagctgggcaacgatgttttcctcatgatcgagagcttcccgctgcctgtcatcgcagctgtcaacggcttcgcgctgggcggcggcaatgagctggccatgagctgcgacatccgcctctgctccgacaacgccgtcttcggccagccggaagtgggcttaggcatcacgccgggcttcggcggcacccagcgtctggcccgtctggtcggcatgggcatggccaagcagctggtctactctgccctgaacatcaaggcagacgaggccctgcgcatcggtctggtcaacgccgtttatacgcaggaggagctgctgcccgccgccctcaagctggccggcaagattgccaagaacgcccccattgccgtgcgcaactgcaagaaggctatcaacgacggcatcagcctgcccatcgagaaggctgtcgaggtcgaggagaagctgttcggtgattgcttcgagactcacgatcaggtcgagggcatgggctgcttcctgagccgcgagaagccgaagccgaagccggttttcaccaacaactaattttattatctattatcttttatcttatattggaggtacttactatgaaggtaggcgttattggcgctggcaccatgggccagggcatcgcaaaggcattcgctcaggttgagggcttcaccgttgcactgtgcgacatcaagcaggagtgggccgagggcggcaagaacaagatcgctgccggctatgccaagctggttgccaagggcaagctggatcaggctgaggttgaccgccgcatggctgccatcaccgccggtctgaaggaggatctctgcgctgactgcgacctgatcgttgaggctgctttcgaggatatgaaggtcaagcagaccaccttcggcgagctggataagatctgcaagcccgagtgcatctttgcctccaacacctcttctctgtccatcaccgagatcggcaagggcctgacccgtcctctggtcggcatgcacttcttcaaccccgctgaccgcatgaagctcatcgaggtcatcgccggtgtcaacacccccgttgagaccgttgaggccatcaagaagatcagcaccgagatcggcaagagccccgttcaggtcaatgaggctgccggtttcgtcgtcaaccgcatcctgatccccatgatcaatgaggctgccttcatcaagatggagggcgtttctgacatcgccggtatcgacaccgctatgaagctgggtgccaaccatccgatgggccctctggagctgggcgacttcatcggcctggacatctgcctggccatcatggacgttctgtacaaggagaccggcgacagcaagtaccgcgcctgcccgctgatccgcaagatggttcgcggcggcaacttgggctgcaagaccggcaagggcttctatgtctacaatgccgaccgcaccaagactgccgttgacgccctgtaattaaaccaacctacgcgcctggcgcagtatatgaccgcgccgggctgcgtttgtttgagtatatggaggtttatcaaatggattttactctgtctaaacagcagcaaatggtccagaagatgtacaaggagtttgctgaaaacgaagtcaagcccctcgctaagaaggtcgatgccgaggagtacttccccaaggagaccgtcgagaagatggctaagctgggcatgatgggcatctacttcccgaagtctgtcggcggcgccggcggcgatgttctgtcctatgtcatggccgttgaggagatgagcaaggtctgcggcaccaccggtgtcatcctgtccgctcacacctctctgtgcgctgctcccatctatgagaacggcacccccgcccagaaggaaaagtacctgcccaagctgtgcagcggcgagtggatcggcgctttcggcctgaccgagcccggtgccggcaccgatgcgcagggccagcagaccttcgccgtggacgagggtgaccactggaagctgaacggctccaagatcttcatcaccaacgccggctttgccgatgtgttcatcatcatcgctgtcaccggcttcatcaccgacaagcgcggccgcaagcagaaggagatcagcgcctttatcgtagagcgcaccgatcccggcttcaaggtcggcaagcccgaggacaagatgggcatccgcggctcctccacctgcgagctgatcatggaagactgcatcatcccgaaggaccgcctgctgggcgtcaagggcaagggcttccagctggctatggctacgctggacggcggccgtatcggcatcgcctcccaggctctgggccttgctgagggtgctattgatgagactgtcgcctatgtcaaggagcgcaagcagttcggccgctccatcgcccagttccagaacacccagtttgagctggccgagatgaaggcccgcgttgacgccgccaagtatctggtctatgcagctgcccagaagaagcaggctgccatggacggccagaaggtccgctacagcgttgaggctgccgaggccaagctgatcgccgcccgcaccgccagcgatgtcacccgccgctgcctgcagctgttcggcggctacggctacacccgcgattaccccattgagcgcatgatgcgtgatgccaagatcaccgagatctacgagggcaccagcgaagtgcagatgatggttatcagcggcgcgctgctgaagtaaggaggacagacgtaatgaaagcaatcgtttgtgtcaaacaggttcccgatacgcagggcaaggtcgctgtcaaggctgacggcacgatggaccgctccgctatggctaccattaccaaccccgatgacctcaacgctgttgaggccgccctgcagctgaaggacgagaccggctgcgaggtcgttgttgtcaccatgggcccgccgccggccgagggcatgctgcgtgagctgatggcccgcggcgctgaccgcggcgtgctggtttccggccgcgagttcggcggctccgataccttcgccacctctcagattctggctgctgccgtcaacaagatcggcgtcggccccgaggatatcgttttctgcggccgtcaggctatcgacggcgacaccgcacaggtcggcccccagattgctgaaaagctgcatctgcctcaggtcacctatgtcaccgaaatcaagaaggacggcaacgccctgaccgtaaagcgtcagcttgaggacggctacatggagctgaaggtccagactccctgcctgctcacctgcatcaaggagctgaacactccccgttacatgaacatctccggcatcttcgagtgctatgacaagcccctcgaggtctatgactacaacgctctgaaggacgacccgctcatcgagaccgataccatcggcctgaagggctccccgacgaacgtctacaagtcctttgctcctccggtcaagggcgccggcatgaaggtcgaggacgctgcccagctggtcggcatcctgaacgacaagcacctgatttgaggaaggagaaacgaacaatggctgaattcaatgcaatggacaccgccgccttcaagggcgtgtgggtattctgcgagcagcgcgaaggtcagatccagaccatcagctatcagctgctgagcgaaggccgcaagctggccaacgacctgggcgttgagctttgcggcgttgttatgggcagcgagctgaacgaggactatgtcaaggcgctgggcggctacggtgccgaccgcgtttacaatatcgacagccccctgctgaaggactacaccaccgatggctatgccaaggcgctgtgcgacctcatcatggacaaaaagcccgagatcatgctgatcggcgccaccaacctgggccgcgacctcggcccccgctgcgcagcccgtctgcacaccggcctgaccgctgactgcacccatctggatgtcgatgtcgagaagtacaaggacttcctgcgcaacacctccaacattgatgtggacaacaccaagtttgaggagaacaccaacctgaagatgacccgcccggctttcggcggccacctgatggctaccatcatctgcccccgcttccgcccgcagatgtccaccgtgcgccccggcgttatgcagacccagccgtttgacgaggccggtgctgccaaggtcgtgatcgagaaggtcacccccgctctgaccgctgaggacatccatgttgaggttctggacatcaagaagagcgccgagaagctcgttgacctgatcggtgccgatgttgttgttgccgtgggccgcggtatctctgccgaccccgacaagggcatcaagctggctgaggagctggccggtgttctgggcggcgttgtcggtgcctcccgtgccgtcaccgatgagggctggctgtctgctgaccatcaggtcggccagaccggcaagaccgtgcatccccgcatctatgttgctctgggcatctccggtgccatccagcatgttgccggtatgcaggactccgagaccatcatcgccatcaacaagaacgagaacgcccccatcttcgatgttgccacctacggcatcgtcggcgatctgtacaaggtcgttcctgagctgatcaaggagatcaaggctgccaaggcctgattccgcctgtaatcaacaagagccgcgccccgcaaagggcacggctctttgttttttgtatggttagtctgccacggccggggcggacagcagctccgggggcagctcgctctcgtcctcattgacgagggaatcatcaacatcgaaggtcgcatcaaaggcctttgcggcagcatccgccaacagatcgacatcgaccagctcactgtctgccatgacatacagcagcttatcctcaaagctgaccacgcgggccttatctgcctccacacagacccacttgcgcatgctgatgttttcctccatcgaatcggcgatctcgcgggcatcggccttgtccttgaggcgcagcagcacaaggctgtacgcctgactgccggtcatcggctcgctgactacggcagcgtccaccttgcccacattgtccggggtcagacctgccagatagccgtaccagctctcgtcggtcaggtcgatagccaccgtttcgatgcccatcgcctcaacgggctgaagctggtagatcgcgtccaccataccgctcagctcggcgtccggctgcggctcggcggtctcaccggtatcctcgccgtccacactgaactccgggtccagctccgcgccctcttcgggccttgtggcgggctggttcgccagatcattgctgtcagccttctggctgccgcaggcagacaggaacagggaggtcagcagggctgttgcaaaaagcagctttttcattgtaaaattcctttctcagtcaaaatttcgtcaggggcaaagcgggcgtcccagtcatcggcaggcaaatccgccagcagggccgctgccgggcagagcagcagcctttcccccttatactgtgccagaaaacggtcataataccccccgccgcggcccagccgcacgccgtccgtcccggccgccaaacaagggatcagcgccagcgtggcagcgtccccgccggggtcggcggtgggcaggtctgcgggcggctccgggatgccgtaggcaccgggctgcagcagagacaggctcggtatctccacccagtccatctcggtgcggctccgcacacggggcagcagcagccgcttgccgtcagccagcgcgcggcgcagcatcgcagctgtgtccggctcgtccggcatggccgcaaacgccagcactgtgtcggccgccgcccagcagggcagggcaaacagcgtccttgccataccgcagccgaccgcctgcatatccagctctgcgcgccgggcctttgccagcgcgcgtgcctcccgttttgtcattgtgcatcccaccttttgaggtatcataccatatctgccctcaccctacaagacggaaaacggccgctgttgttacagcagcgacaaaatttttccgccatcttgcccgcagaggcagaatagagtataatataagctgtatcgctatgtatatgctgacatttatataaaaaggagattcaacctcatgggcaagtttacttttatcaagaccgacattcccgaagtgcagatcattgagccgaccgtttttggtgatgaccgcggctattttatggagacctaccagatcgacgattttgccgccgccggtatcgataagccctttgtgcaggacaaccagagccgctccaccaagggcgtgctgcgcgggctgcacttccagaccaagcacacgcagggtaagctggtccgtgtgacgctgggcgaggtgtttgatgtggccgttgactgccgccccaacagcgcgaccttcggcaagtgggtcggcgtgaccctctcggctgagaacaagaagatgctctggattcccgagggctttgcccacggctttgtcgtgctgtccgatgtggcggagttctgctacaaatgcaccgatgtctacgaccccaccgccgagggcggcatcccctacgatgacccgaccgtcaatgtccagtggccggactgcggctgcgcgcacaagaccagcgccaaggacaaggagcacaccccctttgccgaccagaagttcgagttttttgaaaagtattgaggatacaccgtggagaaactgaaaaacacctttgccggtttctggaagtaccgctatctgctgcaaaacctgatctcccgcgattttaagctcaaataccgccgcagcgtgctgggcgtggcgtggagcgtgctgaaccccctgctgacctgtctggtcatgtgggccgtgttcggggcgctcttcaacgcccgcgggcagggaatcgaggatttcccgctgtttctgatcatcggccagctgatgttcaacttcttccgcgagagcacgaccatggccatggagagcgtgctgaaaaacggcccgctgctgcgcaaggtctatatccccaaatatatcttcccgctggagaaatgctgcttcgcgctggtgaatttcttcttcagtctggtggcgctcttcattgtggcgctgctgacatggtcgcatatttcgctcaggacagtgctgctggctatttaccccatcgtcatgctgtttattttcagcctcggcatcgggctgatcctctccacgatgtatgtctttgtgcgcgacatcatgcacatctgggaggttttctgcaccctgctggtctacggcagcgccatcttctatgacccgcgccagatggaaagctggatgcagttcgtcatcaacctgaaccccatctactggtacatcacctcggtgcgttcctgcgttatgtggggcgagggcctgaccgcaaacatgctgctgatcccgttcctctgcgctgcgctcagcctgggactgggcgtctttgtctttaaaaaatatcaggacaagttcgtcctgtacatgtaagggggcatcgaaatggcagagcagaaacccattatctcaatcgaccatgtttcgatgcgcttcaacctcgccaaggaaaagcacgagagtctcaaggaatactttgtggcgctgctgcacggcggtgtccggttcgatgaattttttgcgctggacgatgtgtcgtttgatattatgcccggtgacttctacggcctgatcgggctgaacggcagcggcaaatcgacgctgctcaaggtcgtctcaggcgtgtacaagcccagcgcgggcagcgtcacggtcaacggcaccatcgcaccgcttatcgagctgggtgcaggctttgacatggatctgaccgcgcgggagaacatctatctgaacggcacggtcctcggctacacgccgaagtacatcgactcgaagtttgatgagatcgttgatttcagcgagctgcaggattttctcgatgtaccgctaaagaactactcctccggcatggtggcgcggctggcttttgctgtggccaccatgacaaagcccgacattctgattgccgatgagatcctgtcggtgggcgatttcctgtttcaggaaaagtgcgaaaagcggatggctgagctgctgtccggcggcactacggtcattcttgtcagccactcgatcgaccagattgagcgtatgtgcaacaaggttgcttggcttgaccacggccacctgcgccgcctcggccccacaaaggagatcacggccgagtaccgcaaattcgagaaaaaggacgccatgccggcaaaagtcaccgaggaataaatcatgcctgaaacttccaataagaaacctgacaacgagcgccctgctgatctggccgtacaggacagtgtgggcggcatggcgcgccgccttttgaaccccacacatctgcgggatctggccggccgcagcgtcaagaccctgcgggagcagggcgccgaacagctgtggcgggatgtgaaattccgcgttggactggccctgcaccacgatgactggcggcaccgggcggacctcccgctgcgccgcgagctgaaggcccagcgcgctgccgccctgcaggggccgcagatcagcatcatcgtgccgctctacaacacccctgcaaaatttttcgatgagatgctgaacagcgttgtcaggcagacctacaccaactgggagctggtgctgctggacgcaagcgatgctgacaaacggctggagcgccgactgcccaagcaggtgccgggcaccatcgtgtatgagtgcatcgaaaacggcggcatcgccgccaacacgactcgcggctttacactggcccacggtgattttattgccctgctggaccatgacgatgtactgtatcccaacgccctctttgaggttgtgcagaccctccaaagcaccggggcagattttgtctacagtgacgaaatcgttctctcggctgatttgaagcagctgggcgggtatcacttcaagccgaattttgcaccggactatctgcgcggcgtgaatttcatcacccatctggcggtgttcagccgcccgctgctggatgcagccggagcctatgagtcgaaggagtttgacggcgcacaggaccacgacctgatcctgcggctgacagaaaaagcgcatcgcatcgagcatatcaaaaaggtgctctatatctggcgcggccacgcgggttccaccgccgcaggcatggaggccaagccctacgccatcgcggcgggggagcgggccatcgacgcccagctgcagcgcctcggcctgccggggtgcgccatggccgtgcccgatgcccccggtgcgtttcaggtcaggtatgaactgacgggacacccgaagatcagcgtgctgatcccgaacaaggaccacaccgatgatctggaccgctgcctgaccagtctgtacaaaaacgctgggtacgataactttgaggtcatcgtcatcgagaataactcgactgacccagctaccttcgcctactataaaacgctgcatgacaaattcccgacctgttgggtggttacgtttgaggggcatgggccgttcaatttctcggccatcaacaattttggcgcatcgtttgccgagggcgagcacctgctgctgctcaataacgacattgaaattttgtcgtccgacttcctgcgcgagctgctcagctacagccagcgccccgatgtgggtgcagtgggtgccaagctctactaccccgatgatacgatccagcatgcgggcgtgctgatgggcatcaacggcagtgcgggccacagccacaagagctacccccgcaccgctgtgggcgatatgtaccgccttgtcacaacgcaggattacatggccgtgaccggcgcctgcctgatgacaaaggcatcgctgtaccgcgaatgcggcggtctggacgaggagaagttcgccgttgcctacaacgatgtggattactgcctgaagctgtggcagaagggccttttgaatgtttacaccccgcgcgccgaggcataccattatgaaagcaagagccggggccttgacacattaagtgaaaacgcccgccggtacgagcgcgagaaagcgaatttctacgcaaaatatcagcagtatatcgacaattacgacccctattacaacccccatttcaacaatttgtttgaaaatttcgggttgaagtgaggaggtgttttgcatggaaaataagtttgatacccagtttttaatcgaaggccacgacctcgacgaggacgccatccacgacggcattttgaacagcgccaagggcgattgcctgttggtcgtcggcgacgaggatgtcgtcaaggtgcattaccacactgacaccccgtggaaggttttggagtacgccgccgccctcggcgaattgaacaccatcatcgtagaaaacatggagcgccaagcaaaagggttgcacgggtaaattggcaaagcgcaaggttaaccgcctgacggcatatgattacgcccaaaacggtgcgtatttcatcacgatttgcacgcatgggcggcagaaaattttgtggaaaagcgatgtccttacggcggttgaggatgtaggggcgcacagtgtgcgcccgcgccttgccccggagttatcgccttacgggaaagccgttgaagatgccattttgcagatttccattcggcatcccgcagtaaagttaataaaatatgccgtaatgccaaatcatgttcatttattgttgttgattcagcgggaacagggcgggcgcacactgtgcgcccctacaatttcactggtcatcaaacagatgaaagaggctgtcacgaaagtgattggctgccccatctggcaaaaatcctttcacgaccacgttgtgcgcaccgagcacgggtacgcgcagatttggcagtacatcgacacaaacccccaactctggcgcaaagattgcttttatgaggagccaccccatgagccttgaaacaaaacgcatgaaagagctgttcggctatgcgcggaccctgacaaaggaacagggtgtcggcgtcatggccgggcgggccgttggcttttttaagcggcggttcttcggtaaaaaggcgcggtacctgccgtcaaagcagacgctggacgcccagcgcgccgatgccgccgcaaatgccgcaggctggccgaccatcagcatcctgaccccgctgtacaacacgccgccgcagtttctgcagcagcttctggacagcgtgcaggcccagacggcgcccaactggcagcttgtgctggtcgatgccagcgatgacgcccacgccgatgtcggcagggctgtgcaggcgcgcgccgcgcaggattcccgcatcatctatgccaaaatcaaaaatgcgggcatcgccgccaacacgaacgaggctgccaagctcgctaccggcgactatttagcgctggccgatcacgatgacatgctggccccccacgcagtgtactgcatgagcaaggcccttgccgaaagcggtgtgccttttgcctacagcgatgaggccctgtttgagaaaacgcccgagcatccgcgtgtcggccacttcaagcccgactacgcccccgaatacctgatggcggtcaactacatctgccatctggccgtattcaaaaaatctctgtttgacgcagtcggcggcgagcgccctgcgtgtgacggcgcacaggatcacgatctttttctgcgccttgtggatgagatgcagcgcagtgatcctgccgccaaaccgctgcacatcccgcaggtgctgtactattggcgcgtgcatgcggcatccaccagcggcggcacggcagccaagccctatgttgagcaggccgcgcagcgggccgtagccgaccatctgaccgccaccgggcggcagggcagggtggaggccgggcttttccccggcacctgccatgtggtgtgggatattcccgagccggagccgcttgtctcgatcctgatcccgaacaaagatcacaccgatgatctggagaagtgcctgcacagcatctacgccaaaacgacctatgaaaacttcgaggtcatcgtcattgagaacaactcgaccgacccggccacggcagactactacaagcgcctgcccgaccggtacgaccgcgcccgcgttgtgacctacaagggcgggttcaacttcagccgcatcaacaatttcggccgcaagtacgcggcgggtaaatacctgctgctgctcaacaatgatgtcgaggtcatcaacggcgactggctcacccagatggtgggggagtgcagccagcccggtgtaggcatctgcggcgcgatgctctactatcccgatgacacgatccagcacgccggcatcatcacagggctgggcggctatgcaggccacagccacaagtaccacaagcgcggcggcagcgggtacatgttccggctggccaccgtgcaggatctctccgccgtgaccgccgcctgtctgctggtgcgcactgctgtctacgatgccgcccatggtctggacgaggagttcaccgttgcctacaacgatgtggacttctgcctgcgggtgcgggacgccggctggcgcatcgtctggaccccctatgcacagctgtatcactatgagagcaagtcccgcggctccgatgaaaacgacccggccaaaaaggcccgctttgacgccgagcatgaccgcctgtatgcggtccacgggcgggagaacatcctgcatgacccctactacagcccatccctctccctcgattacgaggatttccgcgaaagcggcgatttgaggaatctgaagtagcatataaaggcaagcgcccgaacgcgaaggttcgggcgcttgcttttatctttcttttttatccggcgggaattcaccctgcttctcggcctcgaggcggctcaggcgggcctccagctcggagatgcgctggttgacgatatccggcagatcctgctggtcgaggtcgtccgccgggcagcacttgatattgcccacacgcacgatctccgccgggacaccgaccgctgttgcgttggcgggcaggtttttcagcaccacgctgcctgcacccacgcggacattatcgccaatgtagaccgggcccagcaccttggccccggcaccgatcagcacattgttgcccagggtcgggtggcgcttgccggtatccttgccggtgccgcccagcgttacaccgtgatagatcgtgcagttatcgccgatttctgtcgtctcaccaaagacgatgcccatgccgtggtcgataaaaagcttgcggccgattttggcaccggggtggatctcgatgccggtcagatgccgcgccagctggctgacaaggcgggccagaaaaaagcagcggtgacggtacagaaaatgggcgatcttatgcgtcaccagcacatgaaagcccggatacagaatgatgacctccgcgacattgcgcgccgcagggtccttatcgcggatgttttttgcgtcttcccaaagccccataattcttttcctctttgctttacgatacttgtttattagtatatcacaatcccgggcagagtgcaacgcgggatcgttgcgcttccttcaacttttcccgcagcaccgaccttgcaaaatgccgcactgctttgtatactgatggtatcataaaagaaaagaggctgcatggtcatggatcatcagaacatccgctttcacaatgtcgaggagctggagccggtcgagggcggctggctgctccgccgcgtcggtgccgcagcacgcgcccgcatcagccccggtgtgcaggaaaactgctttgccaccggcattgagctgcgcttcacgatgccggacggcgcagtcgatctgctgctgaaaaccatcccccaggccgaggccgccaccgcccacatcttcttcggctcatttcagggcgggtgggagtactcctccaaaaacatcggcgcggatgtgacccgcatccacatcgaatacccggccaagctcgccacactgcgccgcatcacggcggaaaagcagcttgcctttgcgcccgaggtcgtgcgggtcgtgctaccctatgtgccggtgatcttcgcaggggtcgagggccggaccgccctgcccgccgccgaccagctgccgcagaaaacctatctggcctacggctcgtccatcacgcacggcagcctctccctgatccagccggattgctatgtgttccgcaatgcgcaggtgctcggggtcgattatctcaacctcggctttgccggcaacgccctgatggaggaggagatggcaaactacctcgtatcgcgcagggattgggactttgcctcggtagaaatgggcatcaacaccaccgagcgggtgaaggagttcccgctcgaggtgtttgaggagcggatcgaccgcttcaccgccgtgctggcccgcgatccgcgcccggtgttcgcaacctcattcttcggttatctggacgaggacaccgaccgtaccgataaaatgcgccggattgtgcggcgctacgccgccgagcggctcatctttaccgatggcctgcagctgctggacgatgagacccttatctcggcagacggcacccaccccgatgcccgcgggcaggagcagatcgccgcacgctggagccgcatcatggcggaaacgcttgccaaccgcacggcgcggtgagttttttgggcgtttatcattttgtacaaaactcggcgtaaaaatccataaaatccttactttcgcaatccgggcgtttgcattgacactgccgtccctacatggtacaattaagtaaaatccatgtaagaattcggggaaggagtgcgccgcaatgatgatgcagtttgtttcttgcttcaaaattcacggtgccgtgttttttcccgttttcaaaaccggtgcttctttttgacttttcccgtccgggaaaagtttttttttgcccaaaagcgcgcccgcagagggcgggccgaaaatctggtagagtatatctcaggaggttcccactatgctgatccgtaacgcaagggactgtgcaggcaagccgattgaggtctggctgcgcgacggaaaaatcgccgctgtcggtctgggcctgcttgtcccggagggggaggagctgctcgacgccaagggccgcacgatcctgcccgccttccttgacacacactgccattggcgcacccccggctttgaatacaaggaggatatctccaccggctctgccgcagccgctgccggcgggtataccttcgtgaacctgatgcccaacacaaagccagtctgctccagcgccgagattgcccacgccgttgaggcggaggccgcccgcgtagggctgtgcgatgccaaccagaccgtctcgatcacgaaggactttgacggcaaaacgctcgaccacctgatgacgctgcccgaggatgtcaaattcatcaccgaggacggcaacggcgtcatgaacaacgccgtcatggcgcgggcattcgccatcgccaccgagcgcggcctgaccatcatgtcccacgccgaggaccgcgagatcagcccgtgggactaccgtctggcggaaaacatcgagaccgtgcgcaactgccatctggccgaatactacggcacccggctgcacatgtgccatgtttccaccaaggagtccgtggacgccatccggatgagccgcctgcgcggtgcgcgtgtcagctgcgaggtgaccccccatcacctctggtttgacgacagccgcctgcagtacaaggtcaacccgcccatccgcaaggcggaggatgtgaccgccctcattgaggccatcaaggacggcaccgtgacctgcatcggcaccgaccacgccccccacaccgctgaggaaaaggagaagggcgccgccggcatggtgggccttgagactgccttcggcgtctgctacaccaaactctgccgcgagcagcgcctgccgctcgagctgctcagcttcctgatgagcgccggccccgccgccgtgctgggactggccgaccgcaagggtatgctggagccgggctatgatgccgatgtcgtgctggcggatcttgaccacatgtatgaggtcaaggccgatgagctgcacagcaagagcaagaactgcccttatgacggtgtgctgctctacggcaaaatcgtgacaacgatcaagggcggaaaggttacgttccagattgaagagtaacgccacttcacgcacaaaacacccgtaggggcgcattccatatgcgcccgtgcaaggctgccgctggcacagccccgcgggcggatatagaatccgcccctacgatttccaacattatatacattatattgtagagccacaatttgtatacatcaaacggaggaatcagcatgcttaccaacatggacaaactgtacgagagcgttgccgcgaacggccctgtctgcgtgggtctggataccgagatcagctacctgcccacgaccgacatcgccaagacggcgggggagaatgtggtcgaattcaaccgtgccctgatcaacgccaccaagggcgtggccggctgctacaaggtgcagatcgcctactatgaatccctcggtctggacggcatgcgcgcctacgccgagacgctgaagcttgcacgcgccaccggcctgccggtcattgccgacatcaagcgcggcgacattgccaagaccgccgagatgtacgccaaggcgcactttaccggcgactttgaggccgacatcatcacgctggccccctatatgggccttgactcgatcagcccctatctgccgtactgcgccgagcagggcaagggtgtctttgtcctgtgccgcacttccaaccccggcgccaaggactttgagtacaaaaagctcgatgacggccgccatgtttacgaccttgtcggtgacagcctgaccgccctcggcaaggactacatgggcgagcacggctactccagcatcggtctcgtcatcggcggcacccataccgaggaggccaccgccatccgcgctgcctacaaggacaccttcttcctgatccccggttacggcgcgcagggcggcaaggcagccgacattgcccagtacctgaccaagggcaacggcggcgtggtcaactccagccgcggcatcctgctggcctacaagaagcagcccggcgttgcctttgacgaggccgcctacaacgaatgtgtgcgtatgcgggaggatattcagggtgaatgcaacaagctgtgatctgaaggtcctgcggcaggagactgtcgcagctgacatcatgcgcctgacggtccagtggcaggaccccagccgcgagccccatgcggggcagttttatatgctgcgcgcctgggcagccgatgccacgccgattttgtcccgccccatcagcgtggatgacttcgacaaccagaccggcgcgctgacctttttgtatcaggtcaagggcgagggcacccggaagctggccgcgctggccgtaggggacacgctgactgtgaccggcccctgcggcaacggctttgacaccgccgcgctcgcgtctgcccacaagcgcatcgccgttgtcggcggcggcatcggcaccgcgccgctgctgctgctctgcaaggagctttgccgcgccggtgtgcggcccgacctctatgtcggcttccgcgatgcctcctacggcatggagagctttgtgccttggtgccacagcatccatctggctaccgattccggcagtgaggggcaccacggccttgtgacagacctgctggatgttacccactacgacattgtgctgacctgcggcccgatggtcatgatgcgcggtgtggcgaagctctgcgccgctgccggcgtaccctgcctcgccagtctggaaaagaagatggcctgcggtctgggcgcctgcctcggctgcacctgccacaccaaaatcggccccgtgaccgtctgcaaggatggtcctgtctttaacgcacaggaggtgtttgactgatggcagacctgcatgttgattttctcggcaagcgtctggccgggccggttgtggctgcgtccggcaccttcggcttcggccctgagtatgcgggcattgaggatctgcggctgctcggcggcatctccggcaaggggctgacactgaacggccagcccggcaacgagggcgaacgcctgtatgagacgccctccggcctgatgaactccatcggcctgcagaaccccggtgtgcagcacttcatcgaccacgagctgcccgccatgcgccgctgcggcaccaccgtctgggccaacctcggcggccacaccatcgaggaaaacatcgagggcgtggctatgctctgcgccgccggcgtggacttcattgagctgaacatcagctgccccaatgtcaagcagggcggccttgcgttcggcatccgcgcgcaggacgccagcgaggtcgtctccgctgtgcgcaaggtctgcacagtgccgctcatcgtcaagctgagtcctcaggccgagagcatccctgagatgtgcaaggcggtcgaggccgccggtgcggacgctatcagcctgtgcaacaccttccaagcgtgcgcaatcgatctggaaaagcgccgcccggtattcaacaacacctttgcgggcctgtccggccccgccgtgcggcccatcgccctgcggatggtctggcaggccgtgggggccgtcagcatcccggtcgtgggtctgggcggtatcctgaccggccgtgacgcgctggagttcatcatggccggtgcgacggcagtgcaggtgggcactgcgaacttccttgacccgaaggcctgcacccgtatcaccgctgaaatcggtgcgtggatggatgcccacggcgtcaaaacgctggacgagatccgcggctgcgcacgataaaagccttcccccaccgggggaaggtggccgaaggccggatgaggggcatgtctgcgccgccgccccttcgcgggcagcaacggcagggccgccgacagcttccccttaagcgggaagctgtcaccaagataagcattcatatatcttgcagttttatacgaaatatgctatgattacacaaattatatacaggaggaacatactatggcacgcgaagcacttgaagttttgaaggaatgtgaagcatttttggagggtcacttcctgctgtcctccggccgccactccggcgcttactgccagatggcctttctgcagcagtaccccgataagtgcgccgaggtcatggccccggttgccgagaagctgaaggagctgaacattgatgtcgtgatcggccccgccatgggcggcatcgtctatgcctacgagctgggccgccagatgggcaagcgcgccatcttcaccgagcgcgtggacaatgttatgaccctcaagcgtttcaagctcaaccccggtgagcgctgcatcattgccgaggatgttgtcaccaccggcatttccagccttgagaccaagcgcgtcatcgaggaggccggcggcgtctgcgtaggcattgcctgcgttgtggaccgcacccgcgccgaggctccgtccccgatccccatcgtggccagcgccctcaagctggacctgcccaactacgcccccgaggagtgccccatctgcaaggagggcaagctgcctctggtgcatctgggcagccgcaagatgaaagaggccgccaagcaaaccctgtaagcgttgcttatgcaaaggcaacaccgcacaattcccgcctgacggcttaagcaccgctccggcggctgcggcacggcatctgcgttgccaaaatgctcgataatacacaaagtattatctgcgcttttggcttagcagctgccgcacctcgctcgccgtatcggcacttagaattatgcggtattgcccaaataatactaggagataattatgcaggcatatctgatattggcaaatggccgggttttccgcggtgtcagcgtgggctgccccggcacaaccatcggtgaggtcgttttcgccaccggtatggtcggctttgaggaaacgctgaccgaccccagctactacggccagatcatcacccagacctaccccctgatcggcaactacggcatgaacagcgaggatgtcgagagcggcaagatctgggccaagggctatatcgtgcgcgaggcatgcaaaaagccctccaacttccgcagtgaggaaacgctggattccttcctgaaaaagaacggcatcatcggcattgagggcatcgacacccgcagcctgacccgcaccctgcgcgagagcggcgtcatgaacggtgccatcacgactgagttcgaccccgatgccgagccggagaagaaggcggcgctgctgcctgagatcgccgcctactctgtcgtcaacgccgtcaaggccgtcacctgcagcaaggctaagacctatgagccgaccgcggccggtgcctgcggcgacaccccgctgcatgttgccctgcttgatctgggctgcaagaacaacatcgtgcgctgcctgcagaagcgcggctgccgcgtgaccgttctgcccggcaccgccaccgccgctcagctggctgcgctgaatcccgacggcctgatgctctccaacggccccggcgacccggccgaaaatgtcgagatcatcgccaacatccgtgagatgctcgacaccggcatcccgaccttcggcatctgcttaggccaccagctgaccgcgctggccgccggtgccaagacctgcaagctcaagtacggccaccgcggcgccaaccagcccgtcagccatgtcggcaagggccgcaccttcatcaccagccagaaccacggctatgcggtcgaggctgagaccctgcccgcggaagtgggcaagatgagctacttcaatgccaacgacggcacctgcgagggtgttgactacttccgctggaactgctttacggtacagttccaccccgaggccaacggcggccccaaggacaccgaatttctgtttgacgagtttgtcagccacatgctggctgcgaaaggagtgatcaacgatgcctaaggacccgcgtatcaaaaaggtgctggtcattggctccggccccatcatcatcggtcaggcggcggagtttgactactccggcacgcaggcctgccgcgccctgaaatctgagggtgtcgagacgatcctcgtcaactccaaccccgccaccatcatgaccgaccctgacattgccgatcatgtttacattgagccgctgaccgccgaggtcattgagcgcatcatcgaaaaggaaaagcccgatgccatcctgcccaatctgggcggccagatgggcctgaacctctcgatggagctggcccgcagcggtttcctcgaccgcagcggcgtccgcctgctggcctgcaagcctgacacgatcgaccgtgccgaggaccgccagctgttcaaggacacgatggaaaagctgcaccagcccatcatcccctccaaggtggtcgaggatctggacgatgcgctggattttgccgaggtcatcggctatcccgtcatcgtgcgccccgccttcacgatgggcggcaccggcggcggcatctgcgaggaccgcgagaagctgcacgagattgccacgaacggcctgcgcctgtccccgattcaccagattctggttgagaagtgcatttccggctggaaggaaattgagtacgaggttatgcgcgactccaagggcaacgttatcacggtctgcaacatggagaaccttgaccctgtcggcatccataccggtgactccatcgttgtggcacccagccagaccctctccgacaaggaataccagatgctgcgcaccgccgcgctggacatcatcaccgagcttggcattgagggcggctgcaactgccagtttgcgctcaagcctgacagctttgagtatgcggtcatcgaggtcaacccccgcgtgtcccgctcctccgcgctggcctccaaggccaccggctatcccatcgccaaggtcgctaccaagattgcgctgggctacaccctcgatgagatcaccaacgatgtcaccggcgagacctgcgcctgctttgagcctgcgctcgactatgtggtcgtcaagtacccgaagtggccgtttgacaagttcgtctacgcggacaaatccctcggcacccagatgatggccaccggcgaggtcatggccatcggcaacaactttgagcatgccatgatgaaggccgtttcctccaccgagctgggtctggacacgatgacgctgcccgactttgagaagcttcccaccgaggagatcatcgagcatctgcatgtgcaggattccgagcgtgccttctgcgtctacgaggccctcaagcgcggcgtgccgcatgagacaatctacgacatcaccaagatcgactggtggttccttgacaagctgcagcatctggccgacatcgagatgggcctgaagaacggtgagctgacgaccgagaagtacctgaacgccaagcgcttcggcttccttgacaagaccatccgccgtcttgccggcgtggataccctgcccgaggccccgaaggccgcctttaagatggtcgatacctgcgctgcagaatttgccgccaagacgccgtatttctactccacctacgatgaggacaacgaggccgcacagttcattgccgagcgcagcgaccccaacaaaaagaaagtcctcgtctttggctccggccccatccgcatcggtcagggcattgagttcgactactgctccgtccacgctgtctggacgctcaagcagcacggctgcgaggccatccttgtcaacaac

SEQ ID NO: 1104 - DNA, 5760 bp, unidentified
  source 1..5760: mol_type = unassigned DNA
atggcaaaacgagtaggaaccgcagagtttgaagcggaagtgctgaaagagaagcttccggtgatcgtagagttttattctgacagctgcatcccatgtaagcagttatcaccgattcttggcgggattgaggatgattacgaggatcaggtcaaggtagtcaaggtcaatgtgaatttcgatgcagaccttgccggggaatatcaggtaatggcatccccaacgatacttttcttcaaggatggcagggaagttgaccgtatccgcggattggtaaagcgtccggagctggaagataaggtcaagagtatactggaataaggtagaacagttaattacaaacaattatgaaactggacttaactgaatagagttgcacataattactaattctaaagcagaccattgaagcacgctggcacttaacgaacggcaaacttgtttgacgtgagtttagtaccattgcgtgatgaagtgagcgagagcgcgtctgcgtagaaatagtaattatgtgtaacgcattaaataagtatatgtttcataattgtttggaacaaaggaggataaataaatgacagttgtagtggcaggcgttaagaaggaagtagaagcaggaacaaccatcgcaaagctcatcgtagacgagaaggtggaaaatccggattatgtaacagttaccgtcaacgatgactttgttgacagcgacgcatttgacaagacagaactgaaggacggagatacggtagagttcctgtacttcatgggaggaggcgcattttaatggcatttacgaatgaacagatggaacgttacagccgtcatatcattctgcaggaagttggtgtaaaaggacagaagaaactgatgaacggcaaggttctgatcatcggtgccggaggtctcggtgcacctgcagcaatgtatctggcagcagccggcgttggtacgatcggtattgtcgatgccgatgaggttgacctttcaaatctgcagagacagatcattcatggaactgcagatgtaggcaaagcgaaggtaaaatccgcaaaagagacaatgaatgcgatgaacccggacgtcatagtcaatacataccgtgaatttgtaacctcagaaaatatcatggatctgatcaaggattacgatttcatcatcgatggaaccgataacttcccggcgaagttccttataaacgatgcctgtgttatggcgaagaagccattttcccatgcaggtatcatccgtttcaagggccagcttatgacatatgtgccgggagaaggtccttgctatcgttgtgtattcaagaatccaccaccaaaggatgcagttccaacctgtaagcaggctggtgtcatcggtgcgatgggcggtgtcatcggaagcttacaggcaatggaggcaatcaagtacctgatcggtgtcggtgatctgcttactggtaagcttctgaccttcgatgcattgaagatggaattccatacgatcaagcttccggataaccataagacatgtgcaatctgtggcgaccacccaacgattcacaagctgattgattatgaacaggtcgagtgcgacggaaagtaggtagagcaatgttagtcatgacaaaagcagattacgagaagattctggggcattgcaagaaggggctgccaaatgaatcctgtggattgatcggcggtgtcgttgaagatggaaagaggtacattaagaaggtgtatctgctcacgaatatcgatgcgagcaacgagcatttctcgatggatccgaaggagcaacttgccgcagtcaaggacatgcgagcaaatggataccagctgcttggcaacttccattctcatccggaatccccatcacgcccgtccgaggaggacaagcgtctggcatatgattccaaggtaaattatctgatcctctctttgatggatttagagaacccggtattgaatgcgttccatattgatgaggaaaaaaatgtgaccaaggaagaacttgtaatcgaataagattagttgagcggcaggaaggggattcctgccgtttctgcgtggtgagctgacaggatgtgggcgtagcgagcgggaaacgggctgaaaaacccacgagttgggttcgggagacagaaaagccggcagaaaccccagaaccggaaactaaatcgtagaagtggagcaggatgtgggcgtagcgagcgggaaaagggctgaaaaaaccacgacgtgggtttcggagatagaaaaccaagcagaagacccagaaccggaagcaagagcaatttctaaggttgattgaaagaagaatgtcaattataatatgtagtatgtatatgaataaaaacagttaacaggaagaagcacctatgatatgcatcagtatcacacataagaatttaacagcggcgaagcgggagtgctttgcctgcaatgatgaggaacagataaaactggcaggtgccgtggcgaagacatatccggaagccgggttggttttacttatgacatgtaatcgaagcgaaatctatatgagcggcacggacacggatttcgtatggctggaacagcagtttgcggatacaaagaaattcccggtcgaggcgttgaagggtgcggctatgcggtatgaaggaaaaagctgcctgacacatctgtgccgcgtagtctgtggactggattctgctgtgcttggagaggttgaaattataagacaggtcaagcaggcgtatcttgcggcgaaagagcgcgggcagaccgatgcggaaatgaatatggtatttcaaggggcactgcggcttgccaaggaagtggctgagacttcacagatgacgcatcttccggtatccgtcggaacacttgcatgtacggcggcgttggagtctggtgcgggaaaacatatcctcatcatcggagctgccgggcagatgggaagcatcgtgatgcgggatctgctcgatgcggatacgcaggtacagatcgtcgggacgagccggaagcataagcaggcattgcagaaaatcctctcacatgagcgggtgcaatgggtgcattacgaccaacggtatgaatatctaaactgggcggatgtgattattagtgtgacggacagtccgcattatacatttcttgcagataaggtagcggaagtacggaaggaaacgaaaccacagttgttcttagaccttgcgattccacgggatattgatgcagagatcggaagactttccagctgcgtcgtgaaagatctcgactatatcaagtcgcttgcgacggaaaataaccgaaagaaactttccgaggcaaagaagattgaattactgattgaagaacatgtggacgagatgcagaagctgcttgcatttcgtgcatttgtcgggacgaggaaggacatcacggagaagcttggcgagaaatccgcgatgtggcttttgtaccagttgaaagacgttctggatgcacaggacttaaatcacgtattaaaagggatagaagatggcgtattttccattcatgatacaactcgatgataaacaatgtctgatcgtaggcggcggtgcagttgcagcgcggaaggcggcacagatgtgtgagtttggcgcatgtgtaacggtggtagcaccggagatctgcgcggaactgctggctatcgcagatacggaacgaatagatgaaacagcaggcatagtagaaaatattgatggtaattgccagaaaaagccggaacgaatccgggtgtggaagcgggaagtcacagaggcagacatttccggcatggacgttgtaatcatggcgacagatgatgcggagcttaattcgcagtatgcggagctttgcagaagtaagcatatattggtaaatgtggtcgatgtgaagaaggattgtgatttctatttcccggcaatcatcaagcagggggaggtcgttgtttcggtgtctaccggaggcaacagtccgatgcttgcatcgaagatcaagaaggatatccggcagacacttcggacagactatggtcagatcgcggatgagcttggagctatccgggagaaaattctggcagaggagccggatgaacgggcaagaaaacgaagatttgcagcaattgtggaggcaaaaatgcaggaacagagaatccggatcgggacgcggggaagcagacttgcgcagattcagacagatatggtgatcgaacaattaaagaagcattacccggatgtgcggtttgagaaagtgatcgtgacgacaaagggtgacaagcagaaagaggcggcaatcagttcctttggaggcaaggcagtgtttgtagaagaaatcgaggaagctttgctggatggtacgatcgatttggcggtacacagcgcgaaggatatgccgaatccatgtaagaaggggcttggcattgcgggcgttctgccgcgtgcctgcgtgcaggatgtgctgatctatcgtgcggatacggatatccggtcgaagaatacatttaccgtgggaaccggaagcttgcgcagacgcagccagattaaggagatatacccacaggcagagtgcatggaacttcggggaaatgtcacgacgcgcatacagaaattgcgggatggcttatatgatgcgatcatccttgcggcggcgggaatcgaacggttaggtatcgagaaggaaccggatcttgtctatgaatacctcgatgtggatgcgatgcttccggcagccggacagggtattattgcgatggaagcgtgtgaggggactcttccgtatcatatggcagagacaatcagtgatgcggagacagagggctgtctgcgtgccgagcgtgcggttgtccgtgagatggaagcgggctgccatgagccaatcggtgtatatgcgacatggaaggatgacaagactatgcaggtgcgcgtgatgaatgcccggagtggaaaggtcaagcgggaggtgtgggaacgagaaaaggaagacgcaaatgatcttgaataatggggagaaagcatataatcgtgtcaaggaagagaggtgcggatctatgaaaataaaattcgacaacataactgcaaaaactgcgaaatactgtgcacttatatttacggtgctgttgcttatcggtctggttttttcatttctcgaaatccccggtacagaggtgttctatatcatggctgtttatacaggtgtgcttgtaggacttccgtgttatgttgtgcttttcgctgcaaagctgtattttgcccgtttgcgggcctacggctacgaaatcccggataataaaaaaatatatgggaataatctgaacaatcttccgaagacgcgtgaggcaggaagatcgctttttgcaaagcacagccggattgggatgtggatgtatttcgcatgctttgtcttgtttctggtggtggatgtgatgtatctgatcaaatggcattttatgaaggggcattttatgaaggatatctgtacatttctgttcaccgtgtgtctggttctggacagcgtctggcttattcttgcggtaattatgtggcggcagagaaatacagagaagtaccgggatgatgtggaatgtgacaaaatgcgcaaagagcgcctgaatcttgagaatattattgtatttgcaatcttctgggcgatcgtctgtgcagttgcatgtattcaggcggtgacgacaacgaaatatatggataaggtgcagagggagaatgcacaagtggctgcgtctgaattaaaaatggcggataatatggtggaattaggaaattatgaatcataa

SEQ ID NO: 1105 - DNA, 13356 bp, unidentified
  source 1..13356: mol_type = unassigned DNA
atgtattcatttgatgaagtattaaactatgatccagaccttgctaaggctatggatgatgaacttggaagacagagaagccacatcgagcttatcgcttctgagaaccttgtaagtaaggcagttatggctgctatgggaagccctcttactaataagtatgcagaaggatatcctggaaagagatattacggcggttgtgagtatgtagatgttgttgagacacttgcaattgaaagagccaagaagctttttggctgtgaatatgcaaatgtacagccacattcaggagcacaggctaacttagctgtattctttgcacttgttaatcctggagatacagttatgggtatgagccttgactgtggtggacatttatcacatggttcaccagttaatatttctggaaaatactttaacatcgttccttatggtgttacagcagacggatttattgattatgatgaagtattaagaattgctaaggaatgcaagcctaagatgattattgcaggagcttctgcttatgcaagaacaatcgacttcaagaagttcagagaaatctgtgatgaagttggcgcattacttatggtagatatggcgcatattgcaggtcttgtagccggtggtgcacacccaagcccaattccatatgcagatgttacaacaacaacaacacataagacactccgtggaccaagaggaggtatgattcttgcttcagcagaggcagcagagaagttcaagcttaacaaggctgtattccctggaattcagggcggacctcttatgcatgttattgctggtaaggcagtgtgcttaaaggaagcgcttgacccaagctttaaggtatatgctgaaaatgttgttaagaatgcatcagcacttgctaacggacttatgaacagaggttttgatatcgtatctggtggtacagataaccatcttatgcttgttaacctcttaagcaagggaaagactggtaaggaagttgaaaagcttcttgatgcagctaatattacatgtaacaagaatacaattcctaatgacccagcttctccattcgtaacaagcggtatcagacttggtacagcagccgttacaacaagaggcttcaatgaggctgatatggatgttgttgcagaagcaattgctatgcttgttgatgatgtagatgccaaccaggctaaggcaatggaacttgttaagggacttacagataagtacccactttacgaataaagaaatttttagaaaatcaccttatgaattaaggaaaaaacgcatatttttattgttgcaatttcacgcacttgggactatagttagtgtcgaagtgcaaaggggcacgaaagtgaaaagctttcgtgcccctttctttttgagaagtggtggcatattgaagtccatatatctgaatgaagattgtatgaaattatgaaaagtaaaatttggaagtgaaaatatcagtcataggtgatataatcaacgatagtttaaatgaaaaggaattagaaattatgagacatttttcgagaacagaattaaaggcagctattaatatgcttaaggagtttactgcgaagggcaattttgcagttcttatgtatatgggggatactgataagcttgaggtatcacagactcttaattcggatatgagctgctttttattatatggaagcatccagccactcgcatttttctttgcagaaaatattcctatgactgcgggtgagttagaagagattattaacaaacagtcagcagtgtatgaagaagagatggacaattacagaaatgcactaaaggaaagcggtgcagataatggactgtttattactaaatatgaaagtatgattcatacatttattgcatatgatcctgaccagagtggtgacagagactgttatgcaccatttattgagggtgcattcaatgttgaaccgggtaagggacagtttgttaatgaagttatgagacttgaagtgtatgatgatgaatatgaggatgactgtgtaatccagaagaagcattttgtatatcttccatcagtaaaatttatgggagcattcaatatgcgaatgatgatgagtatggttgatgcacagtataactaacattttacaattcttaaatttatataatatgtttgaatcccggacttctgtatagtatattagaagtaactttaaagagtggaggggttgtatgaacaaaggacattttaaagacagtcaggttgttaagggaattacgattggtgcagtgctaattgtaatatatcttgcccttaacaatgtgactggaattcttgattctatatcatatcttgcaggacttgtaatgccatttataattggcgcagtcatcgcatttgtattcaatgtacctatgaaagcaattgaaaaaggacttaacaggctgtttgacaagcgttgtaagaagaagcatcccagacttataagagtgcttgcttatatgctaacactgattttgatactggctattattgcaggagtactttttgtggttgtgcctgaactggtgaacacaatagctgaccttatagggcaggtgccaacagcagttaataatcttatcaactggctgcaggtcaagctgtctgcatatcctgagtatgaggaaaagttaagcagcatatcaatcaactgggattctgttctttcaaatgttatgaatttcctttcaataggaactaaaggtattattaatggcggaattggtgcaataagcggatttttctcaggagtcactaatttctttattggatttgtcttttctgtgtatgtgctgtttcagaaagagaggcttacagcacaatgcaagaagcttatgtatgtgtgcttgcctgagaacagggcagataaaattattgaagtgttaagacttaccaacactacattctctaatttcctgtcaggacagtgtcttgaagcatgtattcttggaacgatgtttgttattacattgtctatattgagaatgccttatgcacttcttataggaattattattgcggttagtgcacttattccgattgttggtgcatttatcggatgtatagtcggtgtgattcttataatgatgacaagcccgttaaaggcacttatatttgtgggagtattccttatattacagcagattgaaggaaatcttatatatcctcatgttgtcggaagttcagttggactgccgggaatatgggtgcttgttgctgttacaatcggtggcaatctgtttggtataatgggtatgcttacttttattccaatcagctcagtgtgttatgcgctgcttcggacatatgtcaacaggaaagtggaagagaaggagattgataagggaaagtttaaggggtgatgccttccgggaatggaagtcaggcggctatgcagcttgttttcaaacacgcttgcgctcgttctacgacgcagcggtactaagctcgctgggattcgttggcgttaagccaactgtccaagcttactaagtgccggtgtcttcgcaacggtttgaaaacaagttgtatagtcgcctgacttcattctcacggaagacttttgtgccgtggattggcaggtggagtgtaatatgcggtggagctgtggtggcggattggacgctggagtggtgaagaggcatgtgaaagtccaaattgagtgagaaagtgtggaggattggaccttacaagcaagagaatgaggtaaaaggtccagaattgttgtgaaatctggaaagattggactttttgctgaataagctgcttgtagtgtccaatccgccttgtagtcaatgagttattggacattagcatatgagaaagcagagaaaaagtccaatcagccagattatcatgatatataattaatctggacaacatgatacctataggtagtcgaatatttgaaagtcttataggtcgaaaacacatgagattataatgatagttggaaaatcaacctataaagtcaagaaaatcagaagtgttataggaatattcagtaaaaaacagttttttatataagattgaataagaaaaactgtgaaatttacatataagtggtggattttttatgaattgataggaaatcataatgaattataaaagcaacatccccggcatgattaataatcatgccggggatactttttgttatattctttaattacttattgttcttcttctcgttctcaagcttcttcatagctcttaccttaagtgaaagaccgaagaggttgatgaatccgtcagcatcatgatgatcatacatatcacctgtcttgaatgatgcaattgactcattgtaaagtgaatatggagatgttgttccagccttgatgatgttacccttgtaaagtctgaacttaacttcacctgttacatattcctgagtcttctcaacgaatgcctgaagtgcttcacgaagaggtgtctcccactttccttcgtaaacaacctgtgcaaacttgtttccaacatccatcttgaatgttgttgtatctctgtcgagaactaattcctcaagctgctgatgagcttcgtaaagaattgttccaccaggagtctcatatacaccacgggacttcatacctacaacacggttctcaacgatatcaatgataccgataccatgcttggcaccaagtctgttaagctctctgataatatcagaaaccttcatagccttgccattaactgactttggaacacctttttcaaatgtcatagtaacatattctggttcatccggagcttcctcaggagtgcatccaagaactaataaatgcttgtagttaggctcgttagctggatcttcaagctcaagaccttcatggctgatatgccagatgttacggtcacggctgtagctgcagtctgtgctgaatggaagatgaataccatgctgtctgcagtattcaatctcatcctcacgagactgaagcttccagttagaatctctccaaggagcgataatcttgatatctggagctaaagccttgattgtaagttcgaatctgatctggtcattacccttaccagtagcaccgtggcagatggcaacagcaccttccttacgggcaatctcaacaagtctcttagcgataagaggtcttgccattgaagtaccaagtaaatatttattttcataaacagcgtgtgcctgaacacatggaacgatgtagttgtcgcagaattcatcagtgatatcttctatatataacttagcagcaccacatgagagagctctctgctcaagtccgtccaactcctcttcctgaccacagtctgcacatacgcagacaacatcatagttgtatgtttcctttaaccaagggatgatggcagttgtgtcaagtccgccagaataagcaagaataactttttctttcattatatattcctccgtatattattaagtttacatagtaaaacacatatgctatgcacctgcagattataataaactactttatttaaaaatgcaacaacaaattatgcatattatacattgatatacaacgaaaatgtataaatataaaatttctttaaaatatcctttacataagaaaaaaagttgctataatgtaggttatcaatttacattttgcgttattttatgcataaatgttgaatatatgcattttgcttcgcaaaacaaggaggagttatgattaaagtaggcattatcggtgcgacaggttacgcaggtaacgagcttgtcagattattattaggacataaggatgcagagattgtatggctcggttcgagaagttacatagatcagaattattcagatgtatatagaaacatgtttaagcttgtagatgcaaaatgtatggacgacaatatggagcagcttgctaacgaggttgatgttatatttacagcaacaccacagggcttatgtgcgtcacttgttaatgatgagatactttcaaagactaagattattgatttgagtgcagatttcagacttaaggatgttaatgtatatgagcagtggtataagcttgagcataaagcaccacagtatattgatgaagctgtttatggcttatgtgagattaacagagataaggtaagcaaagacacaagaatcattgctaacccaggctgttatacaacaacatcaattcttacactttacccaatggttaaggaaggaataatcaatccggatacaattataattgatgctaagagtggaacttcaggtgcaggacgtggcgctaaggttgccaatcttttctgcgaagttaatgaaagcatgaaggcatatggcgtaggaactcacagacatacacctgagattgaggaacagttaggttatgcatgtggaagagatgatttaaagcttatcttcacaccacatttggttccaatgaacagaggaattcttgtaacagcatacgccaaccttgccaaagatgttacatatgaagatgttaaggcagcatatgacaagtactatgataaggaatatttcgtaagagtacttcctaaagatgtatgccctgaaacacgctgggttgagggaagcaactttgttgatataggatttaagattgagccaagaactaacagacttataatgatgggtgcgttagataatcttgttaagggtgcagcaggtcaggcagtacagaatatgaaccttctcttcggacttccagagaatgagggattacagcttgcaccaatgtttccataataaatgtagcgtaaattcagaatttacacgacgaaatatgcacaatgacagagtatatgtgatggtacaataggaggatgttatgaatataattaaaggcggtgttacagcagctaaaggattcaaggctgccggatgtgaagcacagattaaatataagaacggaaagaaagatatggcacttgtatacagtgagaagccatgtgttacagcaggaacatttacaactaacaaagtatttgcagctcctgttaaatgggacagaaacattgtatataatgaagactttgcacaggctgtagttgtaaacagcggtgttgccaacgcatgtacaggcgttgaaggagataacgcatgtgcagaagaagcaaaggcagttgcaaaggttcttaatgtaccggagaatgcagtacttatcggttcaacaggtgttatcggaatgcagcttcctgttgacagaatatgtgcaggaattgaaaaccttgctccaatgcttgatgattcattagaagcaggaacacaggcagcagaggcaattatgactacagatacaagaagcaagcaggttgctgtagaagtagaagttgcaggtactaaggtaacaatcggtggtatgtgcaagggcgcaggaatgattcatcctaacatggcaacaatgctctgctacataacaacagactgtgatatcgacaaggcacttcttcagaagatgacaagtgcaattgttgatgattcatttaacatgatatcagttgatggagatacatcaactaatgatacagctcttgttcttgctaacggaatggctggcaacaagaagattacagaagagggtgctgattataatgctttctatgaaggcttaagctatgtatttacagagctttccaagatgattgcaggtgacggcgaaggctgcacatgtcttttcgaggttcaggtaaagggtgcaacaactaaggcagaagccaagacactcgctaagtcaattgttacatcaagtcttaccaaggcagcaatattcggacatgacgctaactggggaagaattctctgtgcaatgggatattctggtgctgactttgaccctgaaaaggttgatatattctttaagagtgaagcaggtgagcttcagattgttaaagatggaactgctacagattacagcgaggagaaagcaacggaaatactttcacagaatcctgtaattgctattgcggatgttaagcagggcgatgcaagcgctacagcatggggctgtgaccttacatttgattatgtcaagataaatgctgattacagaagctaatctgacacagcattttaaagcaaatagatatctgaataaatatgaaatggagattattatgagcgcaaaagatatgacagaggaacttatgaaggcacaggtgcttgttgaggcacttccttatatccagaaatttaacagaaagataattgtagttaagtacggcggaagtgccatggtagatgaagaacttaagagaaaagttattcaggacgtagttcttcttaaacttgttggttttaagccaatcatcgttcacggcggtggcaaggaaatcagcaaatgggttgaaaagtcaggcatgacacctgaattcaagaatggtttaagagttacagacgagccaacaatggagattgccgagatggttcttaacaaggttaataagagtcttgtgtcaatgattgagcagcttggagttaaggcatgtggtatcagtggtaaggatggcggcatgttaaaggttgagaagaagtattctaagggtgaggatataggatatgttggtgaagtgacagatgttgacacaacacttcttgattcattgcttaaggacgatttcttaccggtaatatgtcctatcggatatgatgatgatttccatgcatataatattaatgctgatgatgcagcatgtgccatcgcaagagcagtcagtgctgaaaagcttgcattcttaacagatattgaaggtgtgtataaggattttgatgataaggattcactaatatctgagctttctacctcagaggcgagaacgcttttagagagtggaacaattggcggcggtatgcttcctaagcttaataactgtatagatgctattgagcatggtgtatcaagagtacatattcttgatggaagaattccacactgccttcttcttgaaatatttactaacaagggtgttggtacagctattctttcagatgatgcagaaaaattctttgattcagataaataattgcgaaccgtaagcgttgaggttataatattatattggctcatgtgaaaatgtgtgctcataagaataggaaagtgagagtaatcatgaatacacagcagattatagaaacagcagaagagaagctgattcatacatacaaccgttaccagatagtacttgataagggtgacggagtaagactttacgatacagatggtaaagaatatcttgattttggagcaggtatagcagtatttgcacttggttataacaataaagaatataacgatgcattaaaggcacagattgataagcttatacacacatctaattatttctataatgaaccggctgtagaggctgcaactgcacttacaaaggcttcaggaatggacagagtattctttactaacagtggaacagaggctattgaaggtgcagttaagcttgcaaagaaatattattatgtcaagaacggaaaggctgatgcagagattattgcaatgcagcattcattccatggaagaagtatgggagcacttgcagtaactggtaataagcattatcaggaagcattcggacctatgataccgggaattaagtttgcacagtataacgaccttgacagtgtaaaggaacttgttaatgacaaaacttgtgctataatatttgagacagtacagggtgaaggaggaatttatcctgctactaaagaatttattgaaggtgtaagaaagttatgcgatgagaagggaatccttcttatacttgatgagattcagtgcggaatgggaagaacaggaagtatgtttgcattccagcagtatggcgttaagcctgatatccttacagttgccaaggctcttggctgtggagttcctgtaggtgcatttgcagcgacagaggaagttgcgaaagcattagttccaggagaccatggaacaacatacggtggtaatccacttgcatgtgcagcagcaaccaaggtgttcgaactttttgagaagcaacatgtattagataatgtcaaggaagtatctgcttactttgaagaaaagcttgatgagcttgttgagacaatagatgttgttgtcgagagacgaggaatgggacttatgcagggacttgagttatcagttaatcctaaggacgtaattgccaaagcacttgataacggacttattctgttctcagcaggaactaatgttataagatttgttccaccacttgtaatcactaaggcagatgtagatgaatgcatagctaagcttaagaaatccttctagaatcaggagtttactttatgaaattaagaagatttatcagtatgatgctgattgttaccatgctgacagtctttgcaggctgtggtaataaagatgacaggacacaggctgcgaagaagcttaatcttagtggacctattacagttaatgtctggtataatgacagcgcatatgagtcttatcttgaattcgttgccagacaatttaagaaatctaatgaactggtaactattaatcctgtatatattgaggctgattcatatattacttatatatatgacgaatcggtcagaaacgacaatgcgtgtgatatatattttctgacatctgaagagatggagaaggcttatctttcaggtcttacctctgagaatgatatgtatcctgaagtctataatgagaatgtgtatggtaaggctgcaatgactgcatgttcgtatggtggtaagttatatggttacccagtgtcgttcaacacttcatttcttgtatataataagaaatatgcagaagcagttgatactatagaccagattcgtaatataagtgataattatcagattacagatgagaatcaggatgtttcaatggtgtttgaatgggatcctgattcaatgttccttaattatgcagcagcaggagcctatattaatataggcggagttaatgcagagaacagggctgaggtatctcttaatgaggaaaagattaagaaggttcttactaagtacgctcagttaaaagatgcatttggtattgacagaaatacagtaagtcttaaagaatgtgcggatctgttttctactggaaatatgctctatacggtgctagatgcagacagtcttgcagagattaatgttacagatgtagattatggaatatgtgagtatccttcaatgggagatgaccttgattctaaggcaatgtctgttactacgatggcagtagttaatccgtacactaagaatgtagatgcatccaaggctgttgcaagagcaatttcttatgattatgcagattatcttgggaacatggctaagaaaagctgtgcaagggcggatttaaaggttaagagagcagaaagctaccagaagttacaccagatttattctgactctgttgtaaaagctaaatatatcggagtaggagaagtgtatatgagatatgagattatgcttcatcaggtatatgatggtggaaatgttgatacagcttacagtacatttgcaacaacaatagaaaaaacaactaaaaataataatgaaaacagtacgcagagtactaaataacattatgaataaatatcctgttattaactaataattatcctatgcagattaatgtggaggttagttaatggcaggatttttgattgcaataatatcaggtgcacttatgagtttacagggcgcatttaatacaaatgttacaaaagcaagcagtgtgtgggttacggcaatgtttgtgcagttgacagcactggcgacttgtgcgattatgtgggtaattgacggaagacctgatatcatgaagctgtttaaggttgataacaagattacacttcttggaggtgtgataggtgcatttataacatttacagttataaaaagtataagtggtcttggaattgctaaagcggaggttacgattgtagttgcgcagataattgtttcgtatctgctgggacttttcgggctgtttggaagtgagaagactacattttcatggattaagctcgtgtcgcttcttattacggttgcaggagtatgtatgttttattttcttggtaatccgtcaacggattaatatattatgaataattatgatacatgtcagaaaaatctggcaggaaggaacagaatggaagatttattcagcgtatgcggaaagatacgattaagaaaaggtgaaggaagaacattaaaggcaggcggtgcctgggtatatgataacgaaattgaatggatgtctgacggaataattgatggacatcttgttgaggtgcttgattttgatgattatttcatgggaatcggatttattaacagaaaatccaagattacagtaagaatgctcgcaagacacactgatgttgttgatgaggcatttattgaggagagagtaagggctgcggttgaatacagatttgacacagtagatacctctgcctgccgtcttatatttggggaggcagattttctgccggggcttgttatagataagtactcagatgtgcttgttgtggaatcgcttgctttaggtattgacagatttaagtcgcttattgtcgaaaaagtgaaggaaatccttcatgaaaaaggcattgatatccgtggagtatatgaaagaagcgatgccaaagtccgtactcttgaaggaatggagagagtaaagggctttattggtgatgaatttgacactaatgttgagatagttgagaatggtgtccactacatgatagatgttgtgaatggacagaaaaccgggttctttcttgatcagaagtacaacagacttgcaatgcagaagctttgcaaggacaagagggtattagactgttttacccatatgggtacatttgcattaaatgcaggaattgcaggtgctagggaagttacaggacttgatatatctgaatatgctgttgaacaggcgagagccaatgcaaagcttaacggacttgaggatacagtacattttaaatgtgcaaatgtattggatgagctgccaaagcttaacgaagcaggtgagaaatatgatgttgtaatacttgacccgccggcatttaccaaatcgagggaagctacaaagaacgcaattaagggctacagggaaatcaatatgaagggacttaaacttgtcaaagacggtggctaccttgcaagctgttcatgctcacacttcatgacacaggagcttcttaccaagactattaaggaagccgctaaagctgtacataaaagactccgtcaggtcgagttcaggacacagtcacctgaccacccaatactgtgggaggcgcaggagagctattatctgaaattctacatcttccaggttgtggatgaaaaatga

SEQ ID NO: 1106 - DNA, 58767 bp, unidentified
  source 1..58767: mol_type = unassigned DNA
gcgaagttggaaagcttgatcttaacgatagcgtattcgctgttgatgtaaatgagcatttgatgcatatggctgttgtattacagcttgcaaataaacgtcagggcactcagaaggctaagacacgttctgaggtgagcggtggcggaagaaagccatggagacagaagggaacaggtcatgcaagacagggttccacaagatctccacagtggacaggcggtggagttgtatttgctccaacaccgagagattattcattcaagatgaataagaaagagaaggccggtgcaattaaatccgcactgacaacaaaggtaaacgaggagaaattcttcgtaatggattctttgaagtttgatgagatcaagacaaagaagatggtaagcgttcttgatgcattaaaggtaaacaaagcactcgttgtacttgacggcgaggacaatgacaacgtagaggtttctgcaagaaacatcgccggagtcagaacggtttactccaacgcaatcaacgtatatgacattctgaagtatgatacaatcatcatcacaaagagtgctgtagcaaagcttgaggaggtgtacgcataatggcagatttgaaatattatgatgttatccagaagccaatcgtgacagagaagtccatggcatctatggaagagaaaaagtacacattcgctgttcatccggatgctacaaagagccaggtgaaggaagctgttgagaagcttttcgacggaacaaaggtttcaaaggtaaacacaatgaactgtgacggtaagactcgtcgccgtggaagaactcagggtaagacagctaagtataagaaagcgattgtacagcttacagaggacagcaaggatatcgagatctttgagggactgtaaaatctgagtaagacctaaaacgcctggaaaacctatcgggcggatcaaatataagtatttgaaaggagaaaatgtcatgggaattaaaacatttaacccatatacaccttccagaagacatatgactacaatggatcgtgctgagattacagctacaactcctgagaagtcactgaccgtgtctttaaagaagaacgccggacgtaatgcacagggtaagatcactgtaagacatcgtggtggcggatcaagaagaaaatacagaattatcgattttaagagaaataaggatggtattccggcaattgttaagacaatcgagtatgatccaaacagaacagcaaatatcgcactgatcagctatgcagatggtcagaaggcatatatcctcgctccggagggactgaaggttggtcagaagatcatgaacggtcctgaggcagagatcgcagtaggaaacgcacttccacttcagaacattccagtaggttctcaggttcataacattgagctttaccctggaaaaggtggtcagcttgttcgttccgctggtaacagcgcacagctgatggctaaggaaggtaagtatgcaacacttcgtcttccttcaggcgagatgagaatggttcctattgtatgccgcgcaacaatcggtgttgtaggaaatggtgagcatgcacttgttaatatcggtaaggcaggacgtaagcgtcacatgggtatcagacctactgttcgtggttctgttatgaaccctaacgaccatccacacggtggtggtgaaggtaagacaggtatcggccgtccgggtccatgtactccttggggcaagcctgcacttggcttaaagacacgtaagaagaacaataagtcaaataaactgatcgtaagaagaagagacggaaaggctttggctaaataataagtcaaagcagtctgcttgaagattggattagccgttaaggcagaatggaggatacaatggcacgttcattaaagaaaggacctttcatcgatgcaagccttgagaaaaaggtaaacgctgcagtcgcatccggtgataaggcagtgatcaaaacatggtctcgtcgttccactattttcccatcattcgtaggattgacatttgctgtacatgacggtagaaagcatgtacctgtatatgttaccgaggatatggtaggacacaagctcggcgagttcgtagctaccagaacctacagaggtcacggtaaggacgagaagaagggccgttagtcattgatgacggcggagagataaattaacagagaatcgaaaggaggcttcacaaatggctaaggggcatagatctcagattaagagagagagaaatgagaaccagaaagacaccagaccttcagctaagttatcttatgcaagagtttcagttcagaaggcttgttatgtgttagatgccatcagaggcaaagatgtagagacagcaatcggtattttgacatataatccaagatatgcgtccagcattatcttaaagttattacagtctgcagttgcaaatgctgagaacaacaatggtatgaatcctgagaatttgtacattgaagagtgttatgcaaataaaggaccgacaatgaagagaatcaaaccaagagcgcagggtagagcataccgtattgagaagagaatgagtcatatcacgatcgtactcaacgagcgctaatcataagtttgcttcagatcagaatttttgatctgtgaaaggagattaaaatgggacagaaggttaatcctcatggtttaagagtcggtgttatcagtgactgggattccaattggtttgcagagggtaaatttgcagactatcttgtagaagattacaagatcagagaatttgtaaagaagaaattatacagcgctggtatttcaaagatcgagattgagagaccgacagataaagtaagagttatcattcatacagcaaagcctggattcgtaatcggtaagggcggtgctgagattgagaatctgaagaaagagttattaaaggttttagatcgcaaggttgcattggatatcaagatcatggacatcaagaatccggacagccatgcgcagttagtagcagagaatattgcgcagcagcttgagaatcgtatctccttccgtcgtgcaatgaagtctgcaatgggcagaacgatgaagacaggcgcaaagggtgtgaaggcatcttgctccggacgtctgggcggtgctgatatggctcgtacagagttctacagcgagggtacaattcctcttcagacacttcgtgctgatattgattatggcttcgctgaggctgacacaacttatggtaaggttggtgttaaggtatgggtttaccatggtgaagttcttccaaccaagaataacaaaaaggaagggagcgataaataatgttaatgccaaagagagtaaaacatcgcaagcagttccgcggtagaatgacaggaaaagcgctcagaggaaacaagatcacaaatggtgattttggtatcgtggctttagagccggcatggatcaaatccaaccagattgaggcagcccgtattgcgatgacacgttatatcaagcgtggtggtaaagtttggatcaagattttccctgacaagccagtaacaaagactcctgccgagactcgaatgggtaaaggtaaaggtgcgctggagtactgggtagctgttgtaaaacctggtcgtgtaatgttcgagatttcaggtgtatcagaagaggtagcaagagaggctttacgtcttgcaactcataagttgcctgttaaatgtaaggtcgtatctcgtgcagacttagaaggaggtgcgggcagtgaagagtaagcagtttatggaagaattgaaaagtaagtccgttacagaattaaatgaagatttagttgctgcaaagaaagagctgttcaatctgaagttccagaatgcaacaaatcagctggataatacgagccgtattaaggaagttaagaagaatatcgcaagaattcagacagtgctcgcatcccagaactaattcatttgatagaagccctatggaaaggaggacacgatcgtggagagaaatcttagaaagactcgtgtaggtaaagtagtaagtgataagatggataagacaatcgttgttgcagttgttgataacgttaagcatccactttataacaagatcatcaagagaactcgtaagctgaaagctcatgatgaggagaatacatgcaagatcggtgacagagtaagagtaatggagaccagacctttgtctaaggacaagagatggagactggtagaggttatcgagaaagcaaaataattgtgagccgggtattagacggcagaatatggaggtaattatgatacagcaggaatcaagactgaaagtagctgataatacaggtgctaaagagcttctttgtatcagagttatgggtggttcaaccagaagatatgcaagtatcggtgacgtcatcgttgcttctgtaaaagatgcaacaccaggcggtgttgtaaagaagggtgatgtcgttaaggctgttgtagttcgtacagtaaacagcactcgtcgtcctgatggatcctacatcaagtttgatgagaatgcagccgttatcatccgtgacgacaagacaccaagaggtacacgtatctttggaccagtcgcaagagagttgagagataagcagttcatgaaaattgtttcattagcaccggaagtattataaggagggtatcgacaatggcaacaagtaagattaaaaaaggcgataccgtaaaagtaatcgccggtaaagataaaggccgtgagggcaaggtaacatccgttaaggatggcaaggttattatcgagggaatcaaccaggtaacaaagcatacaaagccaaatcaggcaaatcctcagggcggcatcgttcagaagtcagctcctctggatatttcaaacgtaatgtatgtgagcaagggaaaggtttcccgtgttggctttaaggtagaggacggtaagaaggttcgctacgcaaaggcaacaggtgaagtaatcgactaataactggaaaggaggcaatctaacgtggctcgtttaaaagaaaagtataacaacgaaatcgttgatgcaatgaccaagagatttggttatgaaaatataatgcaggtacctaagctcgagaagatcgtagtaaacatgggtgtcggcgaagcaaaagagaactccaagattttggattctgcaattgctgatttggaaaagatcacaggtcagaaggccgttacaacaaaggcaaagaattctgtcgcaaacttcaagattcgtgagggaatgccaatcggatgtaaggtaacactccgtggtgagaaaatgtatgagttcctggatcgtcttgtaaacctcgcactgccacgagttcgtgactttagaggtgttaatcctaacgcattcgacggtagaggtaactacgctcttggtatcaaggagcagttaatcttccctgagatcgagtatgataaggttgacaaggtcagaggtatggacattatcgttgtaactaccgctgagactgatgaagaagctcgtgaattattggcacagttcggtatgccattcaagaagtaaggagggaatctcatggctaagacttctatgaaagttaagcagcagcgtaaggcaaagttctctacaagagaatatagtcgttgcagaatttgtggtcgcccacatgcttatttaagaaaatacggaatctgcagaatctgcttccgtgaattagcatacaagggacagatcccaggcgtgaagaaagcaagctggtaaggaggtaaaacaagatgatgacgagcgatccaattgcagatatgcttacaagaatccgtaatgccaatactgcaaagcatgatacagtagatgtaccaagctcaaagatgaagatctctatcgctgagatccttctcaaagagggttatatcaagaaatatgacgtgattgacgttgacggaattaagacaattcatatcacattaaaatatggcgcagacaagaacgataagattatcaccggtctcaagagaatttctaagccgggtcttagagtttatgctggcaaggatgagcttccaaaggttctcggaggacttggaattgctatcatttctaccaacaagggagttatgacagacaaggaagctagaaaagaaaacgttggcggtgaagtactggcatttgtctggtaatcataccagaaagtcagccacccattaaaccaagaatatggaggtgcacggcatgtcacgaatcggaaaaatgcctatcgcggtaccggctggtgtaacagttgatattgcagaaaataataaagtgactgtaaagggaccaaagggaacacttgagagagtgcttccggcagagatggagatcaagaaagagggagacgagatcatcgttaaccgtccaaacgatcttaagaagatgaaatctctccatggtcttacaagaactctgatcaacaacatggttgttggtgtaacagagggatatgagaagaagctcgaagttaacggtgttggttacagagctgtaaagaagggaaagcttcttacgctgtccctgggatactctcatccggtagagatggaagatcctgaaggaatcgaagttgtagttgaggacgctaacacactggttgttaagggaatcgacaaggaaaaggttggccaatacgctgctgaaatcagagagaagagagctccggagccttataagggtaaaggtattaagtatgctgatgaagtaatcagacgtaaggttggtaagaccggtaagaaataatataaaggagtgaaaatacgatgattaagaagcagtcaagaagtgatgttcgtgtgaagaaacacatgaaggttcgtaatcgtctttcaggcacagctgagagaccacgtttagctgtatttagaagcaataatcatatgtacgcacaggttattgatgataccgtaggaaatactctggttttcgcttctacccttcagaaagatgtgaaggacggtcttgagaagacaaataacgtagatgcagcagcaaagcttggtgagatcatcgccaagaaagctttggataaaggaattaacacagtagtatttgaccgtggcggttttgtatatcagggcaaggtaaaagctttggctgaggcagccagagaagcaggcttgaatttctaagattaggaggagaactcatgaaacgtacaattattgacccaagccagttagagctggaagataatgtagtaacgattaagcgtgtaaccaaggttgttaagggtggacgtaatatgagatttactgcattagtagtagttggcgataagaacggacatgtaggtgctggtctgggtaaggccacagagattcctgaggctatccgtaaaggaaaagaagctgcagagaagaaccttgtcgaagttcctatcgatgagaacggaagcgtaccacatgacttcaatggtaagttcggtagcgcatctgtattgattaaaaaggctccagaaggtactggaatcatcgccggtggtccggcacgtgccgtacttgagcttgcaggatacaagaacattcgtacaaagtctcttggttcaaacaacaagcagaacgttgtacttgcagcgatcgagggacttaagaatcttaagactcctgaggaggttgcaaaggctcgtggtatttctgtagaagagctgttaggctaaaaggaggatcaaaatggcaggaaagttaaaggttacattagtgaaatctacgatcggtgccattccaaagcatcgtgcaacagtggaagcgctcggcttaaagaaactcaataagtcagttgagcttcctgacaatgatgcagtcagaggaatgatctggcatgtaaagcatcttgtaaaggtagaagagatctaagcaggatatatgtcaaacgaaagaaatgtctcattttatggggcattttttttgtagtcaatttttttggaataaggcttttcatgacgcaaattatgtgttatgatatatgatgtgtcgctttgcagacacatgtaacaattgcgagggtaaatgagatcactgttctcatttaaggggtattggtcataccctgcgtcaggatcggtcaatccgcaaaatgaccgtggatgcgcatagcccgttagtatttataatcaggaggtaattacaatgaatttatcaacactcagaccagcagaaggctcaaagcagagcaacaatttcagaagaggccgtggccatggatcaggaaacggtaagacagcaggtaagggacataagggtcagaaggcacgttcaggtgctccacgtccgggttttgaaggtggtcagatgccactgtacagacgtattcctaagagaggtttcacaaacatcaactctaaggagatcgttgcaatcaatgtagataagcttaacaagtttgaagacggtgcagtagttactgtagctgctttacttgaggcaggtgttatcagtaatcctaaggatggagttaagatactcggaaatggagaattaactaagaagcttacagttcaggtaaatgcattcagtaagagtgctgctgagaagattgaggctcttggtggaaaagctgaggtgatctaaggatgttcgaaacagtccgcaatgcatttaagattaaggatttgaggaaaaagatcctctacacactcttcattcttgtcgtagtgcgtatcggatgtcagcttcctatcccgggtgtagatgccgactacatttcacagtggttcgcagatcagaactccctggatttctttaatcagttgaccggtggttcctttgagaaaatgtctattttcgcactgaacattacaccgtatatcacatcttccattatcttacagctgctcacgatcgcaattcctcgcctcgaggagctgcataaggacggcgaagagggaagaaagaagatctctgagtatacgagatatgtaacaatcgtactttctctgatggaaagtgccgcaatggcaatcggttttgccagccagggtctcctgacaggtggagctacatttacatccatcacagtttgtatcgtatccatgacagcaggttctgctcttttaatgtggcttggtgagcagattacagagcatggtgttggaaacggtatttcaatcatcctgttatacaacatcgtgtcacgtatgcctgaggacatgagttccctgttcaacaagttcgtcaagaacgcttctacaacagtgaacagtctgctggctgctgttattattatcggagtgcttgtagcaatggttgttttcatcatctatctttccgatggtgagagaagaatcagtgtacagtattctcagaagacaagaggccgcaagcttgttggcggacagtcttcacatattccgcttaaggtaaacacagcaggcgttatcccggtaatctttgccggatccctgttctcaatgcctattgttatcgcaaacttcgcaggtcttcagccggcatccggtgcaggcgcatctttattccagaagttcctcaaggttctgaaccagaacgcatggtgcaacttcgagagctttggcgagtttaagtatacattaggtcttgttgtatatattgcattgatcattttctttgcttacttctacacatcaatcactttcaatccacaggagattgccatgaacatgaagaagcagggaggattcattccgggtatccgtccgggaaaaccgacgatggattatctgaccagtgtactcaacagcatcatcttcattggtgcgacaggtctgtcaatcgcttcacttgttccgattttcttctcgggagcatttggtgctgatgtatctttcggtggaacatcaatgatcattatcgtaggtgttgttatcgagacattgaagcagatcgagtcacagatgctggttcgtcattacagaggtttcatcagcgagtaattatcgcgtattgtcttttgtgatgactgcataagagatatggaatccccgcacccaggcgcagccactgcccggatgtggggattttttcagaaaagagggacaatatggaaaaaccaatcttatatattgtgataccttgttacaacgaggaagaagtgctgccgatcaccagtggggaatttctggcgaagatcaattcgctggcatcgaaggacaagatcagtgaagacagccgtgtgcttttcgtcaatgacggaagcaaggaccggacctgggagatcatcaaagagctttccaaagaggacgaacactatatcggaatctcgcagagccgcaatcggggtcatcagaatgctgtgctggcgggactcatggaggcaaaggacaaggcggatattacgatctccatcgactgtgacggacaggatgacatcaatgcgatggacaatatggtggatgcgtatctggacggctgtgagattgtttacggcgtccgcagcaagcgtgatacggatacgttctttaagagagcgacagcgcagggattttacaagctgttaaatgtcatgggggcagaggtggtctataatcatgccgattaccgtctggtgtcctccagagtgctgcatgagtttgcaaatttcaaggaggtcaatctgtatctgcgcggcatgtttccgctggtgggcttcaaaagcacaagcgtgtattatgagcgccacgaaaggattgccggtgagagccattatccgctcagtaagatgctgggacttgcctttgacggcatcacgagcctgagcatcaaaccgatccggatcatcaccgggatcggcacctttatctcactgctcagctttctggcgatcatctggacgtttatcatgttctatatgaagcacagtgtggtcggctgggcaagtacaatcagtattatctgcttcattggcggtgtgcagctgatctgcctcggtgttctgggcgagtacatcggcaagatctatatggaagtcaagcacagacctcgttacatcatcagtgacagaacagaagacgacaaataaatatccgtctgcaggcggttggagatgtgcaaaataccggttcgcaggcggtcacaaaaaacggttgaaaaataaaccgccttggagtatcatatactatagacgtctttttgaagatgtgaagggtatgatacacgtgaaaggagaatatattcatgaagattattatgttgggggcaccaggtgccggaaagggaacacacgctggcaagatttcagagaaatatggcattcctcatatttccaccggtgatattttccgtgagaatatcaagaacggtacagagcttggaaagaaagcaaagggctatatggatgccggagagcttgttccggatgagcttacctgtgatcttgttgtagacagaatccaccaggacgatgcaaagaacggttatgtactcgatggattcccaagaaccatccctcaggctgaggcgctgacaaaggctctggcagctaccggtgagaaggttgattatgcaatcgagatcaatcttgcagatcaggtgatcattgatcgtatgagcggtagaagagtatgctcctgcggtgcaacctatcatattgtaaacattcctccaaagaaagaaggaatctgcgataaatgtggtaaggagcttgtgatccgtaaggatgatgagcctgagaccgttaagaagagactggaagtatatcatgagcagacagctccattgatcgactattataagaatgaaggtattctccgtgttgtcgatggaacaacaggacttgaacagggcttcaaggacatctgcgcaatcctggatggtgagcagtaaatagaatcacaccggcggatttccagccgtgtcggcgcgacgactaaaaattcattataaagatgaggaaagaaggcataatatgtcagtaacaattaaatcagaacacgaaattgaacttatgagagaggccggaagaatcctgtccatcgttcatcaggagatggcaaagatcattcgtccgggcatatccaccatggacatcaaccgcaagggcgaggaagtgatccgtagctatgactgcattccgtccttcctgaattatcagggatacccggcatccatctgtgtatccgtcaacgatgaggtcgttcatggcattcctaataagaagaggatcctgcaggagggcgatatcgtcagtcttgatgcgggtgttatttataaggggtatcattccgatgctgccagaacgcatgcagtcggacagatttccgaggagaacagacgtctcatcgatgtgacgcgccagagcttcttcgagggcatcaagtatgccaaagcaggtaaccacctctttgagatttccaaagcagttcaggattttgcagaggcaaacggatatggagttgtacgtgatctggttggtcatggtgtaggtaaggatctccatgaggagccgcagattccgaattacaaaccgatcggacgcggtatgaagcttcgtccgggtatgacactggcgatcgagccgatgatcaatatcggaacctgggaggtatgggttcttgaggatgactggaccgttgtaacacaggattctctgaactccgcacactatgagaatacggtcctgatcaccgagggtgagccggagttattatcttatccggaatgggatcataattatgaaacaataaaggcgtaagaatggaggaaatatgtcaaaggaagatgtaatagaaattgagggtattgttgtagagaagctgcccaatgcaatgtttaaggtagagctggagaatggtcatcaggtactggctcacatcagcggaaagcttcgcaagaactttatccgtattttgccgggcgataaggtgacaatggaaatgtctccgtacgatctgacaaagggacgtattacctggagagacaaataaccggtacagccggtaggatgatcggagctgtccacagcgtatattgtggacggctccgttttctttttgaataatatgaaaaaaataaaaagtttgtcttgcaatgcctaaaattttatgatatagtggttaatggacttttctgaaaggaggttattgctgtgaaagttagatcttcagtaaaaccgatttgcgaaaaatgtaaggtcatcaagagaaagggtcgcgtcagagtaatctgcgagaatcctagacacaaacagagacagggctaatgagagaacggaaaccaaagcatatcactttggcttttctgttgttaaaatagaacttgctttctgtaattatagtgcgttttataacatgcgcactgtgacattgtggatggagtgattacccatctcatcacggctatgtgtcatttcatagcaggatggtcctgccacggcagatgatgactgcggcgtagatcgatcgtcaattcgcaggcgatcccgagggacagcaatagggctgtcatagtgaaaaatgtctatgcagtgggattacaatttaaagcggctgaagatgaaggaaccatctattccctcatcgaaatcactgaaagcatggggattcccatgtgaccggcagcgtggctgccacgaaactcattgtaaaatagaaaattaacggaggtgtaaagtacacatggctcgtattagtggtgtagatttaccaagagagaaacgtgtagaagttggtcttacctatatttatggtatcggacttaccagctcaaagcgtattttggcagaagctaatgtcaatcctgacacacgtgtcaaggatcttacggacgaggaagtttcccgtatccgtgatgtcattgacgagacacagacagtagagggtgatcttcgcagagagatcgcaatgaacatcaagagactccaggagatcggatgttacagaggtattcgtcatagaaagggtctgccggttcgtggacagaagacaaagacaaatgccagaactcgcaagggtcctaagcgtactgtcgctaataagaaaaagtaatttaggtaggaacagttagacactctaccaaaatctaactaggagggtttgataatggctaaagtagcaacaaagaaggcaacaaagaagcgtgtcaagaagaatgtcggacatggacaggcacacattcagtcttcctttaataatacaatcgttacgcttacagattcagaaggaaatgctatttcctgggcaagcgcaggcggattaggattcagaggatccaaaaagtcaactccatatgcagcacagatggctgcagagacagcagcaaaagcagctctgccacatggtttgacatctgttgacgttatggttaagggacctggttcaggccgtgaggcagcaattcgtgcactgcaggcatgcggtatcgatgtaacaagcatcagagacgtaacacctgtaccacataatggatgccgcccaccgaagcgtcgtcgtgtttaatcaatgattaccagattaggaggatatagaaatggcaagagatatgacgcctgtactgaagagatgtagagctcttggtatcgagcctgcatacatgggacttgataagaagtctaagagaaatgttcgcgctggcagaaagccaagtgagtatgcattacagttaaaagagaagcagaaagcaaaattcatctacggtgtacttgagaagccgttcagaaacaattttgcaaaggcacagaagttaaaatacggtacaaccggtgagaaccttatgattctccttgagctgagactggacaacgtagtattccgtatgggatacgcacgcaccagaaaagaagctcgtcagatcgttggacacaagcatgtacttgtaaacggcaagtgtgtaaacattccatcttacacagttaagccgggcgataagatcgagatcaaggaaaaggttaagggataccagagatataaagatgttctggagactaccgaaggcagactgatcccggattggcttgaggctgatcatgagactctgactggtacggttaaagagattcctacaagagagcagattgatgttcctgtaaatgaagtgcttatcgtcgagttatattctaagtaataaccggatagcatgtgagcataaacccaaaaggagggtcctggagtgcttgattttaaagaaccaaatattgagattgttgagatttcagaagataagaaatatggacgttttgttgtagaacctctggaaagaggatacggtacgactttgggtaattctctcagaagaattatgctttcatcattgccgggtacagctgttagtcatattaagattgatggcgtcgttcatgagttcagctccattcctggagtaaaagaagatgttacagagatcatcatgaacatcaagagtttagcaatcaaaaacaacagcgactccgatgaagttaagacagcatatatcgaggcttccggcgaaggcgtagttacagcagcagacattcaggtggattccgatatcgagatcgttaatcctgatcaggtgattgctacactgagtggcggtcctgactgcaagctctacattgagatgacgattgtcaatggacgtggatatgtcagctctgataagaacaagagagatgacctgccgatcaacgtgatcgccattgactcgatcttcactccggtagagagagtaaatattcagatagaaaatactcgtgttggtcagattacagattatgataagctgacccttgagatattcacaaacggaacaattgagccaagcgatgccgtaagtctggcagcaaaggtgctcagcgttcacttgaactcattcatcaacctttcagagaatgcaaagaaagcagtaatcattgcaccatctgaggaagatgacaaagagaaggttctcgagatgaacattgacgaactggagctttccgttcgttcttacaactgcttgaagagagcaggtattaacacggttgaagagctgtgtaaccgtacatcagaggacatgatgaaagtaagaaacctcggacgcaagtcactggatgaggttttagcaaagttaaacgaattaggtctttctctgaatttaggagaggataattaggaggtaagcaaatggcaggctatagaaaacttggaagaacttccagccagagaaaagcgttgcttcgtaatcaggtaacagatctgctttactacggaaagattattactacagaggctaaggcaaaggaaattcgcaagattgcagagggaatcattgcattaggaatcaaggagtgcaataatttcgataccgtaactgttactgcaaaggtagcacgtaaggataaagacggcaagagagtaaaagaagttgtagacggtaagaaagtaactgtttatgacaatgttgagaaggagatcaagaaggatcagccttcaagacttcatgccagacgtcagatgcagaagactctgtacaagatcacagaggttcctgcagatgcacagggtcgcaagagcggtacaaagacagttgatgtttctaacatcgtactggatgagctcggaccaaagtatgcagagcgtaacggtaatggtggttacacccgtatcgtaaagattggtcagcgtaagggtgatgctgctatgcaggtactcatcgagctggtataattgaatttttgaaaacagagggcgtgcatgatatgtgcacgccttttatagtatatacgggaaaggcggtagaacaatgcagccgataattgacgcaaaggatctggtacatgaatattccagacgcgatgaagagggaaatgtgaccggaattacccgggcgctggatggcgtttccatgcaggtaaagcagggggatctcattgcggtgcttggagccaacggctccggtaaatcgaccttcgcaaagcatctgaacgctttgctgacaccgaccgagggcacgctgtatgtcggaggaatggagtgcggagatcatacaaaggatcttgacatccgcaagacggtcggtatggtattccagaatccggataatcagatcatcgccaatgtggttgaggaggatgtcggcttcgggccggaaaatatcggtgttccgacggaggagatctgggagcgtgttgcagatgcgctcaagactgtcggcatgtatgagtatcgcttgaattcgccgaataagctttccggtggacagaagcagagagttgccattgcgggaatcctggcgatgaagccgaagtgcatcattctggatgaatcgacagctatgttagatcccggtggacgtaaggctgtgatcgatacgatcacgcgcatcaataaagaggagaatatcacggtcattctgatcacacattacatggaagaggtaaccggagcggattatgtttatgtgatggattccggaaaggttgtaatggaaggaatgccgcgtgatatttttgccagaagtgatgagctggaagaatttcgtcttgcggtaccggaggctgtccgggtggcgatgcttttgagagagaagggcatcgagcttccgaaggacattctcgatgccggggagcttgtcgatgcggtgatgaagctgcaggcgtgaagtgattgtatgaatgctgcgacgaggctgcaggtgtgaagtgattgtatgaatgctacgatgaggctgcgggcgtgaagtgattgtatgaatgctgcgacgaggctgcaggcgtgatgtgattgtattgttgctgcgatgagactgcaggtgtgatgtgattatatgaatgctgcgatgaggctgcaggagcaatgtgagcgtgtcgatgcagtgaatgacatgagagactacacagctattatgtagacgctgggtgtcggtggacgagtgtgttcatggacggatcactgtgcatggaaaggataaaaggtgaatgaacatgtcgattcgactggaaaatgtgaattacatctatggggaaggctccggacaggagaaatgggcattaaaaaatatcaatctgacgattcatgacagggaatttatcgggatcgtgggtcacaccggctccggtaaatcaacgctgacccagcttttgaatggattggagaagccgtcatccggtacgatctactataacgatgaggacattcaggcggatggctatgaacgacgcaagctccgccagaaggtaggacttgtctttcagtacccggagcaccagcttttcgaggtgtccgtgatcaaggacgtggagtttggcccgagaaatctgggactttccaatctggacgttgagaagcgttcctttgatgcattaaagcaggtcggactcagtgatgatctgttagatgtggcaccatttgcattatccggcggacagaaacgccgcgtggcgatcgccggtgtgcttgcgatgcagccggaagtactgatcctggatgagccgacagcgggacttgatccggcgggacgcacggagattctcgagcttttaaagaagctgcatgaggaaaataatattacggtgatattagtttctcacagcatggatgatgtagcacggtatgccggaagaatccttgtgatgaatcggggagagcttgtgcttgacggagaaccgcagaaagtattccggtatcgggacgagctgcgcaagatcggtttggatgttccgcagtcaaccaatatattgtacgaattacgggacagaggaatggcagtaggaacagagggcatcacgcccgaacaggcagcagagtgtattgcagatagtttgaggaggcagtcatgatcagagacattacaatcggacagtattatcagggcagttccctgatccacagactggatccgcgcctgaaggtagtcggtgtactggtctatttgatctcgcttttctgcttccgctatgtgattggttttctggtggcaggattgttttttgtgctggtgctgcgtttgtcgaaggtgccgtttcgctatgtgatcaagggtttaaagccgattctgtttctgctgatctttacggcggcgctgaatcttttgtggacgccgggagagacaatctggaagtttggcatcctgaacctgacccgcgagggaatttacaagtgtatctttatggcacttcgtctgattcttctgatcatcggttcatcactgctgacgctgactacaacgccgaatcagttgacggatgccatggagcatctgctgggaccgttgaaacgctttggggcaccggtgcatgaggtcgcaatgatgatgagcattgcgctgcgttttattccgatccttctcgaggagacggacaagatcatgaaggcgcagatgtccagaggcgctgattttgaatccggcaatctgatgcaccgtctgcacaatatgatcccgctgctggtgccgttatttatctcggcgacaagacgcgccaatgagctggcctatgcgatggatgcccgttgctacaacggcggtgccggacgtaccaagatgaagccgttaaaatacaatccgagagattataagggatacgcagtgcttgtgctgtacgttattgtactgatccttgtgacaaggacagttgcaatctgacgatctttgacgggattatattggaatttctgggaaagatccgctctgagaaattattggcactataaatgattattagatggaacaggatagaagctatgaatcagaaaatgatcacacagacaaaaatgacccgtagaatacttctgcgggtcgcttacgatggaatgaattaccacggctggcagcttcagcccaatgcggcaacgatcgagggagaattaaaccgtgcgttgtgtgcgctgaccggcgaagagattgttgtgaccggggcaagccggacggatgccggcgtgcatgcgcttggcaatgttgccgtgtttgacacgacatcgaggatcccggcggagaagttttcgtatgcactgaaccagagactgccggaggatatcgtgatccagtcctccaagcaggtggcggatgattttcatccgcgtcactgtgactgccgcaaaacctatgaatacgatatcttaaaccggacatttccactgccggcataccgcaataccgcatatttcctgtatggaacgctgaatatcgaggcaatgcgccgggcgtgtcaggcatttctgggagaacatgatttcgcgtccttctgcgcggcgggagcacaggtgcagacaactgttcggaagatctacagccttgaggtagagtgccgcccgctgacggaggcaggaacaccggttccgccggcatccggcgaagcagtcaacgcagctgacggaaagcacggtgaacaggtgcaacaggcacagtctgcatccggagaaatgctcaacgcagctgccggagagagcgacgaacaggtgcaacaggcgcagcctgaatcaggagaaacagctatcccggcggctggcggggcaaacgccggatcagccgatcagcttctgacgatccgcgtcaaaggtaacggcttcttatataatatggtgcggatcatcgccggcactctggtagaagttggcagaggtcacatcaaacccgaggaggttgcaggtattattgccgcgaaagaccgggcaaaagcaggaccgaccgctccggcaagaggactgcggctggtagagatcgagtatagaaataatctgtgataaatatcgcgaaagccacactttatatttgcagtatattggcgcggctttcgcgattgtcagtttttaacaggggttgcagggaaataggagttgcttataatataaggagtgtgttatacttaaatgagttatgtaaactgatagtagaagggttttagagaaaatggacaagataaaagaattgtatgcatatagacagatgttgatttctcttgtaaaaaaagatttacgtggaagatataaggcatctgttttaggttttttatggacatttataaatccattgcttcagctgctggtatacacagtggtattttctgttgttatgcgtgcaggaattgagaagttttatatttttgtctttgtggcattggttccatggatatttttcagctcctcattaacaggaggcgcaagcattatcgtaatgaatcaggacatgatccagaagatatattttccgaggatcgtgctaccgatttcttatgtgacaagttgctttgtcaatatgctgttcagctttattgtcatttttgcggtactgcttgttacaggctatggcttcaattttacagcatgtctgtttttacctttgatcatgatcatagaatatatttttgcgttggggctggcgctgatcacttcggcatgtacggtgtatctgagagatctcgagcatatactgggtattgtgtctatggcatggatgtatatgtcgccggtggtatatccactttccttcattccgaagaagctgcagtcgatctttcagttaaatccgatggcgccaatcattacagcgtatcgtgacatcttatattataagcagattccgcagctgcagactcttcttatggcaaccgtgacaggaattatatttgttggcgtgggctgttttgtgtttgaacggctgcagagaggctttgtagaggaattataagaaaggcatgacggtgatatgaagaacgaaaattcaattgagctggtgaatgtaaaaaagaagttcaagatatatgcagataaagggaacagcatgaaggataaaatgctgttctggaaacgaaatcagtatgaagatcactgggtgctggacgatatcagtttttccatcaagaagggagaagctgtcggactgatcggcagtaacggctgtggaaaaagtacgacgctgaagctgatcaacaagatcatgtatccaacggacggaaaggtaaaggtaaacggtcgtgtttccagtctgttggaacttggagctggttttcatccggacatgaccggacgagagaatatatacacgaatgcctccatttttggtatgacgaaaaaggagatcgaagaaaaaatcgatgatattattgcattttcggagttggatgagtacattgacaatccggtccgcacgtattcctcaggaatgtatatgcgtcttgggttttccgttgccatcaatgtcagagcagatattctgctgatcgatgagattctggcagttggcgatatgagctttcagaagaagtgctttaaacgcctcaaagaaattaaaaatgcaggaactacaattgtgatcgtatcccacgcgctcgggcagattgaacagatctgtgaccgctgtatctggatcgaccatggcaagatcagcaggattggaaagccgatggaggttcatgccgagtatctaaaggaactggaaaagagatcacagcgcaggatgcaggcgttaaagggtgaaacgggttcagaaaatgaccagaacacattttgcggcagggaggttatccgttccggttcaggaaagctgttttttaccggagtcgagctgtatgaccgggaaggaaaacgggagagcgtatttcaaaccggtgaatatatgagggcagaatatacgtttaccgcagcaaaggagattcatcaggcggagtttgcggtgcggatctatggagaggatgacacccattattacggcagtacaagtcttatcgaggaaagctgcacagaggagatccagggcaaaagcagatttatcatagaatttgataaactggagctgctggaaggcgattttatgctggatgtggatgcattggatgaaaatggtgaggtgcttgaccggattcatgacaccatacgtttctgcatacagaatacaacaggaagaacgggaatctgcaatatgagttccaaatggaaactggagtgaagaaatgaacaataaccaagaactttcgaagattcatatttatttgcggaaaagcaagctgttttatattccgagaaaatgctatgcgattttgctggggatccgcaaacatggaataaaggcacagatgaaatgggtgcatggaagaatcagtgacaagattgcccagaagaactattacaaatgcctgcagatcactccacaggagcggcagaggcagaaggaacagcaatacgaaacagcaacccgcttcagtattctggtgccgttatataacacatcggagaagtttttacgggaaatgatcgagtctgtacagaatcagacatacggagattgggagctttgtctggcagatggaagcgatcaggagcatacagaggtgggaaacgtagtaaaggaatatcagcagaacgatcagcgtatccggtatcagcagctggagaaaaacggtggtatctccgagaacaccaatgcatgtcttgctatggcgtccggtgattatgtcgtgctgtttgaccatgatgatctgctgcatgaatgcgcactgtatgaattgaagaaagcggtggacgagcagggggcagattttatttatacggatgaggcagtcttttccaaggatttccataaaccggacagctaccatttcaaaccggattttgcaccggatgatttaagatcaaacaattatatctgtcatatcacatgctttgctatgaaactgatggaagagattgacggactgtttcggacggaatatgacggaagtcaggactttgatctcgtactgaggatgacagaaaaggcgaataagatcgttcatattccgaaggtgctttatttttggaggaatcatgcattgtcggtcgcttccgatatttcggcaaagacatactgcattgatgcaggaaagaaagcagtgaagtctcatttagagcgcatggggatcagcggatcagtggaaagttcagagatttatccggtcatttaccgtgtgaaatatcaggttcagggaagtccgcttgtatccatcatcctgtcggaggatcatgcgaatgccgatagtgcgaagtgtgaacagagcatacgaagtaagaccacatattccaattatgagattctggtacgtcgggcagggacaacctggaatgaggcagcagcaaaggcaaagggggaatatctgctgtttctggacagtgactgtatctgcatgcaggagtcctggctcgaggagcttttgggcgtggcgcagcgcggggaagtaggcgctgttggtggagttgtcagttatccgaagggcgtgatccgggatgccggtatcaccttaggggtaggatattataatctgggaagctgtaatttttatcttctcaatgatgatcattccggtttttggggaaatttttattacatgcataatgtgtcggctgtatcggatacctgcatgcttgtacgcaaggaatattacgatcaggcaggcggaatggatgatgggttaaaggcctggtttgccggttttgatctttccctgaagctgatgaagtccggaaaggtgaatgtgctggatccatatgccagaatgggatttgcgcatcatgacatgatcaattgggaggcaaggagaaatgcaaacggtgaatatgttgatgagacagagcagatgaacttgctaaaggaacggtggagtgaggttatccgaaagggagatccttattataatgccaatcttacaaagaactcatcggattttattctcggaaaattttaaataaatgatatctttgcaacgttaagtgtaaagccaccgtggaatggtggtggaatgggggataggatgtcttcaaagaagaaaacaaatgggaaaaataataaaaataacagaagcaatcccaaaagaaacaaacagacggtggtacatttttccagaaatctgacgatcttatgtattattgcggtattgtttgggattatagcatatcgttcccttaatatttattcgcaggaaaagatcctggagtatccggcagagcagtcagtgacgggatattcggtggcagagacgaattatacgattgctgatgcaaatgagcattatatcgaatacacctttgaggaaagaaacgtccgcgtattctggatcaacatgaatgcggaggcaccggtggacaatcattttgagattgacacatttctggatgaccagaaggtggagcatatcacgaccggtgtcggacagggacagtatgcggaaaagacctacttaaatcacaagccgatcaaccgcatccgtttttctaccgatcaggatatttctttggagtctgtttatatcgagcatcttcaggaggcatctttagcgcagaagagaacgctgcaaaagcagattcttgtactgctcgttgttctgatccttatttcctgctggctcgcaaagaaagaaaagcttgaaaatatcattaataacagtataaacggtatcaaaggtgccggggagtatgtaaaacagcatccgaagcagcttgggatctcggctctgctttatgtgcttgcgggcgtgtgcggatggctattgcgaaatatttattttattgtgatccgtcatggtacatggcagtggactaccagaagcactatttacggagtggtactcggactgcttggctatgagatcataaaatatctgtttatcgtcaaaaagagaaccttcgaaatgttgtttttgcgctgcggagtgatcctttgtgtgggattgacgctgcttttgccactgcgtttaaatgtttcgtgggatgatcagacacatttcatcaatgcggcaggggcatctcatctgcagaacagtacactgtcgattgcagaggaggacttttactatacctgttatctggggcagctcaagagttattctatgaccgaggaaccacgactgcgacagattctgaatgatccttccgcacgggtggcagaatcatcggatcagcctgtactgatcaatttcagaacagtcatctatcttccggcgattctggtattctttttcgcaagaggacttggaatcccgatgtcggcaatggttgtccttggaagactggcaagtgcattattttatctgatcgtgatctatctcggaatgagacatctcaaatccggtaaaatgatcatggcggcagtggcgttgatgccgggagcagtattccttgtatctaactttaattatgattactggctgatcgcattggtggcatattccattgcatatctcattggagaatatcagcatcaggagaagatactgaccgtaaaggatattgtgctgatttttggaacatttctggtcgggattcttgccaagccggtatatatcccgcttctgggactggcagcctttttgccgaaggagaaattcaagagtgtgaaatggcgcagagtttaccgctgtttctttggcggagttgttgttcttgcggtgttaggttttgcggtactgatctttggcggcggcttaggctccggtgatatgcgtggaggcgagggtgtcaatgcggcgggacagattcagtatatcctgtccaatccgatgaagtatacgggactgcttctcagttatctgcgattccagtatctgaatatgacaatgtttaaggcgtttatcgtgcagacggcatattactggagcattccggcactggcgatgccttgtctgatctggcttgtggttgttacggttcttgaccgtcgccgcgatgatgttcgtccggtcggctgcccgatcaagatcacggttctgccgcttgcatttgccagcgtctgctgtgtggctacagcgatgtatgtcacctttaatgaggtgggagcagcaaccatcgagggatgtcagggaagatatctctggccaatcatgacaccgttgtttttgacgctgggacagatccgctttctgacgattccacgtaatgataaggttgagcgctggatcgagggtgtgggaatgatgctctctgtgatcctggcagcatgcatgttgacagagtttttataaaatacaaaccagcattggttatagaagaatgaggcagtttatgaagaaattattgattttgattccggcatataatgaggcggaaaatattgaacgggttgttgataatatcgagaacaattacagcgagtacgattatgtgatcgtcaatgacggttccaaggataagacatatgatatctgtatggaacgcaattacaaggtgatcgatctgccaatcaaccttggactggcgggaggctttcaggcaggtgtcaagtatgcttaccgcatgaattacgattatgtgatccagtttgatgcagatggacagcatctgccggaatatattgcaccgatgatcgaagaaatggaaaagggatacgacatcgtgattggatcccgctttgtcactgagaaaaagccgtttacagccagaatgctgggaagtagactgatctctcttgcaatccgtctgacaaccggtaaatggatcaaggatccaacttccggaatgcgtatgtacaacagaaactgtatgaaggagtatgcgcaggaggtcaattacggaccggagccggatacggtatcctatctgattaagaatggtgcgaaggtatcagaagtacaggtggacatggaagaaagaattgccggtacaagctaccttaatcttacgagatctatttcttacatgtttcgtatgctgatgtcaattgttgtgatacagacttttagaaagaggtgatcagattatgtccatatccttacgaattatcctgtttattgtatcctttgtggtagcaatatatgtgcttcgaagaatacgaaaagcaaagcttaaaatagagtattccctgttttggatcgtattttcatttttactgcttgttttaagtatcttcccacagattgccattgcgcttgcggatctgtgcggaatacagtcgccggtaaactttatatttttatttatgatctttattcttctgctgcataatttctatatcacattccgtgtgtcacatctggagaatatgatacagagcctcacgcaggagattgcagtaagagatgttatgaataaggaacaatgatgggagaacagggatcgatatgaatacagaaagaagacagtatctttatctggacacgcagatgaagcaaaaaagcaataatctggatttcatgaagtttctggcggcgtggcttgtgatcgttcaccattcctttgatctgaatgtctcaaagggcgagtggatcaaggtgatcacgggacagcagcttgattttggaaccgtggcggtcagcctgttctttctggcgagtggtctttttattgcaaaaagcatggagcggaatcaaagtgccggaaagtttttccgggcacgtttccggcgtgtgtggccgccgctggcagcggttgttgtgctgtccgtgatcatgggagcctttgtgacgaccctgccgcttgggcagtattttacaaacagtgtgacatggcgttatctgctcaatgcagtgtttgttctgcgacacaatcttccgggcgtttttgagaacaatgtatttggaagtgctgtgaatggtgcactgtggacacttcctgtggaagtgctttgttatgtgggatgttatgtgatctaccgtctgggactgctgaaaaagaaaagaatccttggcgttatggcggtatatctggtgtgcgcattgatcggtttccgtatttgcagcatgcttggaattgttattttaagcgcagccttccgtccgatctatttcttcttactgggacatgttttatatgtataccgggaccgggttccggtggactggcgtttgtttgtgctctcactggtgggcatggcagtatgctttgcgctgtcctggtcgacggcggctgtctggatcttttatccgtatgtgcttctttatccggcatttatggcgagacagtgtggcagcagacttgcctttgggggacgtttttcatatacgatctatctgtgtgccttcccgatccagcagcttctgatccatctgttcggtggacagatgaatgtttatctgcatatgggactggcgttagtgatcgcaacagcagttggcgttgtattacattatacaacggagaaataaagggggttatccgatgaagatattgattaccggagcagcaggatatattggtcatcatgtggtcaaggcattctgcaacgcagggcatgatgtatatgtgtccgatttttcgtacaagggagttgacgagcgggcaaagaggattgacgtggagatctttaacggggagaaagatatctatgagcagtgcggcagtccggacgtgcttgtgcatatggcatggcgcgatggctttgtgcataattcggaggcacacatgaaggatctgtcctctcatgtgacatttctgaatcatatgatcgatggcggtctgaagtatctgaccgttatgggaagcatgcatgaggtcggctactgggagggggctgtggatgagaatacaccgtgcaatccgatgtcgatgtacggcattgccaagaatgcgctcagacagcagcttcttctgtacacacagaacaaggatgtgcatctgcactggctcagggcctattatatttacggcgatgacgccagaggaagctctatttttgcaaagctgtatcaggcggcagaggacggcaaaacgacatttccgtttacgaccggcaagaatctctacgatttcatccatgtggatgatctcgcgcagatgatcatgaaagcgagtattcagggcgaggttgacggcattatcaatgtatgcaccggcaagccgatgtcccttgcggataagatcgagtcctatatcaaggaaaagaacatgaatatcaggctggagtacggtgcttttccggacagaccatatgactctccgggcatctggggagacgcagcgaagattgaagcaatcatgggaaatggagcgaaataagcatgaaacagtacaataactataccgcggatgattttacctttgttgtctgcgcttatcaggagtgcgagtatctggaggaggccatccgttccgtaaaggagcagacgatttccgcaaagatcctgatctcgacctccacgccgaatgatttcattcaggggattgcggaccgctacgatattccggtctgtgtcaatcgggacggcggacagatcaaggactacaattttgcgatggcactgcctgagacaccgcttatgatgctgatgcatcaggacgagatcctcgcaccggcattcctcgaaaaggtgcttgatgcactgaatcatgcgaaggatccgatcatcgcatttaccaattatctggagatgcacaacgatgaggttgacaagaagccgtccacgatggtgcggatcaagcggatgcttctgtggccgtctcttgttcatgcatggcagggcacatggatcggcaagcgagggatccagcttctcggcaatccgatcacgcatccgacggttgtgtgcgtgaaggacaagatgccggagccggtatttttggagaagtacaaggcatctatggactgggatctgtgggagcgtttatccagacagaagggttcttttgtatatgtgaaggatgtccttttataccaccggatgaacgacttaaaccagaccgcgaagctgcttaagacaacgaatgccagatacgatgatgagtatgagattttctgccgtttctggccgaagtggatcgcaaagctgcttatgaagttttattccggagcagcgaaatattactagagaataatctctgagagtttgtgcctgcaggcatttgagtgcaggcagagaaaggaatgtcagattattatgccaaaggtgagttgtatcgtaccgatttataatgtggaaaaatatctcaggcgatgtctggacagtctgctttcccagacgataacggactatgagatcatatgtgtcaacgactgttcgccggatggcagcctggcgatccttgaggagtaccggaaaaagtatccggacaagcttcgtattctgcagaatgaggagaatatggggcagggaaggagccgtgccagagcaatccttgaggcaaagggagagtatatctgctttgtggacagcgatgattacatcaaaagcgattacatggaaacctacctgaccgagatggagaagggggattttgattttgtgatcggcggctatatccatgatgtggagggaaagtttcaggaatgtcttgtctctgattcggactggagcattctgacgtataccgtggcgtggggcaagctgtttcgccggagctttctggtggagaatgcgatcgacttttccgataagcggcagggcgaggatgtttatttcagcctgcgcgtgtattatcactgtgagcattataaagtgataccatatgccggctactattattatctgaaccgcaattcgacaacgggcagaatgaattatcagctgaatttcgagcgtacggtaacggatatgtttgatctgctgatgaagcgctgcgatctgacgaagatttcggaggagaagcgccgccatatcgagtatgattatcttgcgaatatgatcaatgcgctgatcacttacggacatggctgtggaccggcacgcatgaaggacaaatacgaatatttccggcaggacagagagcggagatttccggattaccggcacaatccttatgtcggactccgaaagccgaagggacagacattaaagatccgcatgggcgtcggcgtgacaatgcttcttagcaggctgcatctggaacgtttgatgttccaggtgatctcactgcttcgttagtgccgtgtaataatgagtcttgagaggatttgatcaggaatatggagaaagaacaatattttacatttatcgtgcttcattataactgctttgaggaaacgaaggcgtgtgtcgattcgatccttgcgctggagcagagtgagcagacacagatcgtggtgatggacaacgcatccgtcaacgattccctggcgggtcttaaacagacctatggagacaatccgcaggtgcatatcctgcacaatgaaagcaatgagggcttttcggcaggtaacaacaaagcatatgcctatgcgaaacagcactgggactgcgaatttgttgtgtttgcgaacaatgatctgttgtttgaggataaggaattcatccgtaaggtgcgggaggaatatgaggcgagcggctttggcgtgttaagtcccgatatcttccacacgactctaaagatccatcagagtccgatcgatgaaagactggtgcttccggtgtcgggcgtgcgaaagacgatcgtgctgaatacggttgcgctgtggatctatccgttgttttatgcgcttttcggaaagaatatgaaggagacggtggcagcggcggttgatctttcctatcgcacggatgtcgtgccgatgggggcgtgtctgatcatttccgagaggctgatggagcgcaaggacgtgatctttgatcctgagacccatttttattatgaggaatatatattaagctggtggtgtgcaaagcacggcgtggatattgtgtttcagccgcggatccaggtgcttcacaatcacggcagagcgacgaaaagtatcggtgatccgaagcgtgtgttaaagttccggatgcagaatattttacaggcggcaaaggtttattataagttgatccggtgaagggagagcgttacatgaaaggatttttggagtttgtctatctcgtattcaaacgaaagatcgtctggcgtttccgtaacagggagaacggagcgagatgcacaaacgtttatgatatagattgtgtcaatgtcggcaggtacacatacggaccgattgacattgaaatgacgagaagagatgttatgcttcggatcggaagcttctgctccatcgcaaacggtgtgaagttcatactaagtgccgagcatccgatggatcatctgctgacgtatccggtgcaggagctgatcacaagagacggcatagatgcacagtccaagggagatattcaggtggacgatgatgtgtggatcggctgtggcgcgatggtgctttcgggagtacacattcatcagggcgctgtggtggcagccggtgcgatcgttacgaaggatgtgccgccgtatgcgattgtggcaggagttccggcgaaagtgatgggataccgttttgaacaggagctgcgggataagctgctttccattgatttttcaaagattgacggggcgtttgtaaaggaacaccgcgatatctttacgaaggataaccggtattttgcagagcatcttgatgagctgccgaagaaaggaatgtagggattagtatgaagattgcgttatttggaggagccggtttcatcggcgtgaacctgaccagagcccttgcacagcagggcggacacgatattaccgtgatcgacgccagagaagagttctttgcaccgttaaagcagatggagctgccgggcgtgcattttgccgtgtcggagtttccggtggagcaggattttgaccgcctgctggcggggatggatgtggtctatcatctggtgagtaccacgaatccaagcacgtccaacaaaggaatttctcatgagcttgaggcaaatatagttgccacatcaagatttctggagagctgtgtccgcgtgggcgtgggaaaggtgatctttctttcatccggcggaaccgtgtacggcaaggagcagcagtgtccactcaacgagaatacaccgacatatccgatcagctcctacggcattcagaagattacgatcgagaagcttttgtatctgtatcattatctgcacggacttgattaccgtgtgatccgtctcgccaatccgtacggaccttaccagcgtccaaacggcgtgctcggagcggttgtgacctttacttacaaggcactgcgtcaggaagagatcgtggtgtacggggacggttccgttgtgcgcgactttatttatattgacgatgccgtgcgtggaatccttgcggtggcgcagggggagagtgagcatcggatctttaatctgggctgcggctacggcacaagtattcatgacgtgctggtcgaaattgagaaatcacttgatatttctttaaatatcacgtataaagaaagcagaaaggtggatgtgccggtcaattatctggacatttcccgctatgagaagtattacggaagcttaaatccgatctctctgggcgagggcatccgcaaaacagcagaatttatgaaggaatattacgaattatgagcaaagaagaattgatggtttcactggtggttcccacgaatggtgtgatcgagtgggtatttccggtattggacagtatttatcaggatgagccggagcacagccggtttgaggtgatcgtgaccgacaacggcgacaatgaagagtttcagcgtcagatggagtcgtactgcgcgcgttatgacaatctgatctaccgcaagacacaggcgaagcagtttctgaatcaggtcgaggcgttcaagcttgcctccgggcggctgatcaagtttgtcaatcaccggatgaagcttttgccgggaacggttgaggagctgatccgctttgcggcttcccatgaggagacaaagccgggcatttattttatgaacggtgcgatcgccgggaagaacggcgaggagaagtttgacagctttgacgcttatgtggcaggcatgcgccggttttcctcatggtctgcaggcacaacgatgtggaaggaggactttgaccggcttgatccggacatgacctataatgcaacctttccgcataccgattatgtgttcagcgagaagaacaaagcagagtatatcatcgaccaccgcgtgctttttgaggagattccggtggacgataccaagaagggcaaatacgacctgttccatgccttcggcgtggagtacccgggattgatgttagatctgtgccgccgcggcgagatctctaaggagacgtttctgacagtgaaggaggatatgctccgtctgctggcagagctttactttggctatgtgcttcgcaagatgccgtgttcctatgatcttagtggatacaaatcctccatccctgtctttttcagcaatggagcagtgtggcggatgatggtgcggatcggatttggcaagatctttggcagaagaggatgaaatgaggagtcgatatgaagagagcagtatttgagaaggattttatccgtgtggaggacagtgagacagggacgccgggggcgtttttaaagtttgcgttccgggtgcaggctgcattatataagctgcgttaccggtttgtgcatgtaaagccgcaggataagaaatacaacgttgccgtctgcgcgatctttaaaaatgaggcaccttatctgaaggaatggatcgagtttaatcatctggtgggtgtggagcatttctatctctacaacaacaattccgaggatgattatcagagcgtgctggaggagtatgtgcagagcggtctcgtcacactgatccagtttccttacgagcaggcgcaaatgaagtgctacaaggactgcattgacaaatatgccggcgagacaaagtggcttggctttattgatattgatgaatttatcgtgccgaaaagtacaaatgatatttatggttttttgaagccgttcgagacaaagcgcggtgcggtaaagctcaactggcagcttttcggaacctccggaagaatggaccgcgatatcgaaggtcttgtggcggaggatttcaccgtctgctggccgaagtattacgacgtcggcaaatgcttctacaatacggcgttcggtgtcaacccggattcgccgcagaatgcggggatgcatcacagcttctggacgatgtacaagggaagacagcttccgccggtcaatgcatttgaccatgtctgcaccggtacattcagcaaggcggacagcagggattttccgatccagctcaatcactactttacgaagtcctatcaggaatatgtgatgaagcggtcaaagggagatgtcttttttaagacgaatccgcacgacgaggaatacttttattttcatgaaaatctctgcacggctcaggatcactctgcatacaagtatctgatccggctgaaacggcagatgaaccgcaaataacagaacgataagtgcttcgatggcagcagatatgccggagaagcactgtttgatatttatacggaagagagacaaagaagggggacaagcatggctgagacaagtttaaagaaacagatcatgtccggaatggtgtggaagtttgcagagcgttttattgcacagggcgtttcctttgtggtatcgctggtgctggcgcgcatcctgatgccatcggactacggaattatcgcgatcatcaatgtgtttatcacgatcgccgatgtgctgctgaccagcggtctgaatacggcgttgatccagaagcaggacgtggacgagcttgatttttccacgatattttactgcaactttatccttggaatgggactttatgcgatccttttcgtggcggctccgtttcttgccactgcatataaaatgccgttattaaagcaggcgatccgcgtttttgcgatccgtctgccgatttcttccttccagtcgatccagacagcatatatttcccgtaaaatggactttaagcggttctttttctcaacgatcatcggaacgctggtctctgcagtggttggaatcgtgatggcactgaaaggtgcaggcgtatgggcgctgatcgcacagtatctgacaaacacgatcatcgatacgctgttcctgtttgtgacggtgcgctggcatccgaggctcatgttttcatggaagcgtgcgaagcctctgatcgcctatggaagcaaggttatgatgaccgacctgatcggaacgatctttaacaatctgggtgattttatcgtgggactgcgttatacgacggcagatctggcatattataccaaaggaaagcagcttccgatgctgctcaagacaaatatcagtacggcactgatcagtgtacttttcccggggatgtcccaggtgaatgatgagaatgaaaaggtgaagattttgtccagacagagtgtgcgtatgctaagctacattatctttccgctgatggcggggatgatggttgtggcaagaccgctgacgatcgtgctttataccagcaaatggatcgcgatggtgccgttcgtctgggtggtatgtctggaggcggtgatctcggtgcccggaaccgtggcactccagtgcgtcaaagcggtcggacgcagcgatatgatgctttattcggaatttatcaagaaaccgatctttttaatttctatatttgtggcacttcatttcgggatcatggcagtggcactgacgctgccggtcaatgcgctgatcgagcttgtgatcaacagctatatgaccgggaaaacgatccgctatcacatcggagagatcctggcggatgcgtttcctgcatttacactgtcagctctcatgggagctgctgtctatggtatttccctgctgtcctggcacaatcttgtgctggagcttttcgtgcaggttattgccggtggaatctgttatatagtgctgtcatggatttcacataacccggagtttgggatgatccttcgcgtgataaagtcacgcaaagccagtcaataagcttcatgtactgattttcgagtacatggatgcggatcagctcgatcagggagcagacgataaagacaagcaggaccaccacgatcgaataagggatcagaagcctgtcttccgcaaatgcggcgtttcggaaaatataacgccagaggaacggacgtacatagcggttatcgtggatgaggtaaacgccgaaggttgttgcggagatcagattgatcgccggaatgtacggcattttgatcttggaaaatcccagaaacattgtgatcgagatcagcacgatcggaatctgatgcatctcatagaagaaggtggcattcatgccgaagaacggcagcctcagtccgaggaagtcgaaaacgacagcggagccgaaggtcagcaggatcaggaagccggacaccagcagataggtacgtcccgtgatcgttgattccttggcgtgaagccggatgtagccactgatcagatacaggtaaatgaaccagagcaggtcgttgcattcccatgtctcgtagagaaaggtcgggacaatgcaccagcagaaggtcatcagtgcaagcatctgcagataagttgtcctgtcaaaggagcggatcgccttattgataaaaggtgacagcagatagagtacaaagtagccgcttgcgaaccaccagcggtcataggtgatcggaagtgcgctcttgaccaaatcttttacactaaacggtgtcagtcttaaaacgacaaataacacatagatcagaacggaataagtaaagatctggatccacatcttgatcactttattgatcttcagagaatctgccgtgatcagaaaatatcccgagatcagtacgaaaacatcgacaccgatcttgccgccgatctggataaactggatccaaagccggtttattgtgaccgtattgatcggaaaatcaaaattcccatgtacggaaaaatgatgcgcaacgatcatgatcattgtgatgatgcgcaaaagctcgatattggactggcgctttttcgccggagctgctgttgtatttgcagaaatttcctgattcatttgtaatatcctttcttgtaaaaccccaataaaatatacccatatacttctattttaactgagaccggagcgatatgcaataggcagaaacagccggatcatccgttgactcctctgctgcgggagaaggcggaaatactgcgtctgtcgtgtgcctgaaaacggtcggatcgttttgcgttatcggttgtcagattcaagccgtgatggtataatgaaaattggagttttttgacgattcacgattgagaaaaggggtgtttcatgaaggcggaaacaataaaaaataagttaaaacgtccggagaaccggaagaccgtgatggatctgggaatcctgctgtttctggttacgatagcggcgtgcattgcgtatggcgtcaatggtatttacccgtttggaagcaagtcgatcgcccgcggtgacatggttcagcagacgatcccggcaggaatgtattatgtatgggatgtgctgcacggaaaggcaagcccgttttttacctggaattcaggtcttggcatgaacatttccggagcggtttctctgggagcgctgttcagcccgctcaatctctttttatatttttcaacgagagcgtatctgtattattttgccaatattctgatgatattgaaaatgatcgcgatcgcatatgcgatgtatttctatctgcgcaaatatgacatggagcgcatggcatatgtggcaggtgcagctgtttatgcattcggagcggcatccttagtacatttccagatcatgctcgtaatggacgtggcgtttctgctgccgctgatcatgatcggaattgaccggctttatgagaataagggctgtctttactttatcattgtatttacgctggcgatgatggtggatgtttataccggctgtattacattgctttttattctgttatcctcaggaatccgcacctttgtcgattctgcaaaagagaaggaagagaagaagcggtggattctccggctcggcgtatccgtactcgtctccctgcttttaagcgcagtggtcgtgatcccggcacttcgcagtattgctgaggcaccacgaagcggtgacggagattatctggcaacttatgcaacggcactgcaggcacagtggagcagctacgagtggagtatggtccgccgcatgtgtgtcaacatggcactgccgtttgcatgtatcattggcttctttgttataggggacggacagaagggggagcgccggaagtataagggtcatatgatcctgactttgttgatgcttgtatccatgatcattccttcggtagagcttttgtggcatggcggcagcagagcaagctggccggttcgctttatctatgtggtatcctttgtgttgatcgattttgcggcattgttatatcaggatcatcgcgagaaggacgagacgcagaaggaggatgtgttccgcagcctttgtattgcctgtgtctgcctcgctgcagcgctgatcgcgggcagagttatctacaaagcatacgcggcatattgcggtcattcttcctatgcgacacttggtgatggatttttgtgtctcgtgatcgaggcagtttttgcaggtctgtacctgtttatcttaaagagtcacaagcgcaagacggcagtgctggtgctgatgtgtgcgcagcttgttgcaacctcggtcatctgctttgcaactaacaaggagaatgcaaccgtattttcctctgaatatctggaggctgctaataacgcaggcaagagcgttacgacagatatcaaagactttgaacgaatcaagaataccgattataagatcgatcatattgattatgcacttgtcatgggacaggaagcgatttcaaattactggcatgtgatcaatccggatctgcagccgaactttgcggcactcggctattccatcaactggacacagcttttggatgccggcggaacgatcttttccgatacgctgttacatatccaatatgatctaagctaccgtaatctcccggagagcatgtattctctgtgcgagaacgtggagggctataacggagatcagatcggactttacaagaataatctggagctgccgtttgccattggtacggatacctatgaattatctgcggccagcgatctgttcagtactcagaacagtctgttttcagcaatcacaggaagcaatgagacgttgatccgggatgtgaccggcgaacttgatacgacggatcttacctatgagacgaatgtgaccggtgggcgtaaggtgttatatttctatggcacgaacaacacggatctgcaggagaccatcacggtcaacggtcaggaggtatatattccaaattctgattcttccgaaaataccagctatccggtggactttggcaatggtctgatctgccttggaagctttgaaaatgagagcgtttcggttgaatttaacggcgaggcggatctttcccagcttcatatcggctggcttgactatgatcttctgaccggggcggtaaaggagattcaggatcagaatccgaagatcacaacgctgaagcagaagaacagcggcgtgaagcttaagctggacaatgtgacgaagagtaatgtgttccttccgatttcctatgataaaggatggagctgcaaggtcaacggtaagaaggtcgagatcggttcgatcgatggaatgctttctattcctgtagaacagggaagtgacaatatcgtattaaaatatcacccaagcggcagaacgccgggactgatcatttcgctgatcacgctgcttatttgcgtggcaggccggtatctgttcaagaagggaatcgtaaagcaggatcaaaagacagaaggcgtgcttggaagcattgcgtatgacatatatggggttgtgtatgcgctgtttatcgcactgctgtttattgtaccaatactctgttatctgaggcagattctggtactcatacaatcatagaaacggaaaggtatggtgatgatttgaaagttgtacttttagcagggggaaagggaacccgtatctcagaggagtcccagtataagccgaagccgatggtggagatcggaggcaatccgatcctctggcatattatgaaggaatattcctactacggatttaatgaatttattatctgcgcaggctataagcagcacatgatcaaggagtggttctcaaactatttcctgtatcacagcgatgtgacctttgattatacgaacggacagaagacagtgatggtacacgaccaccgctgcgagccgtggaaggtgacggtggtggacaccggactggagacgatgaccggtggcagagtgaagcgcattcagccgtatgtgggggatgagacatttatgctgacctacggggatggcgtgtgtgatgttgatattgccaagttgttagagttccatcgaaaccacggcaagaaggcaacgctgactgccgttatgcaggagcagcagaagggcgtattaaatattggcggcgacaatgccgtgaagtcgttccgtgagaagaatatttcggacggagcaccgatcaatgcaggatatatggtattagagccggatatctttgattacattgacggagatgataccattctggagagggagccgttggaacgtcttgctgcggagggtgagctgatgtcttatatgcatcgcggtttctggcagtgcatggacaacaagcgtgagatggacatgctggagcagtacctgcgcaccggcaatgcaccatggaagaaatggaacgattaaccggaaaggatatatagaaatggacgtatcattttataaaggaaaacgtgtgctggtaacaggacacacaggctttaagggaagctggctctgccggatcctgatcaaggcgggcgcagaggtgaccggctactcactggagccgccgacggacccggatctgttctcattggcggatctggcaccgcatatgaattcagtgatcggagatatccgtgatctgaaccatttaaaggaggtctttgaaaagacgcagccggagatcgtgcttcatctcgcggcacagccgatcgtgcgggattcctataaggatccggtttacacctacgagaccaatgtgatgggaaccgtcaatatctgtgaatgtgtcagacagaatccgtgcgtaaagagtttcctgaatgtcacgaccgataaggtctatgagaataaagaatgggagtggggctaccgcgagaatgagccgcttgatggctttgatccgtattccaacagcaaatcctgttccgagcttgtcacacacagctacatcaattctttttttgcagaccgtgatctggcagtctccacagcgagagcaggcaatgtgatcggcggaggcgactttgccaacgacaggatcatcccggactgcgtgcgtgcgatgcagcggggggacactatcggcgtaaggaatccgtattccaccagaccattccagcatgtactggaaccgcttggcgtttatcttttgatcgcacagaagcagtatgaggataagtgctatgcaggattttataatgtgggaccggatgagtgcgactgcgtgacgaccggcgagttgaccgacctgttctgcaagtgctggggcgatggtgctgcatgggagaaccaggcggaggagaatgcaccgcatgaggcgaatttcctcaagttagattgcagcaaggtaaagcgtgtctttggatggacaccgcggtggcacattgaggagtgcatggaaatgacatgccgcttcagcaaggtatggctggcaggcggtgatattccggcagagatggaccgggagattgacgagttttatagtacgaagagcagacagtaacacatgacaactgttggggcaaagagattgactttaacagaattttagagagagatgtatgtgaatatatagaatggaggcagtatgttcgaaaataagacagagcagcaggcaaaggaagaaatcctgaaaatggtcgcagaatactgtgacacatatcacaacaagaaggagtatcatgagggagaccggatcccgtatgcatcccgtgtatacgatcatgcagagatgtgcaatcttgtggattccgcattggagttctggctgaccgccggacgttataccgatgaatttgagaagaagttcgcagaatatctgggcgtgcgctactgtgcgctggtcaactccggatcgtctgcaaatctggttgcttttatgacactgacctcaccgcttcttggtgaccgcaagatcaaccgcggggatgaggtgatcacggtggcagcgggatttccgacaacgatcgcagcaatgatccagtacggtgccgtgccggtatttgtggatatgacgatccctcagtacaacattgatgtgacacagcttgaggcagcactttccgacaagacgaaggcggtcatgatcgcgcatacactcggcaatccgtttgatcttgccgcagtcaaggcattttgtgataagcataatctctggcttgttgaggataactgtgacgcgctgggttcgacttacacgatcgacggtgtcacaaagcagacaggaaccatcggagacatcggaacatcaagcttctatccgccacatcatatgacgatgggagagggcggtgccgtttatactgatgatccgttattaaacaagatcatccgctccatgcgtgactgggggcgtgactgcatctgtgcgtccggtcgtgacaatatgtgcggtcaccgctttgacggacagcacggagagcttccgttcggttatgatcataagtatgtatattctcattttggatataatctcaaggcaaccgatatgcaggcagcagtcggctgtgcacagctcgagaagttcccttcctttgtggagcgcagaaagcataacttcagccgtctgaaggagggacttaagtgcgtggaggacaagctgatccttccggagccatgtgagaattcagaccccagctggttcggtttcctgctgacctgccgtgagggcgttgagaagaataccgtggtacagtatttggagaagaaaggcgtgcagacacgtatgctgtttggcggtaatatgctaaagcagccttgctttagcgagctgaagaagtccggcgagggctaccgtgtgatcggcgatctgccggtgacagaccagatcatgacggacacattctggatcggtgtttatccgggaatgaccgatgagatgatcgactatatgattcgtaagatcaaggaagcagtagagcagtaaaatacggcgaagcgatcgtatgcaccggcagccggactgtccggcgaaggagcatatggcaggaagagccgaaggaatatattttgaccggcatcccgcagaagcaggagcgtgagcgtcagatggaggcagcatgaaacaacgattagcagattatgtagcagattttttggtagatcatggaattacagactgttttatggtgacaggcggcggtgccatgcatctgaatgatgcacttggacacaaggaaggcatgcactgtctttacaatcatcatgagcagggctgtgccattgcggcagaggcgtattcccgcattcataacaggatggcggcactctgtgtgaccaccggaccgggcggaaccaatgcaattaccggcgtggttggcggatggcttgattccgtgccgatgttcgtgatctccggacaggtccgctatgacacgacagcacgttatatgagtcagttcaccgatggacttccgcttcgtgccgtgggcgatcaggagtttgatattacaaaatctgtcgacagcatgtgcaaatatgccgtgatgatcgaggatccgatgcagatccgttatgcgttggagaaggcatatcatctggcaatgaccggcagaagaggtccggtatggatcgacattccggtgaattatcagggctgttatattgagacgaacgatctgagaggctatgatccggcggaggattccgcaaagatgccggtttcggtagcacagagtgtgatcgatcaggtcatcgaaaaggtacgtcaggcgaaacgtccggtactttatgcgggcaatggcatccggctttccgagggctatgaggcattccgaagtgttgcggagaagcttggcattccggtggcaacctgctgggattcgatcgatgcgatcgagacggcacatccgctttatgtaggccgtggtggcatcatgggtgaccgtgccggcaactttgccgtgcagaatgcagatcttgtgcttgctgtcggaaaccgtctgtccattcgtcaggtcggctacaattggaagacctgggcgagagaggcgtatgtgatcgacgttgatgtggatccggcagagcttaagaagaccacgatccatgtggacatgccggtctgtgcggacgcaaaggatttcttcgagaaaatggatcagaccttatccggcgagacgcctgtatttaccggacaggactgggtaagccgctgtcagaactggaagaaagattatccggttacgctgccgaagcactgggaagaggatggcagctacgccaatgtatatgcatttatcaattatctgagtgaaagcctgccggagggcaatctgaccgttgtttccaacggaagtgcctgcgtggtgggaagccataactatgtgatccagaaggatgcacgttttatcattaacagtgcgatcgcaagcatgggctacggtctgccggcagctatcggtgcctgtgtggcaaatgaccgtaaggacacgatctgtattgagggcgatggaagtatcatgatgaatctgcaggagctgcagacggtactgacaaacaagcttccgatcaagctgttcctgatcaacaatcagggctatcattccatccgtcagacgcagaacaatctgttcagcaatcattgcaaggtcggaatcggaccggagagcggcgatctgtcattcccggagtttgagaagctttctcaggcatttggatacacatattatcaggcacacagcaacgaagaaatgaagaaagcagttgataagacgctggcagaggagggacctgtattctgtgagatcttcgtttcaccgacacagaacttcgagccgaagagcgcaacaaagcgtctggaggatggcagtcttgtgagtccgccgctggaggatctggcaccgttccttccaagggaggaagtgcttgccaaccttctgatcccgccggtagagtaggacgataaacaacagaaaggcagaaagaagatgaaaaggattgtagtgaccggaccgaccggagccatcggcaccgcattgatccgggaatgtattgcaaaggatattgaagtctatgccattgtccgtccgcattcggtgagagcggcacggattccggaggatgcgcatgtccatcttgtggagtgtgatctttcggaacttggcgatctggacgtgtccgacattccgccctgcgatgtgttctatcatttcgggtgggcggcaacgattggcgatgcccgcaatgatatgaggctgcaaacggataatatccgttatacgatcgaagcggcaggactggcggcgagaatgggctgcgaggcgtttgtcggctccggctcccaggcagagtatggcagagtggagggaaatctgacaccgcagacaccggcatttccggagaacggttacggcatggcgaagctttgtgccggtcagatgagccgtatcgaatgcgaaaagcttggactgcgccatgtgtggacgcgtatcttaagcatttacggaccatgcgacagcgataagactatggtcacgaccacgatccgaaagcttcttgacgggcagatacctgccctgaccaaaggagaacagcagtgggattatctgtatagcagggatgcagcgagagctatgatcgcacttggcgagaagggacagcacggaaaggtgtactgcatcggcagcggaacagcacgcccactcaaagaatatattgagcagatcagagatctgatcgacccggaggcagggcttggcttcggtgagatcccgtatggcgcgagacaggttatgtatctgtgtgccgatatctctgagctcacaaaggataccggatttgtaccacagacagattttcgtaccggcatgaccgagacgatcgcgtggatgaagtcggaatggaggcagcatgaaaacaattagtgtaatgataccttgttataacgaggaagaaaatgtaaaagcgatcagtgaggcggtgatccgtgagatcacaacgaatctgccgtcctatgattatgagattttgtttattgataacgattccacagaccgtaccagagagtatctgcgggaaatctgcgcggcgaatccgaagatcagagcaatctttaatgcaaagaatttcggacagttcaactctccgtattacggaatctgccagacgagcggtgactgcacgatctgcctgtgctgtgatttccaggatccggtggaaatgatcccgcgtcttgttgaggagtgggagaagggtgccaaaatcgtctgtgcgatcaagacgaccagcaaggaaaataagatcatgcgtttccttcgcacctgttattacaagatgatcaagaagatgtctgatgtggagcagattgagcatttcaccggctttggtctttacgacaagggctttgtggatgtactgcgcaatctggacgatccgacaccgttcctgcgcggaatcgtcgcagagcttggctataagcgtgtggacgtgccgtatgagcagcagaagcgtcgcgccggcaagacgcacaacaactggttcactctttacgatgcagcgatgctcagctttacttcatacacgaaggcgggtcttcgtctggcaacgatcgtgggctttatcatgtccgcgatcagccttgtggtcgcctttgtatatctgattttaaagcttctttactgggatcgctttgtggccggtatgacaccgatcctgttagccgtgtgcatccttggttcggttcagctgttctttatcggctttctgggcgagtatgtgctcagtatcaataagcgtatgatgaagcgtccgcttgtaattgaggaggagcgcattaactttgacaaggataagacaggaaataaataatgaaatatatagaagataaaaatattcgtgccgttttgtttgatctggacggcacgatctactatggaagtaagctgataccgggggcggatgaggtagtacgccggtgccgtgagcttggcaagcaggtttacttcatgacaaacaattcgaccaaaacaagaaaacaaatctgggagaagctgaccggcatggggcttgcctgcagctatgaggaggtttataccggcagctatgccgcagcgctttatgcacatcagatgggctacaagaccgtatacattatgggaagcgatgcgctggcagaggagtttgcagggctcggtgttacggtttccgatcatgcggaggttgtgatcgtgggctatgatatggatttcaattatcagaagctgacggatgcgctgcaggtagcattgcgggcggacaagatcattgcctgtaatctcgagcatcattatccgggcgagaatgcgaagcgtatgccgggctgtggtgcgatggtcggcgcgctggagggaagccttggacgaaaggtggactactcggtcggaaagcctaatccgctgctgatggacattatctgtcaggacaagggcttaaagccggaggagatcattgtggtcggagacacctatgcgagtgatatcgtcatggcacataagtacgggagccgggcggtttatatcggggaggaatcccatgaggacaccaactgtgtccggaagatcagcgaattgctacaatagatgcaaagggggcattttagatgagcaggataaatttactggattgtacactgcgtgacggcggttatgtcaatgactggcattttggaagagatgccattttcaatattggcaagaagattgttctcgcggggattgaatactttgagatcggtttcgtcagagaatgcgaatacagcaaggattattcactgtttgacggcaacgacagcgtgcgggatatgatcgcaccgaagaatcccgacacccattatgtcggcatgatcgatatggggcggccgatcccgttagagaagcttggaaaacgcgtgccggacggctttgatgtattccgtgtgatcttcaagaaaagcaagatcgaggaggcgtacaattacattcaggagctggaaaagctgggctacgatgtctttgcgcaggcagtgggaaccgacaattataccgacagtgaatttatcgcgctgatcgagaagttcaaccggctcccgatcaaggcattttatattgtggacagcttcggtctgatcaagaaaaaggactttgtccgtctggcgcagattgccgatcataatctgcgggaggacattatgctcgggtatcattcccacaacaacatgcagcaggcgatgggcaatgcctccgcctttacggaaatgcatctgcaccgcgacatcattctggacgcctgcgtgtttggtatgggacgtggcgccggcaatctgaatctggagcttttcgccgagtacatgaacgagaacttcgacaagcagtaccgcattgagccgatgcttgagatcattgacgagtatctcaacgacatttaccgggagcatttctggggatattccctgccgctgtatctgtctgccgccaacggctgccacccgaactatgcgatctacttcgcgtccaagggaacgctgaccgtcaaatcctacaatgagatcttaaagtcgatcccgaaggaggacaaggcgctttacaataaggataaggctgaggcgatttacaagcagtatcaggaaaattatatcgatgaccgtgaggctgtcgagaagctggagcaggagctttcgggcagagaggtgcttcttctgggatcgggcaagagtctgatgcagcagaaggcgcaggtcgaggaatatatccgtgaaaagaatccggtcgtgatcgggctgaacttcgttccggctgactttgcctgtgattatgcgttcatctgccatatgcgccgctacaaaaacattaccgatgattccgtcagaaagatcatcacctccaatctgcgcgaggcaaaggactacgaatacatgttaaacttcgcaagctattcttcccaggaaccggcgatcatggaaaactccggtctgatgtgcctgcatttcctgctgcacatcggtatgccacaggttgtcattgccgggttggacggctacgatatctgcaaccacggcaactacgtcaacagcggtctggaatatgacttctccgcagagcagctcaaggagcgcaacgagctgatcgccgctgaactgaaccgactgcaggagaagatgcaaattacattcctgaccgacagcatttataagaaatagaccctgcggggattagacaagaataagaatagaaattctgcagagtaatgagaagcagaatacaacaatacgggggaaaagagatgacagaaaagaaacagacgaagatggagttgctgatccagtttattaaattcgggatcgttggtgtcaccaatacagtcgtatcctatgtgatcaatgttgcaaccctgttcctgctgggacatgcgcacatattccagcgctgggattacatcatagccaacaccgtggcgtttattctcagtgtgctgtggtcgttttattggaacaacaagctggtatttaacatggagggaacctcctggaaggagcttttgcaggcactgatcaagatgtatctgtcctacgcattcaccggaattattctgagcaacgtgctgtcatatctgtggatcgatgtactccacatctccaaatacattgccccgctgatcaactcgatcatcggcgtgccgatcaactttgtactcaataagttctgggcgttccagggaaaataggaatggtacggaggcgcgctttatgttgccagataaaaatatttttatattttgaaatgaaaaatacagattgctttttttgtgaaaatggatataatatagacaaatgattcgtcattgggagagtccctgccagatagtgggaagttttaaactcgggagagtccctgccagatagtgggaagttttaaactcaaggggagcagaaattgctccctttaaattttacaagtttaaaccaaaataaaagtgctacatatagatatataaaaacagcactgccctttaaacaattggaggaaatgtgtgatagctttccttgtcagtgatttatcagtagaacaatatagagcaaagagaaaatggtcttatgtttgacaaccctctatgggaatgatagaataaacaggatctgtcatagatgtggcagattccttttatataactgcggatgtgatggaattggcagacatgcaagatttaggttcttgtgccgcgaggcgtgcaggttcaagtcctgtcatccgcatcaaaccccggaacgaaagttccggggttttttgcggatggagaccttgaatcccgggattcaaggtctccgctgccgctccggtcggtgccggtcagacgtccaccggacgtctggcaccctgtcatccgcatgataagcttccaagcctttatttataagggcttggagtttttttaactttttgccgaagagttgtgaattcatgatataatcaaaaataagatattagaatttatgcttttatattgttggatgcacagctaaaaataaatgatgctcgacatcattatctgtaaaaatgctattgataatataacgagaaggagaaaagatatggcatacacaatgattcacataattatcgcagaggaaatattttcgaaattttctttaaatataaatgaaaatgattttttgataggaacaattgcgccagatgcagtacattcatgtgaagaatttagttacaaattgaaggaaaaaagtcatttttttcccgaaagtttaacttggggaaaggttgatacatgtaccaaggcaaatctatggatggattcagtgttggagttttatgagaaaaacaaagaaaatattaattcaagttttttgttggggtatattattcatgtttttgttgatatatataatgcgctttattattactacccctatgtcaatgcattctatggtactaaagaagaaaaagttgaaaagtataaaatcgaatctcaaaacttagataaatatttgtacacaaaatatgccaagatatatgatctctcagataaattatataaaggaatcggttataatatagatggtattattactgcggagcagatagaaaaaaggagagaatatttgatttccgcggaatggaaaaaagcagtatttaccttagaaaatgaaatatgcactttgaatagcgtaaaaaatataaaagaaggtaccattcaatttatatataataattttatatgtaaatatttactagatttgtaaaaacaaaaatcaaagcagcaaagcaattagagttttcgaaatccgtaagtgacaagacaatttttttgtcatagctcacggatttttgatatattggcaggcataatatgatttctaaataaccagacataagaaatattatggtcatacatcaatttgaggtatgggaagtcttagttaataatattacagattagaaagtataaaagctcgacggttctgaggaatctgcagaacatccattgcctgttcagcagagaagttaagggatttcataatactgcgaacattgtctaaaaatagttgatttttggtttaagccagcttatcgaaattttgttgattttatggcacgaaaaacagactattggaattcggtgggtcagactaaattccatcagccatatttaaaaatgttaaatgctcatttccagtctgacagcagatttcgatcggttaattggttgccttcaatataaagatccaacgcttgcaaaaagttataaaaggttataaaatagaataaaagttataaaaggttataaaacaaataaaaagttataaaagaatatatttgatgttggggtcaaaataccttttgcccccaactgatgctacggattgcttcattgcaaagcaattctcgcaatcctacaaacacctccaatcccgcacatttgcaagcaaatctgcttcttgtcggtgtttggcgggtcaagccaccagataacaatttgtatgcaaacatacattgctatctgcttttgacccttgcatcatatatttgcaataatctcataaatttaaaaaagcagggaaaggagacttagtcgtgaataataatccatttactctggcctttggaaagaaaccattacaatatgtgtccagaattgttcagacagatcagatcgtggaagattatgtggcagatcccataaccaatcagatatacatggttacaggagtccggggttcaggaaagacggtgatgatgaccaacattgcggggattttttccgaacgaaatgactggattgttgtcgaattaaatgcgaccagagatttgctgcaaagccttgcgtctaagctatatgcggttccgaagctgcatgaatgctttttgaaagccagactggatttttctgcgttcggtcttggagttactattgaaaatgcagcaccggtgacggatgtagaagatatggtagcgaaaatgctggatcagatacggaagcagggaatgagactgctgatcacaattgacgaggtggtatactcagaacagatgaaagtatttgtgagtgcttttcagattttcatgcggcaggactatccaatctttttgttaatgacaggactgtatgaaaatatatatgaattgcagaatgataagtcgctgacctttctataccgggcacccaaaattattctggagccgttaagtctgacagcagtgtgtcagcactatatggatatattccggttagacaaagaaagtgcaggaaaaatggctacgcttacgagaggatatccgtttgcatttcaggtgcttggatatctttactgggaacatcgggatacaaaaaccgtgcaggagatattgccggaatatgaccaatatctggaggaatatgtatatagtaaaatatggtcggaaatgtcggacaaagacaaagaaatcatgcagcaactggcggaaagtggagaaatcaaggtaaaagatctcagagaacagctggagatgagctcggagcagttttccgtgtacagagagcggctgaaacgaaaaggcgtgatcgacacgaggaaatatggaaagatttccatggcattgccaaggtttgaagaatttatccaaatgagaatgttttaatagacgactaagacttcctgcagccgggaatggaacccaccctggaggctcaagccgtccagatgcgtattcatcgaaacattgcaaagcaaagatttttcagaaaacctaacgatctgcatcaattttcaaactcagtctcccagagcagtcaaacttcagaggcaaaaatcataatccaattttccgaacataagaaatattatgggtatacctcgattttttggcgggggcaggaaattttagcagatcaatttaagagaaaatcaaaacaggcacccttgcgggtgcctttattattccttacgtttattcccaatccattaacttcttagcggctgccacgacaagctcggaaaccttctgatgtgttgcttccgtaggatgccagaaggtgccgataccatccttttcttcgtcctgcagtggaagctgcagatacttgatggcaacatcctcgttggctttggaatattccttgacggcatgctgaaccgttgagcagagcgtctggtccatggtgccgtgcatgcacaggatctttgcctgcgggtgcttcgcatgaatgttgcggagaaatccctgatagacaagactgaaagcctttttgcgctccggataattcttcgtatagctggcgtcgtttgtaccgagatatacggtgatcagatccggctcaaaccgcgtgtgatcccatttctcccaaagagaaggaggttcgtgaaaaaactgctggcagcagccggcgtccgtgtactcgtagagcatcgggacaagccaggaatcatctgcctgatcgccatcgccgatgtatgccgagatcacccccttgccattccaggcaacgatttcgaaatcggtgtccagtgcgcgggcggtcttaacggagtaagactttgtcgggttctctacggctgtgttgtgaagctcatcagaagcgcttccctctacgccgtagccgcaggtgattgaatcaccaatgatctggatcttacgcttcttcggtgcaggtggcggtaacagctcctcggtatcaatgatcagttcctcgataccgcaaatagcatattccggttcgctgtatttcatgatcgtaatagtgaccgtctccggtatctctgattcgaagagatccacggtctgtctcagcctggtcagctccacgcgcttcgcaggttcgctcgcatcgttgataaaaataccgatccaggcgtggtgttcctctggccagtccgccggatcagaaatgatcacagcctgtgctttctgaccggtaaaacaaaaagatatggaagtggcagagtatcccagataacggacattatcgcggaaaattgttctgccgctgacttttacatgatcttcggttggcaaaaaatgcattttgtcctccattctgaagtgatcttcgtgaaatatgtacgactgcagtgcttgaaagaaagaatacacagtcgcatatatctattttaacacctcataaaaagtatgacaagcagattgacacatattccgtcaaatgatatcatggagattggtatagcgaaagttatcttcgctgtacttgtggtgaaaattagaaaagagaggttttagaaatgggattactgcaggactggagagagtacgcatatggcgtagatattaattcaaaggcaggccaggcaatctgggcaaagtattttaacgaagagaaggctgtatatgagcagcttctggcgaatccggaggaggttgtttccggcaccgtgaaggagctcgctgacaaatataacatggaattgaagtatatggttggttttctggatggtatcaatgagagcctgaagacaccaaatccgatcgaggatatggatgagaactcacaggtaagtcttgatattgatctggagcagctttactatcacatggtagaggcaaaggctgactggctgtatgagcttccggcatgggacgagcttttaactgcagagagacggaaggaactctatatggagcagaagaaatccggtacgatcgttaaagagaagaaagtgggcagaaatgatccatgtccatgcggcagcggcaagaagtataagttctgctgtggaagagcttaacagacggaatcggaagaatgcagagcaaaataaaagccatccatgaatggatggcttttaaatatcatttacagtaactgcatctggacatcttttgttaatacatccgtgtagctgtaagaaaccgtctgggttgtggaatccaaatcattcacgatttcaaccagaaagatgcttggatatgttttacaaatggttccttcggtgatgtcaatcttatgtcgaccgcgatttgaacggattttaactttgctgccaatattcatacctacagaacgtctaaccttattgatatcggactgactcatagtttgcctcctttgattacgggattgtcatgaatcaaaatatgggggatgattcgataacaatcgttagcagtacagtaaaatgttaccacgaaaccgtgaaaaagtcaatattaggcactatatgtagatgtaaaaaatgtcgtttataacaaaatatagggagtaagaaaatgcagcatatcatgatagatctggaaatgaataaaatagaaaagcagtggcgaggcaagaacaagctgtccagcgaactgatagagatcggagccgtacgaatggacgatcactttgaggtggtggatacataccagagttatgtgaagccggagtttggaacgatggatgccgtgatcattgatctgacagggatcactgacgacaaggtcaaggatgcacccggatttgccgaggcaatggatgatttcaccgagtggatcggaccgggggagacacagttttattcctggagtatgtccgacatccgtcagttccagcacgaagcaatatttaagagttatccgggaacgatcattcagcagatggaagagaactggacggactttcaggaggagtttcggagacttctgggacttcaccaccgcatcaagctctcctatgccgtatcggcggcggattatgagttccagggggcacagcatacggcactggcagatgcggtcaataccgcggagatcctgcggttgtccaaggatccggagcgtttcctgacggtgatgaagccggtgcttgatctggtcagcaaggagcgcaaggagcagacactgatggatatgtgtccggacttttttgccgcatttatggaggcagcggaaaaggacgccgatgagaaaacggatggggcgaaagcagatcaggctgactgacctttcgtgaggaatgagtctgtgaaaagatcgggacgaccgggctttcaaagtagaataccccaatgaaacaagaaagggcagagagcttgcttttacagcaggaacctctgccctttttgggataatctcttaggagttatttcacaacagtaagacgaagccttgccttatgtccgttgtaggttttcaccgttaatgtggtctttccgcggtggcgggctgtcacacgccctgtctttgatacccgggcaacccctggatgggaagaatggaacgttagcttattgctggcggaaccggaggaaagctttaccttaagtgtgaaatgtctgcctttcttcacggttttccggttcttcgccggtttaaacttcaccttggaaggggctttcttaatattgaaacgatataaataggatgtttct

SEQ ID NO: 1107 - DNA, 21251 bp, unidentified
  source 1..21251: mol_type = unassigned DNA
attcactcacatgctgtaaattcacgataacgcctttggaacaaaggaaaaaccgagaatcactaaggagtggagcgactgttttttgaaaattaatggcggaagactgttttagcacctttttttctaaatgaacttctgtttggcgcatcaccgatgataaatagtacaaatccgaataaggaatgtacagcggtgtccgctctaccataagtggaagcttccttgctttcccacgaaatttgcgtaaaaagggatttaatgtatcttccagcttgtcgtaagtaagtggcttaagcaaataacgaaaagcccctacttcgtatccttcgagtgcatattcgcggctggacgttaaaaaaataattgtgcagtcgcagcctgcttctaataatttgtgtgccgcgtccataccggtaatctcatccatgaaaatatcgagaaagacaaggtcaaaggaatggtgggaaagccctgccaaaaaaagttcacccgactgaaacgggtaaatcgtaatactgattccgcttatatcgaaataacgtattagcaattcctgtagtaattggcggtcgctttctgagtcatctacaattgcgatattcattgctgcctcctatcattttgcgacatttacctatataaaattttaacaaattcataaggaagggtcaagcaatttttcaccctttacccacaattctgcaaggtttgttgcaggatttagaaagagtcgatacaataaagaaatgagcagaaaggagaaattttaagatggagataaaaaaatatcaaaaatggacggcgcttgtgctggttttgtgtatgttattttcaatgaccggctgcgcggacgaagagaaagaagcgaaacagagtttcagtaaggaggatacttgggttgtttattggtatctgtgtggcagcgatttggagagcaattacggtgcagcaacagcagatctaaatgaaatgatgcaggttaagcttccggaaaatgtaaaagtggtaattcagacgggtggtgcgtcaaagtggcagaatgatcaggtgaaaaccgatcggattcagcgttatgagtacagtggagatacacttactttaaaagatgaaactgagcaggcaagcatgggtgacccggagacgctaaagggattcctcaattatgcagaggaaaactatccggcagaccataagatgttgttgttctggaatcatggtggtggaagtgtaagcggtgtatcttttgatgaaaattatgaaatggattcgttggtattagacgaactttccgctgttatgaaagatgtctacggtgacaaaaagccgtttgaggttgttggttttgatacctgcctgatggcaacggtagatacagcgaatgtgttccagaattatgcgtcctacatggtagcgtctgaggagacagaaccgggaaatggatggctgtacagcggatggctttctaaacttgcaaaaaatccggctatgaacggtgccgaacttggtaaagaaatctgcgacagttttaaacaaggttgtaaacaagcaggaacagatgcggaaattacactttccgtaaccgatttgtccaagacaccggcaataattgaagccttgcagaatatgggtaaggtcgttttgaaaaaagcagaaaaagattcttctgtatgcgcggaatttgccagaagtgccacgaaggcagaaaattatggtggtaacaatgataaagaaggatacacaaacatggttgacttagggcatttggcacagaatgcagaagggctgattggtgagagcaaagcgcagattgaaaaagcactttccgatgcgattgtttataaaataaacggagactaccgccgtcatgcaagtggactttcggtttattattcctatgacggtgaccaggaatcagcagcccgttaccagcagattgccgcagagaatatttattcttcctttgtcaattattccatcggtgccaatatatccgatgaggcattgagtgaaagtggtgtcggcgaagtacaggaagtaagcggatttgacggtgaccttgagatgtcaattaatgaaaatgattacatccagttgaacattgacccggcaaaattagatagtattcaaagcattgctttcaattttgcttatatcagtgacgacggaaaagcaattgtctttttaggaaaagataacgacttagagtgcgactgggaaaaaggtgtattccaggataacttccgtggcgtctggggttctattaatgacagagaatgttacatggagttagtttatgagggcgatgattataatttgtatacggttccgattaaattaaatggagaagacagctatttgagtgtcgcctatgattatgaggcaaaagacttctatattcttggtgcaacttccggtgtggatgaatccggacaggcgggaaaagatatgcggccattggagaagggcgataaagtagctattgtctattacgcacagagtttagaaggcgatgatgaaattcaggaaatgccggatgaggaatttagctggaaagaaagttaccagtttaaggaaaaagatttgccggatggaaaatatgcctttacttatgaagtaacggatattaccggtaagagcacgatgtcggacgttgccttcctgaatttgaaaaatggcgagattaagccggagttataaaagaaatttataaaaaatgcagagactttaccgtttctgcattttttttaccgttttgacagaaagcgtaggatttatccgcaaagtatgatattttgggagcacggaatcttttgaggaggggttttatgcgaatttatttatgtgatgaatccgcaaaagagcggtcagcgataaaaaagtgcgtagataaatatctgcgtggcaattatcaggtaagcataaaggaattcagctcggtcgaaaatatgttatccgaacttccgataaacaaaccgagtcttatgattgtgaaccttccggagcaaaagataaaagaccctgtgattgtacaaaaacttcaggggagaaagagtaatcagaagatgattatgacagcagcatctgaatgctatgcaatggatgccttttccgtatatgccgatggctttttgataaagccgtttgtgcagcagcaggttgattgtgcgctgaaccgttttcagaatatgttttatcaaatgaaaaaaaacatatcatttatggtagaccgcacaatgaaaagattttgcttagacgaaatcatttacatggaaacatgtgggcatgcgacgatgatacatacgctgcatggggattttcggacaaattgttcgctcacgagggcaaaagaaaaaatgccagatggcggtgattttgttacctgcgggaaaagttattacatcaatgcgggctatattaaagatgttaccaaaacagaaattattttacggggaggtgaacaaatctttattccgatacgattacaaaaggaattatgcttgttgtggcaaatgaaagtaaataacaatatttaataaaaaattaaaatttggaggatttagaaaatgaaaaagattgtatcagcagtattagtatttgtaatgatgttaagtttggcaggatgtggtatttcttatgacgacatcaaaggtgattggacagcaaagacaatcaatggtatgacaattgatgaatatgcagcatcccttggcgttgatcctagtcaggcaactgtaaatgtaaatatcacagaagatgataaaatgacaatggtaactgcaaacggtgagacaaaatttgattatgagagacgttctgacggaattgaagttaaaatggaaggtaaagatgaaatttacatgtccatggcatatgacaaagacaagaagacgctcacatacaaattagatttgggaaatggacagacaatggaagttgttttggaaaagggaaaagctgatatgacacctgttcagcaggacgctcagactcagactgacggagctgttgaagaaggagctactgaagctgcacagtaaggaatatgatgaaaaaatgggacaaatggataacgttagcaccaattgctttggtgcttgcgtttctgccccttgttgtaggcaggataaacagtaaaacatacacagagaatgaaccgtggcttcccgcaaatgcggttgagtcagatttctttttgtatggtaaattgtttgtcctgtttttttgctgcctttttatgattgtgattttggctcgtatgcgcttttggcggcagattcacgagatgccaaaatatcttcttctacctatattatatggtggttttgcaatggcatcttctctgcatgcaaatcatccttttctgagtgtgcgggggatgaccggcaatatgcaggggcttttcgtaatactttcgtatctggttgtgttcttttacagtttttttggggtgaaaaaaacagaaaatatttccatactgataaaaatacttggcgtctcaattggaatccttggcgtgattggtatttcgcagttctttggatttgatttattgtcaatgggctttgtgaaagagtttctaggtgggagaaaggcgagagtttcacattttatatatttaactttgtaccattggaactatgtggggagctatgtatcgcttcttctgccggtgacggtggcaatgattgtttattttcacgaggcagggaaaaagcgggagagaaccttttggttcgtgcttttttatctgctaatcttctgcctttttggttcacagtcgcggaccggcacgcttgcggtactggtttcgttttgtattggcggcgtaaaatatcggaacaaagtctgtcagtacaaaaggacaattctctgcgtcttggtttctgtgcttgcaattttatttttctgcaactggtacatcacgggggatatttttggaaaatggcagcaggttcgcttttctaccaaaggaagtaaaaagttatcttatattgaaacgaaggataaccatgtgaaaatccgctataaaaagaaaaattattcttttgtcatagagggaagcggtgaaaatatcgcgcttaaaaagacaccggatagaaagtggaaagcattttcatttgaaaagaaagcatttgcggacggtgaaaagaccgtttatggctatgaaatgaagtacaaaaagagtgtctggcggtttaccaatcagcgtggggatgggaagtattattatctcaatgcaaacggaaaatgggatttgtgtattcacgccgaaacggcactgccatcgtggatgaatgaggtggcatcgcttcgtggttttgtgtggtcaagaacgataccgctgttaaaagattatgtgctgcttggcgcggggcccgaccagtttggttttgtgttcccgcataatgattatgttgccagatatcagtatgatttgttgacaacttattataagaagccacataattattatcttcagatgggaattgagacagggtgcctctcgcttgttctgatgcttgcattttttgtgatttttttaaagcgtggctttgcggcggcgaagggaaagtgccatacgcaaaaagagtattttatacgggcaattttgatttctgtattaggatatctctttgccgggatgtttaatgattctatggtagtaacagcgcctgtgttctggtgtctgttaggactgggagcgggtggaatgggtgatagagttaggaatacaataagttagacttacctaaaaaaggaaaaaccacaaaccagcgagaaacataattcgtgaagcgaattctctgtttcgagtcggtttgcagtttttccttttttatcgtaagaatagccttattatttaccctctcaacgcttcatcaattgccttagcggcagcttttcctgcacccatggcaaggattacggttgcggcacctgttacggcgtcaccaccggcgtatacattatcacgggttgttaaaccggattcatcctttgtgattaagcatccgcggttatttgcttccagaccaggagttgtggagcgaatcaatgggtttggacttgtaccaatggacatgattacgctgtcaacatcaagaacaaattcgctgtcaggtttttcaaccggacggcggcgtccgctttcatccggttcgccaagttccatctcaacacatttcatgccacataccataccctcgtcattgccaaggatttcaaccgggttatttaatgtcttaaagatgattccctcttcttctgcatgctcaacttcttctttacgggcaggaagttcttccataccacggcggtatacaatgtaaacttcttctgcaccaagacgttttgcactgcgggctgcatccatagctacgttaccgccaccgacaacagcaactttctttgcgtgctggattggtgttttgcttccatcgcggtaagctttcattaagttaatacgagtcaggaattcgtttgcagaataaacacccttcaaactttcacctgggatgttcataaaacgaggaagtcctgcaccggaaccaacgaagattgcttcgttacccatttcgaaaatttcatcgatggttaatactttaccaattaccatattggtttctacatcaacaccgattgcttttaagttatcaatttccttctgcacaattgcttttggaagacggaattccggaataccataaaccaaaacgccgccggcaaggtgaagtgcttcaaaaattgttactttgtatcctaatttagccaaatcaccggcaacggtaagaccacttgggccggcaccgataacagcaactttgtgaccgtttggctccggtttaaccggtgcgtctgtgcagtgctctctgtggtagtcagcaacgaaacgctccaatcgtccaataccaaccggctcgcctttgatgccgcggacacatttgccttcgcactgattttcctgtgggcatacacggccgcagacagcaggaagggaagtggattctgaaagaatcgcaaaagcaccttcaatatcttcatttgctacgcgctcaataaatgccggaatgttaatctgaaccgggcaggcgctgacgcaaggtttgtttttacagtttaagcagcgacgagcttcgtttactgccatatcataagtgtagccaagagctacttcgtcaaagtttttattacggacatccgggtcttgtaccggcattgggcatttattcatatccatatttctctctgccatgattaattttcccctttcttgagtagattgcaatattcatcgcgggcgtgtgtctcaaattctttgtacatcgttccacggtgcattgcttcatcgaaatcaacgaggtgtccatcgaaatccggaccgtctacgcaggcaaatttggtttcgccgccaactgtcagacgacagccgccacacataccggttccgtcaatcataatcgggttcatgctgacaactgttttgatgtcatatttttttgttgtcaggcatacaaatttcatcataatcaatggtccgatggcaatgacttcatcgtattcatttccatcctgaattaatttttccaatgcgtctgttaccagacctttttcgccatagcttccgtcatcggtcatcatgacgagtttgtcactggctgctttgaattcgtcctcaagaattactaagtcctgattacggaatccaacgatggcgtgaacttcagcacccatctgatgcagtttctttgtaatcgggtaagcaatggcacagccaacaccaccgccgacaactgctacttttttcaatccatctgtgtgtgtaggaacaccaagcggacctacaaagtcgtgaatgtattcaccttcttttaaggtgtctaattccattgtaccggcaccaacaatctgataaataatggtaacggttccagcctcacggtcaaaatccgcgattgtcaaaggaattctctcgctatcttcttttgcgcggaagataataaactgtcccggctctgctttctttgcaatcaaaggagcctctactgtgattttactgacagtaggattcagggactttttttcaacaattttgaacataaacaaaatcctccattcatctgtgtacataagtcaacacaattctatcatattataagggtaaattcaaacggattcttctggaagtgtaaaaaatatattaaatatcacgattttacgttgtttttcttgacaatagggaaagcgtgatgtattgtttacaatatgatgtggttttgaaaactacatggaacataaaaataatttgcaggatatgatataggaggaacgcaaatggcattttcaaaaggtgatattgcagcaccatttattcaggttaaggaagatgaaaacggtgttttgcaggacattaaatttgtaaatgatgataattttaactttgcttatgatgtggtagataagatggcaaagaaagatccggacaaagtagcaatgcttcacatttcaaaggatggaaaggaacgctcctttaccttttatgatatggcacgttattcttctaaggtggcaaactatcttcagtttttaggaattaaaaaaggcgaccgcgtaatgcttgtgttaaaacgccactaccagttctggtttgcgattttggcactgcacaagattggtgcagtagcaattccggcaacaaatcttttgctgaaatccgattttgaataccgttttaaagccggtaatgtagatgcgattctttgtacggcagacggtccggtttcccgtgaggttgataaagcgtgccgcagttacaaaaatctgaaagtaaaaatcatggttggtgccagccgcaaaggatggcgcagctttaacaaggaagtaaaatatttttcaagtcatttccgcagaccacatggtgagaatgcaatccatggtgatgacccatcgattatgttttttacttccggtacgacttcgtatccgaaaattacaacccataactttaagtatcctttgggacactatgtgacagcgaaatactggcatcaggttgacccggacggcatccattttgctatttccgataccggctggggaaaagctttgtggggtaaaatttatggtcagtggctgtgcgaggcatgtatttttacctatgattttgataatttcgatgcaaaagaaattcttcatatgattgagaaatacaaaattacaacattctgtgcaccgccaacggtttaccgtgtaatggtacatttgaaattagaccagtacgatttgtcttctttgcagaatgtaacaacagcaggcgaagcactgaatccggaaatctttgagaaatttaaggcaaaaaccggacttacactgatggagggatttggacagaccgagacaacattgacaattggtaaccttgttggtacaacaccgaaaccgggttccatgggtgtgccgacaccacagtatgatgtacagattatgctgccggatggaacacttgccggtccggaagaagagggtgaaattgttatctgcacagaagatggtgcaccaaatggtttgtttatggaatattacggtgacgaagaaaagacacagaatgcatggcatgatggttattatcacacaggtgacactgcctactttgatgaggatggttatctgtggtatgtcggccgtaccgatgatgtaattaagtccagcggctatcgtatcggaccatttgaaattgagaatgaaattatgaaacttccatacgttttggagtgtgccgttacttccgtgccggacccaatccgcggtcaggcaatcaaggcaagtatcgttcttgccaacggtgaagagggaacggataaactgcggagtgagattatgaaatccttgaaaaagaatattgcgtcatataaatggccaaaaatacttgactttacgaaggaattgcctaaaactataagtggtaagattcgtagaaaagaaatcaaggagaatgactggaatgaaaatgaagacaacgaatagtcggcttgtcatcaccggaatgggtgctgtgacaccgattggaattggcgtagagaattattggaaaaatcttgtggccggaaaatgcggtgtggaagcgattacccgctttgacaccgaagagctgccggtaaaaattgcagctgaggtcaaagattttaatgcggaagactttatgccaaagaaactgacgcgtgaaatggacgtgtttatgcagtatggttacgcagcagcaatggaagcaatcgcagatgccggagaggaaattactgtaccggagcgcatgggtatcgtcgttggcacggcacttggcggtatttcaccgattgcagaagtgcaggatggattaagcaagggagaacataaaaaagtcagcccgcgctttgtcccgaaaattatcggtaacgaggcagcagcccaagtggcaattgcaaaaggctatcgtggtccaagtctgacggtgagcacagcatgttcttccggtggtgacgcaatcagtaccgcctgcatgttaatcatgtccggacaggcagacgccgttcttgcgatgggaacggaatccgcattatccccattgtttattcagggactggcttcagcacatgctttgtccaccaataacgagaatccgcagcaggcgagccgcccgtttgataaagaccgtgatggttttgtcattggcgaaggcggcggtgcgctgattattgaaacggaagaaaatgcaaaaaaacgcggcgctaaaatttatgcagaacttgcaggattttccaactgcaccgacggctaccatgtaacgagcccgcatccggaaggaattggtgcggtattctgcatggaaaaagcaattgagcatgcaggtatcacaaaagaatctgtagattatattaatacacatggaacttctaccggtatgggtgatccgattgaaacgaatgcgattgcagaacttttttcagagcatgccggtgaaatggctgtgacttcgaccaaaggcgcaaccggacatatgatgggtgccggcggtattaccgaggcgattacatgtatccagtgtattcgcaccggtgttgtgccaccgactttgaatttggatgaattggatgaaaaatgtgcttcattgaattatgttccacataaggcaattgaaaaagaggttcgtgtggcaatgagtaattcgtttggatttggcgggcagaattcaagtgtgattttttgccgctacgagtgataaataattatgatgtaatagttaataaaaagagatggttaatttcccattcggaatcgcttccgctgagagaacacacgcagcggtgcgtgagggcagactacgccctctgcgcaccggcggtgttcaacattcctcatggtgaaattaaccgtctcttttttctcattacatcataattagttttgacaaaagaggaattccttatgcgggcaagcgagtcaatgcccctgctgttacgcagctcaatgagcgaaaacgcccatgatgcgcaaaagattccgcttgattattgcaattaaaaaacattgtaacagataaaaaaacaactgaaatttttgcatatttttcaaaaaatcggaaatcctataagaaagtcacaagtggatgactttggaaaggatgattttatttgggcaagaagaaattttttgcagcggcttttgcagcgtttgttttgtgggctattgtgattttgcagactgtattaaccagatggtatgtttcgcagactgcgtttgaacaggcatttgcaaaaagtgatattatgaaagcatcaactcaggaggcggctgctgatacaagaaatacaaatagtgacaatcgtgtgatggaaggtgtggtaaatggcaggctgaatgcatcggagcagcaaacaatggcggacaaactttttcgtcagtttggcggtggagaagtaatgaacagcaattccgatagcagttcggattactatgtcgcatacggctatacaagcggatttgaaagttccaaaaaggtaaatggcagacgcataaatatgatggctgcattttcctatgatgaaaaagaagatgttacaaaagttgtgtttggaaccccactcattaacagtgatttttgattttgtgggaatgtttattttcctgccgcatacaataaaagaaaaaggcgtgtgcgtatgctcaataaactttggggatttatgattctcattgggattttgtttgcggcggcaaccggcaaaatcggagaaatcggaacagcagcactggattcgtcaaaagaagcagtgactttatgtattacaatgcttggcatcatgtccatgtggacaggacttatgaatattgcaaaaaaggcaggaattatcgatgcgcttacaaaagcacttcgaccggttcttgcctttttatttccgggtgtgccaaaagagcataaggcaaatgaatatatggccgccaatatgattagtaatgttcttggacttggatgggcggctacgccggttggcttaaaggcaatggaagaattgaaaaaattaaatcatggaagctacattgccagtgcggatatgtgtacttttttgattatcaatatttcttctctgcaattgattccggttaatattatagcgtatcgaagccagtatggttctgcctcgcctgcttccattcttggcatggggctggtggctacaattgtgtcgacggcagccggtgttattttttctgtaatagcaagaaaagtatcaaagaaaaagggggagcggtaaatggaagtcctttattatatttcagattgcatgataccattcgtgattctctatcttgtcggctatggcatgtgcaaaaaagtggatatttttgattcgtttattgagggagccaaagatggatttttgacggtctataaaattctgccgacgttaattggtttgatgattggtgtaggaattttgcggcagtccggttttatggagtggctcgccggtatatttgcaccggttgtaaatatccttcattttccgggcgaactgcttccactttttatcgtgaaaatgttctcatcctcggcggcaaccggtcttttgcttgatatatataaaacatatgggaccgattcttaccttggtacattagcgtcagttcttatgagctgttcggaaaccattttctataccatgagcgtttattttatgacggcgcgcgtgaccaaaacgcgttatacacttaccggtgcattggtggcaacttttgccggggcgatggtggcggttttgctggtgggaatgtcgtaaaaaaattccttacttttgcaacattttccagttatcattcgttatataagtacaaggtacatgattaatggacgtgtaaatgaaagtaaggagagtgattttatgaaaatgaaaaagattttggtgtcgatgtttttgctgtttttggtactgtgtctaaagtcgaatgtttcaaatgcagcggaaacggatgcgctgaaccggtgggatttaacaaaggaatatactgtggagcaaaacagtatacgatatcatgcgtatttgtcaaaggacaaaaaagagagctggatttttacggcggatttattggacaaaaagaaaatgctagatatcataattcctcaaaaaattgaaaatgcgccggttgtgagattgggatatagtgcagatttatatcagggggaagaagctgcgtggccacaaaacttatttggtgtgacaatgtttgattattgcgatgccgacagccgcccgactttggaaatacttaatgttaaatccgttgtgatgcctgatgcaattcgcgagatgggatcttgtacttttggtgcaatgggaaacttaaaatatattcatttgtcagacaaacttacaagtttgaaaaatggaacatttttcggaagcaaagatattaagaaaattgatttttcggcaaaatttaaagtggaggctgcgaatgtttttggctactgtgatgggctgccggggcttgcacatgaaactaaatatttaaaaaatgacacacttacattttccggtaatatggttatcaatcaaaccgaaaaaacattgattcaggtaatgccggatacaaagaaaattacaataccaaagagcgtgaaatggattgagccgacggcgttaaaaaacaccagcctaaaaacggtaaaagtatcgaagaaaaacaaatattttgctgttcataaaagatgtttgtatcggaaggcagaaaaagaacttgtttatgtgtttggcaagggaagcacgttgacattgtcgaaaaaaataaaacagattagtgaagacgtggttgtaaccaaagctaaactgaaaaagctaatcatttcgcataaagtaaaacggtataacaattggaaaaagccatttgttaaaaacaataaaaagataaagatttattaccgtgggaaaagagtgaagtagggtgtgacagtttgaacggaatttcatacagtcaaatatttttaaggaggaaaagcgtatgaaaaaatttatattatcaatgacaatgttggttttggtgctgtgcttgaaaacgaatgtttcaaatgcagcggagatttctgcgatggagcggttggattactgggatgtttctaaggaatatacgattaccaatcaggatgcaacctatcatgcctatttatcgaaagataaaaaagaaagctggatttttaaagcagatgttgcaagagacaagaaaaatgttaaggtagtaatcccggataaaattgaaaatgcaccggttgttatagttggagcaaccagtggatatgatgaaattttggcgaaacaaaatcttggaagtgttggcatacagggaccggatggctcttattatttggatgcggaagtgacattatggggagatcttttggaaccatggcattgcccaggtccatatataaagaatattaaatcaattacaatgccggacacagtgaggtatcttggtgcggcggcgtttgcttacacaacatccgtagaaacgattcatttgtcaaatcaactcgtgtcactgcgagagtacacttttttggaatgtaaaaatcttaagaagatagatacctctgcaaaagtaaaagtagaagcaaaagaagcatttaccggctgcagcaaactggcaggacttgcttatattacaaagcatttagacggagatacattatcattttcaaataacatggtaattgatttgacggaaaaagatctagttcaggtaatgccggatgcaaagaaaattataataccgaaaaatgtaaaagatatagaagcaactgcgtttgtaaatactaatattaaaacacttaaagtatcgaagaaaaacaaatatttagcaacgcataaaagatgtttgtatcaaaaaaagagtggagaacttatttatgtatttggtaaaggaagcacactgacattatcgaaaaaaataaagaaacttagtgaagacgtggttgtaaccaaagctaaactgaaaaagttaatcatttcgcataaagtaaaacggtataacaattggaaaaagccatttgttaaaaataataaaaagataaagatttattaccgtgggaaaagagtgaagtagggaggttttgcttatgagaaaagaaattttgctggcgtgtgcgtgtgtactttgtttatcagcatgtgggactggcacaaaggaacagtcaaaaaatccgcagaaggcgatggaggtaggagcagaaacaacgccaaaaagtgttgaagcaacgagcagtcctatggtacaaaaaataaaaaacacaagcgggaaaagggaaaatccaaaagatttgaaacaaataaaattatccgttgagcgctgggacacgaagcaaaaagatttttctgttcaggcagtcagatttggcactggcagtggctgtgtttcggaatttggtcagaattgggagtttatttcttataaagaaaatctcaaaacggtccaaaagaaaaatccgtcgtattttgtggaattaactgattatctggatgaaaatcacacaaaatataaggcggcgcgttattttaagaataacaattcttatgtcctttatgaaagaagtgagaaagggaagaaacataattatttgtgtctggaaaaccaaatgcttactttggagtatccgaaatatatgaacgagaaccaaaagtatatttcttttccgtatccatcatgtaagagtctttctgattttaaaattgaagagtcttgggagaaaaatgaagacttttacgaaaaggaattttggcagttatattcatatgcggatttaaaagtattttatcagaattttgaaaaaggtactgccgaatgttctgataaaacgcagactattcttgtgaaagcaatggaacacgattatgataataaaacaagtgatgcaagtgttttgcttgattttaaaaatcataattttattgtgaagaacccgcagggtaaaaagatttttgataaaaatgacgtatggaaagcgtatgaaaagcagtacacaagtgccggaaagtttggcagtaaagagtttttctataataaaagcagtgtgaatattttatgtgtggaaaagggaaaaagaacggtatgcattgaaaatcaggatgtgagagataccctgtttgaggatttgggctggaactgtgttggaacaagtatggatatgaaggtttcgccaaaatcaaattctaaaaacatatatttagatgttacgctccatatggaagaggatggtaagtgggataatcatgcggtgcttaaacttgacaaagatggaaaatttgtggaatgtaaataatggttatgaagtgtaatgaaatatgttatactttgcctgcgggaaactagagagccgggcggcttaccctctttttcggaggggctaaccctccagacgaaagaaaggagggcgttgccaatgtatgttacatatactgatttaattcagattggaatattcatttgcgcccttgtcggattgtgttatacgattttcaagggaaaacgaaaatagccgccattacagcgaataatgacggctaatcttacaaagatttgatttagtattcgaggtaagccgcttttctagcttccctctttctgtgtctaatatatcatattttcttagtgtgtgcaagaaaaaaggaattcttttgttgtaaattaaagtgcttctagaaatcacatgtttttccgggtgataaaacatattgacatttgggagaaacaaatgtatactatgatgagataaaaggtttacatttggaaaaacggaggatgaacaatgaaagaaaaaaacttttttaacctgaaagatatggtgttaatggcgttatttgcagcacttacgtgtgtgcttgcaccactttcggtaccgattggaccagtgccgatttcactgacaaacttagtgatttattttagtttgtatgttcttggatggcagcgggcaaccatcacgtacattgtatacttgctgcttggcctggttggacttccggtattttctggatttgaaggtggcgttggtaaagttgccggtcctactggcggttacttaattggatttattttcatggcaattgtatgtggtcttttgatgcaggttaagaaggataagaagattgtaaatattgttttctgcgttgtaggaatgcttattggtaccgcgattgcatatgcatttggtacgatgtggttctgctattcgacaggaacaggacttggcgcagcaatggcgctttgtgtaattccatttattccgggcgatttgattaaaattgcgattgcagcagttgttgcaccgacggttgcaaaccagataaaacgaatttaagaaaagattcaaactaaaaaggagcagctctccatgtaccaccgtgtttacacgtaagagacatggataactgctccttttgttttattcgttatgcaggaaacattaatcgaagtaatcaattttcattgcatgttttacttcactcaaagtaccggcagcgacttctttagccttaatacttcctttgtgcaaaatttccataacggctggaatatctttttcaagttcttttcttcttgcctgaattggagaaagttcctccatgataacagagtacaagaatttcttaaccttcacgtcacccagacctccgcgggtgtagtggtcttttaattcctgtaaacaactgtaatccggcaggtattctgcaaacaattcatccttgcagaaagcatccaaataagtaaataccgtgtttccttccaatttccccgggtcctcaatgcggatgtgatccggatcggtgtacatactcatgatttttttgcggatatcttccggctcatcagacagataaatacagttgccgagagatttgctcatttttgccttgccgtcggtacccggcagacggctgcaaatttcattttccggcaaaagtgctttcggctcaaccaaaacctcatcgtaagtagtgttaaaactgcggacaatttcacgtgcctgctcaagcattggcagctgatcctcgccaaccggtacggtcgttgctttaaatgcagtgatgtcagcggcctgactgattgggtaagtaaagaaaccaaccggaatacttgcattaaagccacgcatctgaatttctgatttaaccgtagggtttcgtttcaatcttgaaactgtaactaagttgctgtaataaaaagtaagttctgtaagttcggagacatacgactgaacgaagaggttcgatttctccgggtcaagtccacaggacaaataatccagagcaacttccgaaatgtttttacgaactttttccgggttatctgcattatccgttaaagcctgtgcatctgcaatcataatgtaaatatcatcatattcgccggaattctgtaattctacacggcgtttcaaggagcctacatagtgaccgacgtgaagtttgcctgtaggacggtctcctgtcaaaatagtcttcttcatttcttcctccaatccggagccttgcatgttatcaaatctccgttgcaattttcataagaacaattttaataggtattgtatcaaaagtcaatgtcgggatagaaacagttttgggggaagtgttcgttggtgatttttgttttccgtaatttcgtagaaaagctttgcgtctcgtggttctacgttccactccggtccacgcaggtcagaggttccccgaacctcttgcgccactcccgtttaacaaacgcgtaagggaataatttttcaattcaccaaataattgagagcagcttttgtaaaatagacctgcggttccaatgcaactcttttcccttgatttgtcccatagggatgcatttatcaagtttcatctggagaaattagatgataaaacaactctttctgttaattttcgccttttaggttgcaatttcttcataaattttcttgattagctttgaatgcgacgcaaaaatgcaaccctacagagtattttaagcaaaaagcgttgttttgaaaacacaagaagctgctctcaactagctggttagtggttagcgtcaagtgctcgtatctttttagtttccagtaaatgagcaagaatagtttgtgaagagtgggtacaaacacgtgggtatcaggcatgtgttgtttacatgccgatacccctacgcgtttgtttagcgaaagcacccgctcttcgcaaactattcttgcttatttacggaaactcaaaaaacttcaacgaacatttgacacagctcccaatctaaaatataattttcatattgagtaagtagggtgcggtaaaaggattttattatagcaaaacagaaaagaaaggaaaagcaggatgaaaaaagcaggcagattagcagcggcagtgttcgcggctatgttactcgtaaccggctgtggtgcacccgcagagaaaaaagcggtggaggcaacaccggcacaaagttcaaaaacagaacagaaagaagaggcaaaaaatttgaaagatgcatttaaaaaggattttaaagttggggttgcaattaatccgtatcagttgaaggacgaggaaacaaagaaaatcattcttgaaaattttaacagcattacgatggaaaatggcatgaagccggaggcaattttagaccagcgggcatcggaaaacagcaaagacggcatgccggcgattaatgaggaaaatttggaggagtgcctttcactggcaaaagacaacgggcttgtgcttcgcggtcattgccttgtctggcacaatcagacgccggaatggtttttctgtgaaaaatacgatgcaggaaatgccaaagtgaataaagaaacgatgaaaaaaagaatggaaagttacatcaaaaaagttctgagtttctgccaggaaaaatatccgggcgttgtctatgcgtgggatgttgtgaatgaggcgtgtgacgacggcggcggataccgcacttccagtttgtggtatgaaatttacggcgatgaatcatacattgaggatgcgtttacatttgctagaaaatatgcagataaagatgtgaaattattttataatgactacaatgagtatatgccaagcaaagtaagtaccattgcagaacttgtgaaaaaattgtatgataagaaattgattgacggtgtgggattccagagtcactgggatatgaattatccggataccggcatgatttctgacgcgatgcaaaagtacagtgagattggtgacttggagattcaatttaccgaagtggatatgcataataccgatgattcggaggaaggtttgaagaaactggcagaccgttataaagaattttttgagatgattgtgaaagcggaccgcgaaggaaaggcgaatgtgacgagcgttacattctgggggctttcggatgatgtaacgtggctgacatcctttaaaggtgaagacagttacccgcttttgttcgatgaaagtcacaagaaaaaggcgtgctacgacagtgtgttagcagtcggaaacgaaaagtaatacgcataatgaaacaagcatatagtgtaaaaaatgactgggaggcagtgattatgtcggactatatgcggaaagtgttttatgtgagaaaacgggaagaaaatccggattgctctgtgacagccggttatgtaaaagcagagcggagaaaacaggtattaacgctgacgatttttttggacacacaggatttaccggagg
